United States Patent Application Publication US 2020/0163878 A1 - sequence listing, part 38

SEQ ID NO: 140841 - RNA, 1701 nt, Artificial Sequence
  derived and/or modified CDS sequence (opt3) from hemagglutinin__InfluenzaA__AIW60699
augaagaccaucauugcccugagcuacauacucugccuuguguucgcucagaaacugcccggcaacgacaauuccacagcaacuuuguguaucgggcaccaugccgucccuaacggaacgauuguuaagaccaucacaaaugaucaaauugaggugacuaacgcgaccgaauuaguacagucuucaaguacagguggcaucugcgacagcccacaccagauacuggauggggagaauuguacccuaaucgacgcucuccugggagauccgcagugcgacggcuuucaaaacaaaaagugggaucuuuucguggaaagauccaaagccuauucuaauuguuaccccuaugacgucccugauuacgcaucgcugaggucauugauugccagcagugguacucucgaguuuaacaaugaauccuucaacuggacaggggugacccagaauggaacgucuagcgcuugcaagcggcgcuccaacaauucauuuuucagucgacugaacuggcugacucaucucaaguuuaaauauccagcauuaaauguuaccaugcccaacaacgaggaguucgacaagcuguacaucuggggcgugcaccauccugucacagauaaugaccagauuagccuuuaugcccaggcuucuggcaaaaucacuguguccaccaagcguucacaacagacaguaauaccaaacauugggagcagacccaggguucgggauaucccuagucgcauuucuaucuacuggaccaucgugaaaccaggagacauuuugcugauaaaguccacggguaaucuaaucgccccgagaggcuacuuuaagauuaggagcgggaaaucgucuaucaugcgguccgacgcgcccauaggaaaguguaacucagaaugcauuacuccuaauggcaguaucccaaacgauaaacccuuccagaaugucaaccgcaucacauauggugcauguccucgauacgugaagcagaauacccucaaacuggccacugggaugagaaacgugccagagaagcaaacaaggggaauuuuuggcgcuaucgccggcuucauugaaaaugggugggagggaauggucgacgguugguauggcuuucggcaccagaacagcgaggggauaggacaggcagcugaucuuaaauccacccaagccgcgaucgaccagauuaauggcaagcugaaccguuugaucgguaagacgaaugaaaaauuccaccagaucgagaaggaguucucugaaguugaagggcgcauucaggaucucgagaaauacguggaggacaccaagauagaucuguggagcuauaacgccgaauuacugguagcacucgagaaccaacauacaaucgaccuuacugauucagaaaugaauaaacuguuugaggaaaccaagaagcaguugagagagaacgcugaggacaugggcaauggaugcuucaaaauuuaccacaagugugauaacgccugcaucggcaguauuaggaaugggacauaugaccaugacguguaccgggaugaagcucuaaacaaucgauuucagaucaaaggagucgagcugaaguccgguuacaaagacuggauacucuggaucagcuucgccauuucuugcuuucugcuuuguguggcacuguugggcuucaucaugugggccugccagaaggggaacauucgcuguaauaucugcauauga

SEQ ID NO: 140842 - RNA, 1701 nt, Artificial Sequence
  derived and/or modified CDS sequence (opt3) from hemagglutinin__InfluenzaA__AIW60700
augaagaccaucauugcccugagcuacauacucugccuuguguucgcucagaaacugcccggcaacgacaauuccacagcaacuuuguguaucgggcaccaugccgucccuaacggaacgauuguuaagaccaucacaaaugaucaaauugaggugacuaacgcgaccgaauuaguacagucuucaaguacagguggcaucugcgacagcccacaccagauacuggauggggagaauuguacccuaaucgacgcucuccugggagauccgcagugcgacggcuuucaaaacaaaaagugggaucuuuucguggaaagauccaaagccuauucuaauuguuaccccuaugacgucccugauuacgcaucgcugaggucauugauugccagcagugguacucucgaguuuaacaaugaauccuucaacuggacaggggugacccagaauggaacgucuagcgcuugcaagcggcgcuccaacaauucauuuuucagucgacugaacuggcugacucaucucaaguuuaaauauccagcauuaaauguuaccaugcccaacaacgaggaguucgacaagcuguacaucuggggcgugcaccauccuggcacagauaaugaccagauuagccuuuaugcccaggcuucugggaaaaucacugucuccaccaagcguucacaacagacagugauaccaaacauuggaagcagacccaggguacgggauaucccuagucgcauuucuaucuacuggaccaucguuaaaccaggugacauuuugcugauaaauuccacgggcaaccuaaucgccccgagaggguacuuuaagauuaggagcggaaagucgucuaucaugcgguccgacgcgcccauaggcaaauguaauucagaaugcauuacuccuaacgguaguaucccaaaugauaagcccuuccagaacgugaaucgcaucacauauggggcauguccucgauacgucaaacagaacacccucaagcuggccacuggaaugagaaaugugccagagaaacaaacaaggggcauuuuuggcgcuaucgccggguucauugaaaacggaugggaggguaugguggacggcugguauggguuucggcaccagaauagcgagggaauaggccaggcagcugaucuuaaguccacccaagccgcgaucgaccagauuaacgguaaacugaaucguuugaucgggaagacgaacgaaaaguuccaccagaucgagaaagaguucucugaagucgaaggccgcauucaggaucucgagaaguacguugaggacaccaaaauagaucuguggagcuauaacgccgaauuacugguggcacucgagaaucaacauacaaucgaccuuacugauucagaaaugaacaagcuguuugaggaaaccaaaaagcaguugagagagaaugcugaggacaugggaaacggcugcuucaagauuuaccacaaaugugauaaugccugcaucgggaguauuaggaacggaacauaugaccaugacguauaccgggaugaagcucuaaauaaccgauuucagaucaaggguguggagcugaaauccggcuacaaggacuggauacucuggaucagcuucgccauuucuugcuuucugcuuugugucgcacuguugggguucaucaugugggccugccagaaaggaaauauucgcuguaacaucugcauauga

SEQ ID NO: 140843 - RNA, 1701 nt, Artificial Sequence
  derived and/or modified CDS sequence (opt3) from hemagglutinin__InfluenzaA__AIW60701
augaagaccaucauugcccugagcuacauacucugccuuguguucacacagaaacugcccggcaacgacaauuccacugcuacguuguguuuagggcaccaugcagucccuaacggaaccaucguuaagacaauuacuaaugaucaaaucgaggugaccaacgccacagaacugguacagucuucaaguaccggugagauuugcgacagcccacaccagauccuagauggcgaaaauuguacucucauagacgcgcugcuuggggauccgcagugcgacggauuucaaaacaaaaagugggaucuguucguggagagauccaaggcuuauucuaauuguuaccccuaugacgucccugauuacgccucguugaggucacucguggcaagcaguggcacacuggaauuuaacaaugaguccuucaacuggaccgguguuacgcagaaugggacuucuagcgccugcauccggcgcuccaacaauucauuuuucagucgacugaacuggcucacccauuuaaaguuuaaguauccagcucugaaugugacaaugcccaacaacgagaaauucgacaaacuuuacauuuggggaguccaccauccuggcacugauaaugaccagaucuuuccauaugcacaggccagcggccguauuaccgugucuacaaaaagaucccaacagaccguaauccccaacauagggucaaggccucggguucgcaauauuccaagcagaaucaguauuuacuggacgaucgugaagccgggagauaucuugcugauuaacucuacugguaaucuaauagcucccaggggcuacuucaaaauccgguccgggaaaagcucgauuaugcgcucugacgccccuaucggaaaguguaacuccgaaugcauaacaccaaauggcucaauucccaacgacaaaccuuuucagaaugucaaccgaaucaccuauggugcguguccaagauacgugaagcagaauacucucaaacuggcaacagggaugaggaacgugcccgagaagcaaacccggggaaucuucggcgccauugcuggcuuuaucgaaaaugggugggagggaauggucgaugguugguauggcuuccgucaccagaacagugaggggauuggacaggccgcagaccuuaaaagcacgcaagcugccauagaucagaucaauggcaagcugaaccgcuugauugguaaaaccaacgaaaaguuccaccagaucgagaaggaauuuuccgagguugaagggagaauccaggaccucgagaaauacguggaggauacaaagauugaccuguggucuuauaaugcggaauuacugguagcccucgagaaccaacauacuauagaucuuaccgacagcgaaaugaauaaacuguucgagaagacaaagaagcaguugagggaaaacgcagaggauaugggcaauggaugcuuuaagaucuaccacaaaugugacaacgcuugcauuggcucaauccggaaugggacuuaugaucaugacguguaccgagacgaggcccuaaacaaucgcuuccagauuaagggagucgaacugaaaagugguuacaaggauuggauccucuggauauccuuugcuaucagcugcuuccugcuuuguguggcccuguugggcuuuauuaugugggcaugccagaaagggaacaucagauguaauauuugcaucuga

SEQ ID NO: 140844 - RNA, 1701 nt, Artificial Sequence
  derived and/or modified CDS sequence (opt3) from hemagglutinin__InfluenzaA__AIW60702
augaagaccaucauugcccugagcuacauacucugccuuguguucacacagaaacugcccggcaacgacaauuccacugcuacguuguguuuagggcaccaugcagucccuaacggaaccaucguuaagacaauuacuaaugaucaaaucgaggugaccaacgccacagaacugguacagucuucaaguaccggugagauuugcgacagcccacaccagauccuagauggcgaaaauuguacucucauagacgcgcugcuuggggauccgcagugcgacggauuucaaaacaaaaagugggaucuguucguggagagauccaaggcuuauucuaauuguuaccccuaugacgucccugauuacgccucguugaggucacucguggcaagcaguggcacacuggaauuuaacaaugaguccuucaacuggaccgguguuacgcagaaugggacuucuagcgccugcauccggcgcuccaacaauucauuuuucagucgacugaacuggcucacccauuuaaaguuuaaguauccagcucugaaugugacaaugcccaacaacgagaaauucgacaaacuuuacauuuggggaguccaccauccuggcacugauaaugaccagaucuuuuuguaugcacaggccagcggccguauuaccgugucuacaaaaagaucccaacagaccguaaucccaaacauagggucaaggccccggguucgcaauauuccuagcagaaucaguauuuacuggacgaucgugaagccaggagauauccugcuaauuaacucuacugguaaucucauagcuccgaggggcuacuucaaaauccgguccgggaaaagcucgauuaugcgcucugacgcccccaucggaaaguguaacuccgaaugcauaacaccuaauggcucaauuccaaacgacaaacccuuucagaaugucaaccgaaucaccuauggugcguguccuagauacgugaagcagaauacucugaaacuugcaacagggaugaggaacgugccagagaagcaaacccggggaaucuucggcgccauugcuggcuuuaucgaaaaugggugggagggaauggucgaugguugguauggcuuccgucaccagaacagugaggggauuggacaggccgcagaccugaaaagcacgcaagcugccauagaucagaucaauggcaaguugaaccgccucauugguaaaaccaacgaaaaguuccaccagaucgagaaggaauuuuccgagguugaagggagaauccaggaccuggagaaauacguggaggauacaaagauugacuuauggucuuauaaugcggaacugcucguagcccuugagaaccaacauacuauagaucugaccgacagcgaaaugaauaaauuguucgagaagacaaagaagcagcuaagggaaaacgcagaggauaugggcaauggaugcuuuaagaucuaccacaaaugugacaacgcuugcauuggcucaauccggaaugggacuuaugaucaugacguguaccgagacgaggcccugaacaaucgcuuccagauuaagggagucgaacucaaaagugguuacaaggauuggauccuguggauauccuuugcuaucagcugcuuccuucuguguguggccuugcucggcuuuauuaugugggcaugccagaaagggaacaucagauguaauauuugcaucuga

SEQ ID NO: 140845 - RNA, 1701 nt, Artificial Sequence; identical to SEQ ID NO: 140589
  derived and/or modified CDS sequence (opt3) from hemagglutinin__InfluenzaA__AIZ07211

SEQ ID NO: 140846 - RNA, 1701 nt, Artificial Sequence
  derived and/or modified CDS sequence (opt3) from hemagglutinin__InfluenzaA__AIZ07212
augaagaccaucauggcccugagcuacauucucugccuuguguucgcucagaaacugcccggcaacgacaauuccacagcaacuuuguguuuagggcaccaugccgucccuaacggaacgauaguuaagaccaucacaaaugauagaauugaggugacuaacgcgaccgaacugguacaaaauucuucaaucggugagauuugcgacaguccacaccagauccuagauggcgaaaacuguacacucauagacgcucugcuuggggauccgcagugcgacggauuucagaauaaaaagugggaucuguucguggagaggagcaaagccuauuccaacuguuaccccuaugacgucccugauuacgcaucuuugcggucgcucguggccucaagcggcacccuggaauuuaauaacgagaguuucaauugggcugguguuacucaaaacgggacauccucugcaugcauccgcggaagcaauuccucauuuuucagucgacugaacuggcucacccauagcaauuuuaaguauccagccuuaaacgugacgaugcccaacaaugagcaguucgacaagcuguacauuuggggcguccaccauccuggcacugauaaagaccagaucuuucuuuaugcucagucuuccgggcguauuaccgugucaacaaagagaagccaacaggccguaaucccaaacauaggaaguaggccccggauucgcaauaucccuucuagaauuuccaucuacuggacuaucguuaaaccaggugauauuuugcugauaaacagcaccggcaaucuaaucgcgccgaggggguacuucaagauucggucgggaaaaucuuccaucaugcgcucagacgcacccauaggcaaguguaagagugaaugcauuacaccuaacgguagcaucccaaaugacaaacccuuucagaacgugaaucgaaucaccuauggggccuguccuagauacgucaagcaguccacgcucaaacuggcuacuggaaugaggaacgugccagagaagcaaacacggggcauuuucggcgccaucgcaggguuuauugaaaauggaugggaggguaugauggauggcugguauggguuccgucaccagaacucugagggacgcggccaggcugccgaccuuaaaagcacccaagcggccauagaucagaucaaugguaagcugaacagauugauugggaaaacuaaugaaaaguuccaccagaucgagaaggaauuuucagagguggaaggcaggauccaggaccucgagaaauacgucgaggauacaaagauugaccuguggaguuauaacgcagaauuacugguugcucucgagaaccaacauaccauagaucuuacggacuccgaaaugaauaaacuguucgagaagaccaaaaagcaguugcgggaaaacgccgaggauaugggaaauggcugcuuuaagaucuaccacaaaugugacaacgcuugcauugggagcauccgaaauggaacauaugaucaugacguguaccgcgacgaggcccuaaacaauagauuccagauuaaggguguagaacugaaaucuggcuacaaggauuggauccucuggauaucauuugcaaucaguugcuuccugcuuuguguggcccuguugggguuuauuaugugggcuugccagaaaggaaacaucagguguaauauuugcaucuga

SEQ ID NO: 140847 - RNA, 1683 nt, Artificial Sequence
  derived and/or modified CDS sequence (opt3) from hemagglutinin__InfluenzaA__AJD78175
auggagaccgccagccugaucacaauucuccuuguggucacuguuuccaacgcugacaagauaugcaucggcuaccagucuacuaauucaaccgaaacaguggauacucugaccgagaacaauguacccgugacacacgcaaaagaauuguuacauaccgagcacaacgggaugcugugugccacgagucuaggacaaccucucauucuggacacaugcaccaucgaaggucuuauuuauggcaauccaagcugugaucuguugcucgggggaagagagugguccuacaucgucgagaggccgucugcggcuaacggccugugcuaucccgguaauguggaaaaccuggaggaacuccggucguuauucucaagcgcccgcaguuaccagcgaauacagaucuuuccugacacgauuuggaauguuuccuauucugggacuagcaaggcauguuccgauucauucuaccguaguaugagauggcugacccagaaagacaacacauauccaauccaagaugcccaguacacuaauaaccagggaaagaauauucuuuuuauguggggcaucaaccaucccccuaccgacacagcucagaccaauuuguacacgaggacugauacaaccacuagcguggcaacagaggagauaaaccggaccuucaaaccacugauuggcccccgcccucuagucaacgggcucaugggaagaaucaauuauuacuggucugugcugaagccaggucaaacgcuuaggauuaaguccaacggcaaucugaucgccccgugguaugggcacaucuugucaggagaaagccauggccggauucucaaaaccgaccugaagcgcgguaguugcacaguacagugucagacugagaaagggggauuaaacaccacacugcccuuucagaauguuucuaaguacgcuuucggcaacugcuccaaauauauaggcaucaagagccucaaacuugccguggggcugcgaaaugucccuucgagaucuuccaggggauuguuuggugcgauugcaggcuucaucgaagggggauggucaggccuaguggccgguugguacggguuucaacacaguaacgaucagggcgugggaauggcugccgaccgggauagcacucagaaggcaauagacaagauuaccuccaaagucaauaacaucguugacaagaugaauaaacaauaugagaucauugaucacgaguucaacgaaguggagacacgucugaauaugaucaacaauaagauugacgaucagauacaggacaucugggcuuacaacgccgaacuccugguacuucuggagaaccagaaaaccuuggaugaacaugacgcgaaugugaacaaucucuacaacaaggucaagcgcgcccugggcucuaaugcaguggaggaugggaaaggauguuuugaauuauaucacaagugcgacgaucaauguauggagacuauuagaaacgguacguacaauaggcggaaauaucaggaggaaagcaagcuggagcgacagaaaaucgaaggcguuaagcuagagucagaagggacauacaagauccucaccauuuauaguacuguggcuuccagccuggucauagccaugggauucgcugccuuucuuuucugggcaaugucuaacggcucaugccgcugcaauaucuguauuuga

SEQ ID NO: 140848 - RNA, 1683 nt, Artificial Sequence
  derived and/or modified CDS sequence (opt3) from hemagglutinin__InfluenzaA__AJD78187
auggagaccgccagccugaucacaauucuccuuguggucacuguuuccaacgcugacaagauaugcaucggcuaccagucuacuaauucaaccgaaacaguggauacucugaccgagaacaauguacccgugacacacgcaaaagaauuguuacauaccgagcacaacgggaugcugugugccacgagucuaggacauccucucauucuggacacaugcaccaucgaaggucuuauuuauggcaauccaagcugugaucuguugcucgggggaagagagugguccuacaucgucgagaggccgucugcggugaacggccugugcuaucccgguaauguugaaaaccuggaggaacuccggucguuauucucaagcgcucgcaguuaccaacgaauacagaucuuuccugacacgauuuggaauguguccuauucugggacuagcaagaccuguuccgauucauucuaccguaguaugagauggcugacacagaaagacaacgccuauccaauccaggaugcacaauacacuaauaaccagggaaagaauauucuuuuuauguggggcaucaaccaucccccuaccgacacaacccagacgaauuuguacacuaggacagauaccacuacaagcgucgccaccgaggagauaaaccggacguucaaaccacugauuggcccccgcccucuagugaacgggcucaugggaagaaucaauuauuacuggucuguacugaagccaggucagacccuuaggauuaaguccaacggcaaucugaucgcuccgugguaugggcacaucuugucaggagaaagccacggccggauucucaaaacagaccugaagcgcgguaguugcacuguucaaugucagaccgagaaagggggauuaaacacaacucugcccuuucagaaugugucuaaguacgcauucggcaacugcuccaaauauauaggcaucaagagccucaaacuugccgucgggcugcgaaaugugccuucgagaucuuccaggggauuguuuggugcuauugccggcuucaucgaagggggauggucaggccuaguggcggguugguacggguuucagcacaguaacgaucaaggcgucggaauggcagccgaccgggauagcacccagaaggcuauagacaagauuacauccaaaguuaauaacaucguggacaagaugaauaaacaguaugagaucauugaucaugaguucucugaaguagagacccgucugaacaugaucaauaacaagauugacgaucaaauacaggacaucugggccuacaaugcagaacuccuggugcuucuggagaaccagaaaacuuuggaugaacacgacgcuaacgucaauaaccucuacaauaaggugaagcgcgcccugggcagcaacgcgguugaggaugggaaaggauguuuugaauuauaucauaagugcgacgaucaguguauggagacgauuagaaaugguacauacaacaggcggaaauaucaagaggaaucaaagcuggagcgacagaaaaucgaaggcgugaagcuagagagugaagggaccuacaagauccucacuauuuauuccaccgucgccagcucucuggugauagcaaugggauucgcugccuuucuuuucugggcuaugucaaauggcaguugccgcugcaacaucuguauuuga

SEQ ID NO: 140849 - RNA, 1683 nt, Artificial Sequence
  derived and/or modified CDS sequence (opt3) from hemagglutinin__InfluenzaA__AJD78199
auggagaccgugagccugaucacaauucuccuugucgccacuguuuccaacgcugacaagauaugcaucggcuaccagucuacuaauucaaccgaaacaguggauacucugaccgagaacaauguacccgugacacacgcaaaagaauuguuacauaccgagcacaacgggaugcugugugccacgagucuaggacaaccucucauucuggacacaugcaccaucgaaggucuuauuuauggcaauccaagcugugaucuguccuuggaggggagagaguggucuuacaucgucgaaaggccgucggcggugaacggacucugcuaucccggcaauguugagaaccuggaggaacugcggucacucuucagcagugcucgcuccuaccagcgaauacagaucuuuccugacacgauuuggaaugugucuuaugaugguacuagcaccgccuguuccgggucauucuaccguaguaugagaugguuaacaaggaagaacggagacuauccaauccaggaugcacaauacacuaauaaccagggcaaaaauauucuguuuauguggggcaucaaccaucccccuaccgacacaacccagcgggaucuuuacacgcgcacugacacaaccacuagcgucgccacagaggaaauaaauagaauuuucaagccauugaucgggcccaggccucuggugaacggacuaaugggucggauugauuauuacuggucuguacucaaaccaggccagacccugcgcaucaaguccgacgggaaccuuaucgcuccgugguauggacacauucugucaggcgagagccauggucgaauauugaagacggaucucaaaagagggaguugcaccguucaaugucagacagaaaagggaggccugaauacuaccuuacccuuucagaacgugucuaaauacgcauucggcaauugcuccaaguauaucgggauuaaaagccugaagcucgccgucggacuuaggaacgugccuucgcggucuucccguggucuguuuggcgcuaucgccggguucauagagggaggcuggucagguuugguggcggggugguacggcuuucagcacaguaaugaccaaggagucggcauggcagccgaccgcgauagcacacagaaggcuauugacaaaaucacuuccaagguuaacaauaucguggauaaaaugaacaagcaguaugaaauuaucgaccacgaguucucugagguagaaaccagacuaaauaugauuaacaauaaaauagaugaccaaauccaggauauuugggccuacaacgcagagcugcucgugcugcuugaaaaucagaagacacuggacgagcaugaugcuaacgucaauaacuuguacaacaaagugaagagggcccucgggagcaaugcgguugaagacggaaaggguuguuuugagcuguaucacaaaugcgaugaccaguguauggagaccauccggaacggcacuuacaaucgacgcaaguaucaagaagagucaaaauuagaaagacagaagaucgagggggugaaacuggaaagugagggaacguacaagauucuaacaauauauuccaccgucgccagcucucucgugaucgcaaugggcuucgcugccuuucuguucugggcuaugucaaacgguaguuguaggugcaauauuugcaucuga

SEQ ID NO: 140850 - RNA, 1683 nt, Artificial Sequence
  derived and/or modified CDS sequence (opt3) from hemagglutinin__InfluenzaA__AJD78211
auggagaccgugagccugaucacaauucuccuugucgccacuguuuccaacgcugacaagauaugcaucggcuaccagucuacuaauucaaccgaaacaguggauacucugaccgagaacaauguacccgugacacacgcaaaagaauuguuacauaccgagcacaacgggaugcugugugccacgagucuaggacaaccucucauucuggacacaugcaccaucgaaggucuuauuuauggcaauccaagcugugaucuguccuuggaggggagagaguggucuuacaucgucgaaaggccgucggcggugaacggacucugcuaucccggcaauguugagaaccuggaggaacugcggucacucuucagcagugcucgcuccuaccagcgaauacagaucuuuccugacacgauuuggaaugugucuuaugaugguacuagcaccgccuguuccgggucauucuaccguaguaugagaugguuaacaaggaagaacggagacuauccaauccaggaugcacaauacacuaauaaccagggcaaaaauauucuguuuauguggggcaucaaccaucccccuaccgacacaacccagcgggaucuuuacacgcgcacugacacaaccacuagcgucgccacagaggaaauaaauagaauuuucaagccauugaucgggcccaggccucuggugaacggacuaaugggucggauugauuauuacuggucuguacucaaaccaggccagacccugcgcaucaaguccgacgggaaccuuaucgcuccgugguauggacacauucugucaggcgagagccauggucgaauauugaagacggaucucaaaagagggaguugcaccguucaaugucagacagaaaagggaggccugaauacuaccuuacccuuucagaacgugucuaaauacgcauucggcaauugcuccaaguauaucgggauuaaaagccugaagcucgccgucggacuuaggaacgugccuucgcggucucgucgcggucuguuuggcgcuaucgccggguucauagagggaggcugguccgguuugguggcggggugguacggcuuucagcacucaaaugaccaaggagucggcauggcagccgacagagauaguacacagaaggcuauugacaaaaucacuagcaagguuaacaauaucguggauaaaaugaacaagcaguaugaaauuaucgaccacgaguucuccgagguagaaaccaggcuaaauaugauuaacaauaaaauagaugaccaaauccaggauauuugggccuacaacgcagagcugcucgugcugcuugaaaaucagaagacacuggacgagcaugaugcuaacgucaauaacuuguacaacaaagugaagcgggcccucgggucuaaugcgguugaagacggaaaggguuguuuugagcuguaucacaaaugcgaugaccaguguauggagaccauccgaaacggcacuuacaaucgcagaaaguaucaagaagagagcaaauuagaaaggcagaagaucgagggggugaaacuggaaucagagggaacguacaagauucuaacaauauauaguaccgucgccuccagccucgugaucgcaaugggcuucgcugccuuucuguucugggcuaugucuaacgguucaugccggugcaauauuuguaucuga

SEQ ID NO: 140851 - RNA, 1689 nt, Artificial Sequence
  derived and/or modified CDS sequence (opt3) from hemagglutinin__InfluenzaA__AJI76401
auggccaucauuuaccugauacuccuuuucgcuaccgugagaggcgaccagaucugcauuggguaucacgcaaacaauagcacagagaaggucgauacuauccuggaaaggaacguuacggugacccaugccaaagacauuuuggagaagacacacaauggaaaauuauguaagcugaacgguauacccccucuagaacucggcgauugcuccaucgcgggguggcugcuuggaaauccagagugugaccggcuguugcgcguaccggaauggucuuacaucauggagaaagagaacccccgauauucacucugcuacccuggcagucugaaugauuaugaagaacugaagcaucucuuaagcuccgugaagcacuuugaaaaaguccguauucugccaaaggacagauggacuaaccauaccacaaccggugggucuaaggcuugugccgugucgggaaaacccucauucuuuaggaauaugguuuggcuuacuaaaaagggcccuaacuacccaguggcaaagggcagcuauaauaacacaaguggggagcaaauguugaucauuuggggaguccaccaccccaucgaugaggccgaacagcgggcucuguaccagaauguggguaccuacguauccgcaucuacgagcacucuauauaaacgcuccauaccugagauugccgcuagaccagaaguuaacggccucgggucaaggauggaguucaguuggacccugcuugacgugugggauacaaucaauuuugaaagcacuggaaaccuggucgccccggaguacggcuucaagauuucuaaacgggguuccucagggaucaugaagaccgagggaacauugggcaacugcgaaaccaaaugucagacgccccucggcgcgaucaauacuacacugccuuuucauaacgugcacccauuaaccauuggggagugccccaaguaugugaaaagcgaaaagcugguccucgcaacuggacuucgcaauguuccucaaauagagagucgaggucuguucggcgccaucgcuggguuuauugaaggaggcuggcaggguaugguggacgggugguacggcuaucaucacucuaacgaucagggauccggcuacgccgcagacaaggagagcacacagaaggcuuucgaugggaucaccaauaaaguaaacucggugauagagaaaaugaauacgcaauuugaagccgucggaaaggaguucaacaauuuggagaaaagacuagagaaccugaauaagaggauggaagacgguuuucucgacguguggaccuauaacgcggagcugcuuguucugauggagaaugaacggacauuggauuuccacgacucuaacgugaagaaucucuacgagaaaguccguaugcagcugcgcgauaacgugagagaauuaggcaacggguguuucgaguuuuaccauaagugcgacgaugaguguaugaacuccguuaaaaauggaacuuaugacuacccaaaguaugaagaggaaucaaaacugaagaggaaugagauuaagggcguaaaacuaaguagcauggguguguaccagauccucgccaucuaugcaaccgucgcugggucccugucucuugccauuaugguggcuggcaucagcuucuggaugugcucaaacggaaguuugcagugccggauuuguauauga

SEQ ID NO: 140852 - RNA, 1701 nt, Artificial Sequence; identical to SEQ ID NO: 140113
  derived and/or modified CDS sequence (opt3) from hemagglutinin__InfluenzaA__AJI80137

SEQ ID NO: 140853 - RNA, 1701 nt, Artificial Sequence; identical to SEQ ID NO: 140113
  derived and/or modified CDS sequence (opt3) from hemagglutinin__InfluenzaA__AJI80149

SEQ ID NO: 140854 - RNA, 1701 nt, Artificial Sequence; identical to SEQ ID NO: 138088
  derived and/or modified CDS sequence (opt3) from hemagglutinin__InfluenzaA__AJI80161

SEQ ID NO: 140855 - RNA, 1701 nt, Artificial Sequence
  derived and/or modified CDS sequence (opt3) from hemagglutinin__InfluenzaA__AJI80172
augaagaccaucauugcccugagcuacauacucugccuuguguucgcucagaaacugcccggcaacgacaauuccacagcaacuuuguguuuagggcaccaugccgucccuaacggaacgaucguuaagaccauuacaaaugauagaaucgaggugacuaacgcgaccgaacugguacaaaauucuucaauuggugagaucugcgacaguccacaccagauacuagauggcgaaaacuguagccucaucgacgcucugcuuggggauccgcagugcgacggauuucagaauaaaaagugggaucuguucguggagagguccaaagccuauucuaacuguuaccccuaugacgucccugauuacgcaucguugcggucacucguggccagcaguggcacacuggaauuuaauaacgaguccuucaauugggcugguguuacccaaaacgggacuucuagcgcaugcauucgcggauccaauucaaguuucuuuagccgacugaacuggcucacacauuuaaauuuuaaguauccagcccugaacgugaccaugcccaacaaugagcaguucgacaaguuguacaucuggggcguccaccauccuggcacggauaaagaccagauuuuucuuuaugcucagucuuccgggcguaucacugugucaaccaagagaagccaacaggccguaauaccaaacauuggaaguaggccccggauccgcaauauuccuucuagaaucuccaucuacuggacaauuguuaaaccaggugauauacugcuaaucaacagcacuggcaaucucauugcgccgaggggguacuucaagauccggucgggaaaaucuuccauaaugcgcucagacgcacccauuggcaaguguaagagugaaugcaucaccccuaacgguagcaucccaaaugacaaacccuuucagaacgugaaucgaauuacauauggggccuguccuagauacgucaagcaguccacccugaaacuugcuacgggaaugaggaacgugccagagaagcaaacucggggcaucuucggcgccauugcaggguuuauagaaaauggaugggaggguaugguggauggcugguauggguuccgucaccagaacucugagggacgcggccaggcugccgaccugaaaagcacacaagcggccaucgaucagauuaaugguaaguugaacagacucaucgggaaaaccaaugaaaaguuccaccagaucgagaaggaauuuucagaggucgaaggcaggauucaggaccuggagaaauacguugaggauacuaagauagacuuauggaguuauaacgcagaacugcucguggcucuugagaaccaacauacaaucgaucugaccgacuccgaaaugaauaaauuguucgagaagacgaaaaagcagcuacgggaaaacgccgaggauaugggaaauggcugcuuuaagauuuaccacaaaugugacaacgcuugcaucgggagcauucgaaauggaaccuaugaucaugacguauaccgcgacgaggcccugaacaauagauuccagaucaaggguguggaacucaaaucuggcuacaaggauuggauacuguggaucucauuugcaauuaguugcuuccuucugugugucgccuugcucggguuuaucaugugggcuugccagaaaggaaacauuagguguaauaucugcauauga

SEQ ID NO: 140856 - RNA, 1701 nt, Artificial Sequence
  derived and/or modified CDS sequence (opt3) from hemagglutinin__InfluenzaA__AJI80196
augaagaccaucauugcccugagcuacauacucugccuuguguucgcucagaaacugcccggcaacgacaauuccacagcaacuuuguguuuagggcaccaugccgucccuaacggaacgaucguuaagaccauuacaaaugauagaaucgaggugacuaacgcgaccgaacugguacaaaauucuucaauuggugagaucugcgacaguccacaccagauacuagauggcgaaaacuguacacucaucgacgcucugcuuggggauccgcagugcgacggauuucagaauaaagagugggaucuguucguggaaaggagcaaggccuauuccaacuguuaccccuaugacgucccugauuacgcaucuuugcggucgcucguggccucaagcggcacccuggaguuuaauaacgagaguuucaauugggcugguguuacucaaaacgggacauccucugcaugcauucgcggaagcaauuccucauuuuucagucgacugaacuggcucacccauuuaaauuuuaaauauccagcccugaacgugacgaugcccaacaaugaacaguucgacaagcuguacaucuggggcguccaccauccuggcacugauaaggaccagaucuuuuuguaugcucagagcucugggcguauuaccguguccacaaaaagaucacaacaggccguaauaccaaacauuggaagcaggccccggauccgcaauauuccuaguagaaucucuaucuacuggacuauuguuaagccaggugauauacugcuaaucaacuccaccggcaaucucauugcgccgaggggguacuucaaaauccggagcggaaagucgucuauaaugcgcuccgacgcacccauuggcaaauguaagucagagugcaucacaccuaacgguaguaucccaaaugacaagcccuuucagaacauuaaucgaaucaccuauggggccuguccuagauacgugaaacagagcacgcugaaacuugcuacuggaaugaggaacgucccagaaaaacaaacacggggcauuuucggcgccauagcaggguuuaucgagaauggaugggaggguaugguggauggcugguauggguuccgucaccagaacuccgaaggacgcggccaggcugccgaccugaagucuacccaagcggccauugaucagaucaaugguaaauugaacagacucaucgggaagacuaaugagaaauuccaccagauugaaaaggaguuuagcgaaguggagggcaggauacaggaccuggagaaguacgucgaagauacaaaaaucgacuuauggucauauaacgcagaguuccugguugcucucgaaaaccaacauaccauugaucuuacggacagugagaugaauaagcuguuugaaaagaccaagaaacaguugcgggagaacgccgaggauaugggaaauggcugcuucaagaucuaccacaagugugacaacgcuugcauuggguccauccgaaauggaacauaugaucaugacguguaccgcgacgaagcccuaaacaauagauuucagauaaaagguguagagcuuaagagcggcuacaaagauuggauccucuggauuucuuucgcaaucucaugcuuucugcuuuguguggcccuguugggguucauuaugugggcuugccagaagggaaacaucagguguaauauaugcauuuga

SEQ ID NO: 140857 - RNA, 1701 nt, Artificial Sequence; identical to SEQ ID NO: 140663
  derived and/or modified CDS sequence (opt3) from hemagglutinin__InfluenzaA__AJI80208

SEQ ID NO: 140858 - RNA, 1701 nt, Artificial Sequence; identical to SEQ ID NO: 138042
  derived and/or modified CDS sequence (opt3) from hemagglutinin__InfluenzaA__AJI80220

SEQ ID NO: 140859 - RNA, 1701 nt, Artificial Sequence; identical to SEQ ID NO: 140855
  derived and/or modified CDS sequence (opt3) from hemagglutinin__InfluenzaA__AJI80232

SEQ ID NO: 140860 - RNA, 1701 nt, Artificial Sequence; identical to SEQ ID NO: 138042
  derived and/or modified CDS sequence (opt3) from hemagglutinin__InfluenzaA__AJI80244

SEQ ID NO: 140861 - RNA, 1701 nt, Artificial Sequence; identical to SEQ ID NO: 137906
  derived and/or modified CDS sequence (opt3) from hemagglutinin__InfluenzaA__AJI80256

SEQ ID NO: 140862 - RNA, 1701 nt, Artificial Sequence; identical to SEQ ID NO: 138042
  derived and/or modified CDS sequence (opt3) from hemagglutinin__InfluenzaA__AJI80268

SEQ ID NO: 140863 - RNA, 1701 nt, Artificial Sequence
  derived and/or modified CDS sequence (opt3) from hemagglutinin__InfluenzaA__AJI80280
augaagaccaucauugcccugagcuacauacucugccuuguguucgcucagaaacugcccggcaacgacaauuccacagcaacuuuguguuuagggcaccaugccgucccuaacggaacgaucguuaagaccauuacaaaugauagaaucgaggugacuaacgcgaccgaacugguacaaaauucuucaauugguaaaaucugcgacaguccacaccagauacuagauggcgagaacuguacacucaucgacgcucugcuuggggauccgcagugcgacggauuucagaauaaggaaugggaucuguucguggagaggagcaaagccuauuccaacuguuaccccuaugacgucccugauuacgcaucuuugcggucgcucguggccucaagcggcacccuggaauuuaauaacgagaguuucaauugggcugguguuacucaaaacgggacauccucugcaugcauucgcggaagcaauuccucauuuuucagucgacugaacuggcucacccauuuaaauuuuaaguauccagcccugaacgugacgaugcccaacaaugagcaguucgacaaguuguacaucuggggcguccaccauccuggcacugauaaagaccagauuuuucuuuaugcucagagcucugggcguaucaccguguccacaaagagaucacaacaggccguaauaccaaacauuggaagcaggccccggauccgcaauauuccuaguagaaucucuaucuacuggacuauuguuaaaccaggugauauacugcuaaucaacuccaccggcaaucucauugcgccgaggggguacuucaagauccggagcggaaaaucgucuauaaugcgcuccgacgcacccauuggcaaguguaagucagaaugcaucacaccuaacgguaguaucccaaaugacaaacccuuucagaacgugaaucgaauuaccuauggggccuguccuagauacgucaagcagagcacgcugaaacuugcuacuggaaugaggaacgugccagagaagcaaacacggggcaucuucggcgccauugcaggguuuauagaaaauggaugggaggguaugguggauggcugguauggguuccgucaccagaacuccgagggacgcggccaggcugccgaccugaaaucuacccaagcggccaucgaucagauuaaugguaaguugaacagacucaucgggaaaacuaaugaaaaguuccaccagaucgagaaggaauuuagcgaggucgaaggcaggauucaggaccuggagaaauacguugaggauacaaagauagacuuauggucauauaacgcagaacugcucguggcucuugagaaccaacauaccaucgaucugacggacagugaaaugaauaaauuguucgagaagaccaaaaagcagcuacgggaaaacgccgaggauaugggaaauggcugcuuuaagauuuaccacaaaugugacaacgcuugcaucggguccauucgaaauggaacauaugaucaugacguauaccgcgacgaggcccugaacaauagauuccagaucaaggguguggaacucaaaagcggcuacaaggauuggauacuguggaucucuuuugcaauuucaugcuuccuucugugugucgccuugcucggguuuaucaugugggcuugccagaaaggaaacauuagguguaauaucugcauauga

SEQ ID NO: 140864 - RNA, 1701 nt, Artificial Sequence; identical to SEQ ID NO: 140635
  derived and/or modified CDS sequence (opt3) from hemagglutinin__InfluenzaA__AJI80292

SEQ ID NO: 140865 - RNA, 1701 nt, Artificial Sequence; identical to SEQ ID NO: 140663
  derived and/or modified CDS sequence (opt3) from hemagglutinin__InfluenzaA__AJI80303

SEQ ID NO: 140866 - RNA, 1701 nt, Artificial Sequence; identical to SEQ ID NO: 140635
  derived and/or modified CDS sequence (opt3) from hemagglutinin__InfluenzaA__AJI80315

SEQ ID NO: 140867 - RNA, 1701 nt, Artificial Sequence
  derived and/or modified CDS sequence (opt3) from hemagglutinin__InfluenzaA__AJI80326
augaaggccauccuggugguccuccuuuacaccuucgcuacagcaaacgccgacacucugugcauuggcuaucacgcgaauaacagcacggauaccguugacacaguguuggagaaaaauguaacugugacccauuccgucaacuuacuggaagauaagcacaaugggaaacuauguaagcucagaggaguggcuccccugcaucuugguaaaugcaacauagccggcuggauccuggggaauccugagugugaaucuuugucaacagcaaguagcugguccuacauuguugagaccucuucgucagacaacggaacuugcuauccaggcgauuuuaucaauuacgaagaacucagggagcagcugagcaguguguccucuuucgaacgguuugagauuuucccgaagacaagcuccuggcccaaccacgacucaaauaagggugucaccgccgcuuguccucaugcaggggccaaaaguuuuuauaagaaccugaucuggcucgugaaaaagggaaauagcuacccaaaauuaucucaauccuauauaaacgauaagggcaaggaaguacugguucuuuggggcauccaccaccccucaacgacugcugaccagcagagcuuguaccagaaugccgaugcguacguguucgucgggaccagucgcuauucuaaaaaguuuaaaccugagauugcaauccgaccaaaggugcgugaccaagagggaagaaugaacuacuauuggacacugguggaacccggugauaaaauuacuuucgaggccaccggcaaccuagucguuccuagguacgcuuuuacaauggaaaagaaugccggguccggaaucauaauuagcgacaccccagugcaugauugcaacacgacuugucagacaccggagggcgcaaucaauaccucgcuccccuuccagaacauucacccuaucacuaucgguaaaugcccaaaguauguaaagucuacaaaacugcggcuugcuaccgggcugcgcaaugugcccuccauucagucaagaggauuguuuggcgccauagcgggcuucaucgaagggggauggacggguauggucgacggcugguacggguaucaucaccaaaacgagcagggaaguggcuacgccgcagaccucaagagcacccagaaugcuauugauaaaaucacaaacaagguaaauuccguuauagagaaaaugaacacucaguuuaccgccguggguaaggaguucaaucaccuggagaagaggauugaaaacuuaaauaaaaaggucgacgauggguuccuggacaucuggacauacaacgcugagcuccuugugcuguuggaaaaugagcggacucuagauuaucaugacucuaacgugaaaaaccuguacgagaagguucgcaaucaacucaaaaacaaugccaaggaaaucggcaacggauguuuugaguucuaucacaagugcgauaauaccuguauggaaagcgugaaaaacggcacauacgacuauccuaaguacucagaggaagcaaaacugaaucgagagaagauugauggggucaaacuugagaguaccagaaucuaucagauucuggccauauacuccacuguggcuagcucuuugguccucgugguuucacugggagcgaucaguuuuuggaugugcagcaacgguuccuuacagugcaggauuuguaucuga

SEQ ID NO: 140868 - RNA, 1701 nt, Artificial Sequence
  derived and/or modified CDS sequence (opt3) from hemagglutinin__InfluenzaA__AJI80337
augaaggccauccuggugguccuccuuuacaccuucgcuacagcaaacgccgacacucugugcauuggcuaucacgcgaauaacagcacggauaccguugacacaguguuggagaagaauguaacugugacccauuccauaaacuuacuggaagauaagcacaaugggaaacuauguaagcucagaggagucgcuccccugcaucuugguaaaugcaacaucgccggcuggauucuggggaauccugagugugaaucuuugucaacagcaaguagcugguccuacaucguggagaccucuucgucagacaacggaacuugcuauccaggcgauuuuauuaauuacgaagaacucagggagcagcugagcaguguuuccucuuucgaacgguuugagauguucccgaagacaagcuccuggcccaaccacgacucaaauaagggugugaccgccgcuuguccucaugcaggggccaaaaguuuuuauaagaaccugaucuggcucgucaaaaagggaaauagcuacccaaaauuaucuaaguccuauauaaacgauaagggcaaagaagugcugguacuuuggggcauccaccaccccucaacgacugcugaccaacagagcuuguaccagaaugccaacgcguacguuuucguggggaccaguaaguauucuaaaaaguuuaaaccugagauugcaauccgcccaaagguccgagaucaggagggacguaugaacuacuauuggacacugauugaacccggugacaaaaucacuuucgaggccaccggcaaucuaguggugccuagauacgcuuuugccauggaaaggaacgcaggguccggaauaauuaucagcgauacaccaguccaugacugcaauaccacgugucaaacuccggagggcgcuauuaacacaucgcuccccuuccagaauauccacccuaucaccauugguaagugcccaaaguauguuaaaucuacuaagcugcggcuugccacagggcugcgcaacauacccuccauccagucaagaggauuguuuggcgcgauugccggcuucaucgaagggggauggaccgguaugguggauggcugguacggguaucaucaccagaaugagcaaggaaguggcuacgcagcugaccucaaaagcacgcagaacgccauagacaagauuaccaauaaaguaaacuccgugaucgagaagaugaauacacaguuuacugcugucgguaaggaguucaaccaccuggagaaaaggaucgaaaauuuaaacaagaaaguggaugacggguuccuggauauuuggaccuacaaugccgagcuccuuguucuguuggaaaacgagcggacacuagacuaucaugauucuaacgugaagaaucuguacgagaaaguccgcaaccagcucaagaauaacgcaaaggaaaucggcaauggauguuuugaguucuaucacaaaugcgacaacacuuguauggaaagcgugaagaauggcaccuacgauuauccuaaauacucagaggaagccaagcugaaccgagagaaaauugacgggguaaaacuugagaguacaagaauauaucaaauccuggcuauuuacuccaccguugcgagcucuuuggugcucgucgugucacugggagcaaucaguuuuuggaugugcagcaaugguuccuuacagugcaggaucuguauuuga

SEQ ID NO: 140869 - RNA, 1701 nt, Artificial Sequence; identical to SEQ ID NO: 138042
  derived and/or modified CDS sequence (opt3) from hemagglutinin__InfluenzaA__AJI80348

SEQ ID NO: 140870 - RNA, 1701 nt, Artificial Sequence; identical to SEQ ID NO: 137906
  derived and/or modified CDS sequence (opt3) from hemagglutinin__InfluenzaA__AJI80360

SEQ ID NO: 140871 - RNA, 1701 nt, Artificial Sequence; identical to SEQ ID NO: 137906
  derived and/or modified CDS sequence (opt3) from hemagglutinin__InfluenzaA__AJI80372

SEQ ID NO: 140872 - RNA, 1701 nt, Artificial Sequence; identical to SEQ ID NO: 138088
  derived and/or modified CDS sequence (opt3) from hemagglutinin__InfluenzaA__AJI80384

SEQ ID NO: 140873 - RNA, 1701 nt, Artificial Sequence; identical to SEQ ID NO: 138088
  derived and/or modified CDS sequence (opt3) from hemagglutinin__InfluenzaA__AJI80395

SEQ ID NO: 140874 - RNA, 1701 nt, Artificial Sequence; identical to SEQ ID NO: 138088
  derived and/or modified CDS sequence (opt3) from hemagglutinin__InfluenzaA__AJI80406

SEQ ID NO: 140875 - RNA, 1701 nt, Artificial Sequence; identical to SEQ ID NO: 138088
  derived and/or modified CDS sequence (opt3) from hemagglutinin__InfluenzaA__AJI80417

SEQ ID NO: 140876 - RNA, 1701 nt, Artificial Sequence; identical to SEQ ID NO: 138088
  derived and/or modified CDS sequence (opt3) from hemagglutinin__InfluenzaA__AJI80428

SEQ ID NO: 140877 - RNA, 1701 nt, Artificial Sequence; identical to SEQ ID NO: 138042
  derived and/or modified CDS sequence (opt3) from hemagglutinin__InfluenzaA__AJI80439

SEQ ID NO: 140878 - RNA, 1701 nt, Artificial Sequence; identical to SEQ ID NO: 138042
  derived and/or modified CDS sequence (opt3) from hemagglutinin__InfluenzaA__AJI80462

SEQ ID NO: 140879 - RNA, 1701 nt, Artificial Sequence
  derived and/or modified CDS sequence (opt3) from hemagglutinin__InfluenzaA__AJI80474
augaaggccauccuggugguccuccuuuacaccuucgcuacagcaaacgccgacacucugugcauuggcuaucacgcgaauaacagcacggauaccguugacacaguguuggagaagaauguaacugugacccauuccauaaacuuacuggaagauaagcacaaugggaaacuauguaagcucagaggagucgcuccccugcaucuugguaaaugcaacaucgccggcuggauucuggggaauccugagugugaaucuuugucaacagcaaguagcugguccuacaucguggagaccucuucgucagacaacggaacuugcuauccaggcgauuuuauuaauuacgaagaacucagggagcagcugagcaguguuuccucuuucgaacgguuugagaucuucccgaagacaagcuccuggcccaaccacgacucaaauaagggugugaccgccgcuuguccucaugcaggggccaaaaguuuuuauaagaaccugauauggcucgucaaaaagggaaauagcuacccaaaauuaucucaauccuauaucaacgauaagggcaaggaagugcugguacuuuggggcauucaccaccccucaacgacugcugaccagcagagcuuguaccagaaugccgaugcguacguuuucguggggaccagucgcuauucuaaaaaguuuaaaccugagaucgcaauucgaccaaagguccgugaccaagagggaagaaugaacuacuauuggacacugguggaacccggugauaaaaucacuuucgaggccaccggcaaccuaguggucccuagguacgcuuuuacaauggaacggaaugccggguccggaauaauuaucagcgacaccccaguucaugauugcaacacgacuugucagacaccggagggcgcaauuaauaccucgcuccccuuccagaacauccacccuaucacuauugguaagugcccaaaauaugugaagucuacaaagcugcgccuugcuaccgggcugagaaauguacccuccauacagucaaggggauuguuuggcgccaucgcgggcuucauugaagggggauggacggguaugguggacggcugguacggguaucaucaccaaaacgagcagggaaguggcuacgccgcagaccucaaaagcacccagaaugcuaucgauaagauaacaaacaaagucaauuccgugauugagaagaugaacacucaguuuaccgccguugguaaagaguucaaucaccuggagaagcggaucgaaaacuuaaauaagaaaguggacgauggguuccuggacaucuggacauacaacgcugagcuccuuguccuguuggaaaaugagcgcacucuagauuaucaugacucuaacgugaagaaccuguacgagaaaguacgaaaucaacucaagaacaaugccaaagaaauuggcaacggauguuuugaguucuaucacaagugcgauaauaccuguauggaaagcguuaagaacggcacauacgacuauccuaaauacucagaggaagcaaagcugaauagagagaaaaucgauggggugaaacuugagaguaccaggauuuaucagauacuggccaucuacuccacugucgcuagcucuuuggugcucgucgugucacugggagcgauuaguuuuuggaugugcagcaacgguuccuuacagugccggaucuguaucuga

SEQ ID NO: 140880 - RNA, 1701 nt, Artificial Sequence; identical to SEQ ID NO: 140879
  derived and/or modified CDS sequence (opt3) from hemagglutinin__InfluenzaA__AJI80485

SEQ ID NO: 140881 - RNA, 1701 nt, Artificial Sequence; identical to SEQ ID NO: 138088
  derived and/or modified CDS sequence (opt3) from hemagglutinin__InfluenzaA__AJI80496

SEQ ID NO: 140882 - RNA, 1701 nt, Artificial Sequence; identical to SEQ ID NO: 140691
  derived and/or modified CDS sequence (opt3) from hemagglutinin__InfluenzaA__AJI80507

SEQ ID NO: 140883 - RNA, 1701 nt, Artificial Sequence; identical to SEQ ID NO: 138088
  derived and/or modified CDS sequence (opt3) from hemagglutinin__InfluenzaA__AJI80518

SEQ ID NO: 140884 - RNA, 1701 nt, Artificial Sequence; identical to SEQ ID NO: 136180
  derived and/or modified CDS sequence (opt3) from hemagglutinin__InfluenzaA__AJJ98765

SEQ ID NO: 140885 - RNA, 1701 nt, Artificial Sequence
  derived and/or modified CDS sequence (opt3) from hemagglutinin__InfluenzaA__AJJ98777
augaagaccaucauugcccugagcuacauacucugccuuguguucgcucagaaacugcccggcaacgacaauuccacagcaacuuuguguuuagggcaccaugccgucccuaacggaacgaucguuaagaccauuacaaaugaucaaaucgaggugacuaacgcgaccgaacugguacagucuuuuucaacaggugagauuugcaauaguccacaccagauccuagacggcgaaaacuguacccucauagaugcucugcuuggggacccgcagugcgauggauuccaaaauaaaaagugggaccuguuuguggagagaagcaaagccuauuccaacuguuaccccuaugaugucccugacuacgcaucuuugaggucgcucguggccucaagcggcacucuggaguucaauaacgaaaguuuuaauuggacagguguuacccagaacgggacguccucugcuugcauccggcgcagcaauaacuccuucuuuucacgacugaauuggcucacucauuuaaaguucaaguauccagcacugaacgugaccaugcccaacaaugaggaauuugauaaacuuuacauuuggggaguccaccauccuggcacagacaacgaucagaucuucuuguaugcccaggcuaguggccguauuacugugagcaccaagagaucucaacagacaguaaucccaaauauaggguccaggccccggguucgcaacauuccuucaagaaucagcauuuacuggaccaucgugaaaccaggagacauccugcuaauuaauaguacggguaaccucauagccccgaggggcuacuuuaagauccggucugggaaauccagcauuaugcgcucggaugcgcccaucggaaaguguaauucugagugcauaacuccuaacggcuccauuccaaaugacaagcccuuccagaacgucaaucgaaucacauauggugcauguccuagauacgugaaacagaacacccugaaacuugccacugggaugaggaaugugccagaaaaacaaacacggggaaucuuuggcgcuauugccggcuucaucgagaacgggugggagggaauggucgacgguugguauggcuuccgucaccaaaauucagaagggauuggacaggcagcugaucugaagaguacccaggccgcgauagaccagaucaacggcaaauugaaccgccucauugguaagacgaaugagaaauuucaccagaucgaaaaggaguucagcgaaguugaggggagaauccaggaucuggagaaguacguggaagacaccaaaauugauuuaugguccuauaacgccgagcugcucguagcacuugaaaaucaacauacaauagaccugacugauucugagaugaacaaguuguuugaaaagaccaagaaacagcuaagggagaaugcugaggacaugggcaacggaugcuucaagaucuaccacaagugugauaaugccugcauuggcagcauccggaacgggacauaugaccaugauguguaccgagacgaagcucugaauaaccgcuuucagauuaaaggagucgagcucaagucagguuacaaagacuggauccuguggauaaguuucgccaucuccugcuuucuucuguguguggcauugcucggcuucauuaugugggccugccagaaggggaauaucagauguaacauuugcaucuga

SEQ ID NO: 140886 - RNA, 1701 nt, Artificial Sequence; identical to SEQ ID NO: 137501
  derived and/or modified CDS sequence (opt3) from hemagglutinin__InfluenzaA__AJJ98789

SEQ ID NO: 140887 - RNA, 1701 nt, Artificial Sequence
  derived and/or modified CDS sequence (opt3) from hemagglutinin__InfluenzaA__AJJ98801
augaagaccaucauugcccugagcuacauacucugccuuguguucgcucagaaacugcccggcaacgacaauuccacagcaacuuuguguuuagggcaccaugccgucccuaacggaacgaucguuaagaccauuacaaaugaucaaaucgaggugacuaacgcgaccgaacugguacaaaauucuucaauuggugagaucugcgacaguccacaccagauacuagauggcgaaaacuguacacucaucgacgcucugcuuggggauccgcagugcgacggauuucagaauaaaaagugggaucuguucguggagagaaacaaagccuauagcaauuguuaccccuaugacgucccugauuacgcauccuugaggucucucguggccucgucaggcacccuggaauuuaacaaugagagcuucaacuggacugguguuacacagaaugggaccaguuccgcuugcauucggcgcucuaacaauagcuuuuucucccgacugaacuggcucacgcauuuaaacuuuaaguauccagcacugaaugugacuaugcccaacaaugagcaguucgacaaacuuuacaucuggggaguccaccauccuggcaccgauaaagaccagaucuuuuuguaugcccaaucaaguggccguauuacagugagcacuaagagaucucagcaggcuguaauaccaaacauuggguccaggccccggauccgcaauauuccuucaagaaucagcaucuacuggaccauuguuaaaccaggagauauacugcuaaucaacaguacagguaaucucauugccccgaggggcuacuucaagauccggucugggaaauccagcauaaugcgcucggacgcgcccauuggaaaguguaagucugaaugcaucaccccuaacggcuccaucccaaaugacaaacccuuucagaacgugaaucgaauuacguauggugcauguccuagauacgucaagcaaucaacucugaaacuugccacagggaugaggaacgugccagagaagcagacccggggaaucuucggcgcuauugccggcuuuauagaaaaugggugggagggaaugguggaugguugguauggcuuccgucaccagaacagugaggggcgcggacaagcagcugaccugaaaagcacucaggccgcgaucgaucagauuaauggcaaguugaacagacucaucgguaaaacaaacgaaaaguuccaccagaucgagaaggaauuuuccgaggucgaagggaggauucaagaccuggagaaauacguugaggauaccaagauagacuuauggucuuauaaugccgaacugcucguggcacuugagaaccagcauacgaucgaucugaccgacagcgaaaugaauaaauuguucgagaagacaaagaagcagcuacgggaaaacgcugaggauaugggcaauggaugcuuuaagauuuaccacaaaugugacaacgccugcaucggcucaauucgaaaugggacuuaugaucaugacguauaccgcgacgaggcucugaacaauagauuccagaucaagggaguggaacucaaaagugguuacaaggauuggauacuguggaucuccuuugccauuagcugcuuccuucugugugucgcauugcucggcuuuaucaugugggccugccaaaaagggaacauuagguguaauaucugcauauga

SEQ ID NO: 140888 - RNA, 1701 nt, Artificial Sequence
  derived and/or modified CDS sequence (opt3) from hemagglutinin__InfluenzaA__AJJ98813
augaagaccaucauugcccugagcuacauacucugccuuguguucgcucagaaacugcccggcaacgacaauuccacagcaacuuuguguuuagggcaccaugccgucccuaacggaacgaucguuaagaccauuacaaaugauagaaucgaggugacuaacgcgaccgaacugguacaaaauucuucaauuggugagaucugcgacaguccacaccagauacuagauggcgaaaacuguacacucaucgacgcucugcuuggggauccgcagugcgacggauuucagaauaaaaagugggaucuguucguggagaggagcaaagccuauuccaacuguuaccccuaugacgucccugauuacgcaucuuugcggucgcucguggccucaagcggcacccuggaauuuaauaacgagaguuucaauuggacugguguuacacaaaacgggaccuccucugcuugcauucgccgaagcaauuccucauuuuucagucgucugaacuggcucacgcauuuaaauuuuaaguauccagcacugaacgugacuaugcccaacaaugagcaguucgacaaacuuuacaucuggggaguccaccauccuggcaccgauaaagaccagaucuuuuuguaugcccagagcucuggcagaauuacaguguccacuaagaggucacaacaggcuguaguuccaaacauagggagccggccccgcauuagaaauaucccuaguaggauuucuaucuacuggaccaucgugaaaccaggagauauucugcuaauaaacuccacagguaaucucaucgccccgcggggcuacuucaagauucgcagcgggaaaucgucuaucaugcgauccgacgcgcccauaggaaaguguaagucagaaugcauuaccccuaacggcaguaucccaaaugacaaacccuuucagaacgucaauagaaucacguauggugcauguccuagguacgugaagcagagcacucugaaacuugccacagggaugcggaacgugccagagaagcaaacccguggaauuuucggcgcuaucgccggcuuuauugaaaaugggugggagggaauggucgaugguugguauggcuuccgccaccagaacuccgaggggagaggacaggcagcugaccugaaaucuacucaagccgcgauagaucagaucaauggcaaguugaacaggcucauugguaaaacaaaugaaaaguuccaccagaucgagaaggaauuuagcgagguugaagggcggauccaggaccuggagaaauacguggaggauaccaagauugacuuauggucauauaacgccgaacugcucguagcacuugagaaccaacauacgauagaucugaccgacagugaaaugaauaaauuguucgagaagacaaagaagcagcuacgagaaaacgcugaggauaugggcaauggaugcuuuaagaucuaccacaaaugugacaacgccugcauuggcuccauccgcaaugggacuuaugaucaugacguguacagagacgaggcucugaacaauagguuccagauuaagggagucgaacucaaaagcgguuacaaggauuggauccuguggauaucuuuugccaucucaugcuuccuucuguguguggcauugcucggcuuuauuaugugggccugccagaaagggaacauccgguguaauauuugcaucuga

SEQ ID NO: 140889 - RNA, 1701 nt, Artificial Sequence
  derived and/or modified CDS sequence (opt3) from hemagglutinin__InfluenzaA__AJJ98825
augaagaccaucauugcccugagcuacauacucugccuuguguucgcucaggagcugcccggcaacgacaauuccacagcaacuuuguguuuagggcaccaugccgucccuaacggaacgaucguuaaaaccauuacaaaugauagaaucgaagugacuaacgcgaccgagcugguacaaaauucuucaauuggugaaaucugcgacaguccacaccagauacuagauggcgagaacuguacacucaucgacgcucugcuuggggauccgcagugcgacggauuucagaauaagaaaugggaucuguucguggaaaggagcaaggccuauuccaacuguuaccccuaugacgucccugauuacgcaucuuugcggucgcucguggccucaagcggcacccuggaguuuaauaacgagaguuucaauuggacugguguuacacaaaacgggaccuccucugcuugcauucgccgaagcaauaacuccuuuuucucacgucugaauuggcucacgcauuuaaacuuuaaauauccagcacugaacgugacuaugcccaauaacgaacaguucgacaaguuguacaucuggggaguccaccauccuggcaccgauaaggaccagauuuuucuuuaugcccagaguagcggcagaaucacagugucuacuaaaaggucccaacaggcuguaauaccaaauauugggucacggcaccgcaucagaaacauucccagcaggaucaguaucuacuggaccauuguuaagccuggagauauacugcuaaucaauucuacagguaaccucauugccccacggggcuacuucaaaauccgcuccggaaagagcucgauaaugcgaucugacgcgccgauugggaaauguaaguccgagugcaucacccccaauggcucaaucccuaacgacaagccauuucagaaugugaacagaauuacguauggugcaugucccagguacgucaaacagaguacucugaaacuugccacagggaugcggaaugugccugaaaaacaaacccguggaaucuucggcgcuauugccggcuuuauagagaacgggugggagggaaugguggaugguugguauggcuuccgccaccagaauagcgaagggagaggacaggcagcugaccugaaguccacucaagccgcgaucgaucagauuaacggcaaauugaauaggcucaucgguaagacaaacgagaaauuccaucagaucgaaaaggaguuuucugaagucgaggggcggauucaggaccuggagaaguacguugaagauaccaaaauagacuuauggagcuauaacgccgagcugcucguggcacuugaaaaucaacacacgaucgaucugaccgacucagagaugaacaaguuguucgaaaagacaaagaaacagcuacgagagaaugcugaggauaugggcaacggaugcuuuaagauuuaccauaagugugacaaugccugcaucggcaguauucgcaacgggacuuaugaucacgacguauacagagacgaagcucugaauaacagguuccagaucaaaggaguggagcucaaguccgguuacaaagauuggauacuguggaucagcuuugccauuucuugcuuccuucugugugucgcauugcucggcuuuaucaugugggccugccagaaggggaauauucgguguaacaucugcauauga

SEQ ID NO: 140890 - RNA, 1701 nt, Artificial Sequence
  derived and/or modified CDS sequence (opt3) from hemagglutinin__InfluenzaA__AJJ98837
augaagaccaucauugcccugagcuacauacucugccuuguguucgcucagaaacugcccggcaacgacaauuccacagcaacuuuguguuuagggcaccaugccgucccuaacggaacgaucguuaagaccauuacaaaugaucaaaucgaggugacuaacgcgaccgaacugguacagucuucaaguacaggugagauuugcaauagcccacaccagauccuagacggcgaaaacuguacccucauagaugcucugcuuggggacccgcagugcgauggauuucaaaauaaaaagugggaccuguucguggagagauccaaagcccauucuaacuguuaucccuacgaugucccugacuaugcaucguugaggucacucguggccagcaguggcacucuggaauuuaauaacgaguccuucaauuggacagguguuacccagaacgggacgucuagcgcuugcauccggcgcuccaauaacucauuuuucagucgacugaauuggcucacucacuuaaacuuuaaguacccagcacugaacgugaccaugcccaauaacgagcaguucgauaaacuuuauauuuggggaguccaucacccuggcacagacaaagaucagaucuuuuuguacgcccaagcuagcggccguauuacugugucuaccaagagaucccagcaggccguaaucccaaauauagggucaaggccccggguucgcaacauuccuagcagagugaguaucuauuggacaauugucaaaccaggagacauccugcuaaucaauucuaccgguaaccucauugcgccgaggggcuacuucaagauacgguccgggaaaagcucgaucaugcgcucugaugcacccauuggaaaguguaauuccgccugcaucacgccuaacggcucaauaccaaaugacaagcccuuucagaacgugaaucgaauuacuuacggugcuuguccuagauaugugaaacaaaguacacugaaacuugccaccgggaugaggaacgucccagaaaagcagacucggggaaucuucggcgcaaucgcuggcuuuauugagaaugggugggaaggaaugguugacgguugguacggcuuccgucaccagaacagcgaggggcgcggacaagccgcggaucugaaguccacacaggccgcaaucgaccagauuaauggcaaauugaacagacucauagguaagaccaacgagaaauuccaucagaucgaaaaggaguuuucugaaguggaggggaggauucaagaucuggaaaaguauguagaggacacgaaaaucgauuuauggagcuacaaugcugagcugcucguggcccuugaaaaccagcacaccaucgaccugacagauucagagaugaauaaguuguucgaaaagacuaagaaacagcuacgggagaacgcugaagacaugggcaauggaugcuuuaagauuuaucauaagugugauaacgccugcauaggcaguauccgaaaugggaccuacgaccacgaugucuaucgcgacgaggcacugaacaauagauuccagauuaaaggaguggagcucaaguccgguuacaaagacuggauccuguggauuagcuuugccaucucuugcuuccuucuguguguugcuuugcucggcuuuauaaugugggcgugccaaaaggggaacaucagguguaauauuugcaucuga

SEQ ID NO: 140891 - RNA, 1701 nt, Artificial Sequence
  derived and/or modified CDS sequence (opt3) from hemagglutinin__InfluenzaA__AJJ98849
augaagaccaucauugcccugagcuacauacucugccuuguguucgcucaggagcugcccggcaacgacaauuccacagcaacuuuguguuuagggcaccaugccgucccuaacggaacgaucguuaaaaccauuacaaaugaucaaaucgaagugacuaacgcgaccgagcugguacagucuucaaguacaggugaaauuugcaauagcccacaccagauccuagacggcgagaacuguacccucauagaugcucugcuuggggacccgcagugcgauggauuucaaaauaagaaaugggaccuguucguggaaagauccaaggcccauucuaacuguuaucccuacgaugucccugacuaugcaucguugaggucacucguggccagcaguggcacucuggaguuuaauaacgaguccuucaauuggacagguguuacccagaacgggacgucuagcgcuugcauccggcgcuccaauaacucauuuuucagucgacugaauuggcucacucacuuaaacuuuaaauacccagcacugaacgugaccaugcccaauaacgaacaguucgauaaacuuuauauuuggggaguccaucacccuggcacagacaaggaucagaucuuuuuguacgcccaagcuagcggccguauuacugugucuaccaagagaucccagcaggccguaaucccaaauauagggucaaggcugcggguucgcaacauucccagcagagugaguaucuauuggacaauugucaagccuggagacauccuacucaucaauucuaccgguaaccugauugcgccaaggggcuacuucaaaauacgguccggaaagagcucgaucaugcgcucugaugcaccgauugggaaauguaauuccgccugcaucacgcccaacggcucaauaccuaaugacaagccauuucagaacgugaaucgaauuacuuacggugcuugucccagauaugugaagcaaaacacacuuaaacuggccaccgggaugaggaaugucccugagaagcagacucggggaaucuucggcgcaaucgcuggcuuuauugaaaacgggugggagggaaugguugacgguugguacggcuuccgucaccagaauagugaggggcgcggacaagccgcggauuugaaaagcacacaggccgcaaucgaccagauuaacggcaagcucaacagacugauagguaaaaccaaugaaaaguuccaucagaucgagaaagaauuuuccgagguggaagggaggauucaagauuuagagaaguauguagaggacacgaagaucgaucuguggucuuacaacgcugaacuccuuguggcccuggagaaucagcacaccaucgacuugacagauagcgaaaugaacaaacuauucgagaagacuaaaaagcagcugcgggaaaaugcugaggacaugggcaacggaugcuuuaaaauuuaucauaagugugauaaugccugcauaggcucaauccgaaacgggaccuacgaccacgaugucuaucgcgacgaggcacucaauaacagauuccagauuaagggaguggaacugaaaagugguuacaaggacuggauccuuuggauuuccuuugccaucagcugcuuccuguuguguguugcucuccugggcuuuauaaugugggcgugccaaaaagggaauaucagguguaacauuugcaucuga

SEQ ID NO: 140892 - RNA, 1701 nt, Artificial Sequence
  derived and/or modified CDS sequence (opt3) from hemagglutinin__InfluenzaA__AJJ98861
augaagaccaucauugcccugagcuacauacucugccuuguguucgcucagaaacugcccggcaacgacaauuccacagcaacuuuguguuuagggcaccaugccgucccuaacggaacgaucguuaagaccauuacaaaugaucaaaucgaggugacuaacgcgaccgaacugguacagauuucuucaacaggugagaucugcgacaguccacaccagauacuagauggcgaaaauuguacccucaucgacgcucugcuuggggauccgcagugcgacggauuucaaaacaaaaagugggaucuguucguggagagaagcaaagccuauuccaauuguuaccccuaugacgucccugauuacgcaucuuugaggucgcucguggccucaagcggcacucuggaauuuaacaaugagaguuucaacuggacagguguuacccagaaugggacguccucugcuugcauucggcgcagcaacaauuccuuuuucucacgacugaacuggcucacucauuuaaaguuuaaguauccagcacugaaugugaccaugcccaacaacgagcaguucgacaaacuuuacaucuggggaguccaccauccuggcacagauaaugaccagaucuuuuuguaugcccaagcuaguggccguauuacugugagcaccaagagaucucagcagacaguaauaccaaacauuggguccaggccccggguucgcaauaucccuucaagaauuagcaucuacuggaccaucgugaaaccaggagauauucugcuaauaaacaguacggguaaucucaucgccccgaggggcuacuucaagauucggucugggaaauccagcaucaugaagucggacgcgcccauaggaaaguguaacucugaaugcauuacuccuaauggcuccaucccaaacgacaaacccuuucagaaugucaaccgcaucacauauggugcauguccucgauacgugaagcaaaauacccugaaacuugccacugggaugagaaacgugccagagaagcagacaaggggaauuuucggcgcuaucgccggcuuuauugaaaaugggugggagggaauggucgaugguugguauggcuuccggcaccagaacucagaggggcguggacaagcagcugaccugaaaaguacccaggccgcgauagaucagaucaauggcaaguugaaccgccucauugguaaaacgaacgaaaaguuccaccagaucgagaaggaauuuagcgagguugaagggagaauccaagaccuggagaaauacguggaggauaccaagauugacuuaugguccuauaaugccgaacugcucguagcacuugagaaccagcauacaauagaucugacugacucugaaaugaauaaauuguucgagaagaccaaaaagcagcuaagggaaaacgcugaggauaugggcaauggaugcuuuaagaucuaccacaaaugugacaacgccugcauuggcagcauccggaaugggacauaugaucaugacguguaccgagacgaggcucugaacaaucgcuuccagauuaagggagucgaacucaaaucagguuacaaggauuggauccuguggauaaguuuugccaucuccugcuuccuucuguguguggcauugcucggcuuuauuaugugggccugccaaaaagggaacaucagauguaauauuugcaucuga

SEQ ID NO: 140893 - RNA, 1701 nt, Artificial Sequence
  derived and/or modified CDS sequence (opt3) from hemagglutinin__InfluenzaA__AJJ98873
augaagaccaucauugcccugagcuacucccucugccuuguguucgcucagaaacugcccggcaacgacaauucuacagcaacuuuguguuuagggcaccaugccgucccuaacggaacgauaguuaagaccaucacaaaugaucaaauugaggugacuaacgcgaccgaacugguacagucaaguagcacaggugagaucugcgacuccccacaccagauucuagauggcgaaaauuguacccucaucgacgcucugcuuggggauccgcagugcgacggauuucaaaacaaaaagugggaucuguucguggagagaucuaaagccuauucgaauuguuaccccuaugacgucccugauuacgcaucauugaggagccucguggccaguuccggcacucuggaauuuaacaaugagucuuucaacuggacagguguuacccagaaugggacgagcuccgcuugcauacggaagucaaacaauagcuuuuucagucgccugaacuggcucacucauuuaaaguuuaaauauccagcacugaaugugaccaugcccaacaacgagcaguucgacaaguuguacaucuggggaguccaccauccuggcacagauaaugaccagauuuuucuuuaugcccaggcuucuggccgaaucacuguguccaccaaacguucacaacagacaguaauuccaaacaucgggagcagacccaggguucggaauauaccuagucgcauuucuaucuacuggaccauugugaagccaggagauauccugcuaaucaacuccacggguaaucucauugccccgagaggcuacuucaaaauaaggagcgggaagucgucuaucaugcgguccgacgcgcccauuggaaaguguaacucagaaugcaucacuccuaauggcaguauaccaaacgacaaacccuuucagaaugucaaccgcauuacauauggugcauguccucgauacgugaagcaaaauacccugaaacuugccacugggaugagaaacgugccagagaagcagacaaggggaaucuucggcgcuaucgccggcuuuauugaaaaugggugggagggaauggucgaugguugguauggcuuccggcaccagaacagcgaggggcguggacaagcagcugaccugaaauccacccaggccgcgaucgaucagauuaauggcaaguugaaccgccucauagguaaaacgaacgaaaaguuccaccagaucgagaaggaauuuucugagguugaagggaggauucaagaccuggagaaauacguggaggauaccaagaucgacuuauggagcuauaaugccgaacugcucguagcacuugagaaccagcauacaaucgaucugacugacucagaaaugaauaaauuguucgagaagaccaaaaagcagcuaagagaaaacgcugaggauaugggcaauggaugcuuuaagauuuaccacaaaugugacaacgccugcauaggcaguauccggaaugggacauaugaucaugacguguaccgagacgaggcucugaacaaucgcuuccagauuaagggagucgaacucaaauccgguuacaaggauuggauccuguggauuagcuuugccaucucuugcuuccuucuguguguggcauugcucggcuuuauaaugugggccugccaaaaagggaacaucagauguaauauuugcaucuga

SEQ ID NO: 140894 - RNA, 1701 nt, Artificial Sequence
  derived and/or modified CDS sequence (opt3) from hemagglutinin__InfluenzaA__AJJ98885
augaagaccaucauugcccugagcaacauacucugccuuguguucgcucagaaacugcccggcaaugacaacuccacagcaacuuuguguuuagggcaccaugccgucccuaauggaacgaucguuaagaccauuacaaacgaucaaaucgaggugacuaaugcgaccgaacugguacagucuucaaguacaggugagauuugcgacagcccacaccagauccuagauggcgaaaacuguacccucauagacgcucugcuuggggauccgcagugcgacggauuucaaaauaaaaagugggaucuguucguggagagauccaaagccuacucuaacuguuaucccuacgacgucccugauuaugcaucguugaggucacucguggccagcaguggcacucuggaauuuaauaacgaguccuucaauuggacagguguuacccagaacgggacgucuagcgcuugcauccggcgcuccaauaacucauuuuucagucgacugaauuggcucacucauuuaaaguuuaaguacccagcacugaacgugaccaugcccaacaaagagaaguucgacaaacuuuauauuuggggaguccaccauccuggcacagauaaugaccagaucuuuuuguacgcccaggcuagcggccguauuacugugucuaccaagagaucccaacagacaguaaucccaaacauagggucaaggccccggguucgcaauauuccuagcagaaucaguauuuauuggaccaucgugaaaccaggagauauccugcuaauuaacucuacggguaaucucauagccccgaggggcuacuucaagauccgguccggaaagagcucgauuaugcgcucugacgcgcccaucgggaaauguaacuccgaaugcauaacuccuaauggcucaauuccaaacgacaagcccuuucagaaugucaaccgaaucacauacggugcauguccuagauaugugaaacagaauacccugaagcuggccacugggaugaggaacgugccagagaaacaaacacggggaaucuucggcgcuauugccggcuuuaucgaaaaugggugggagggaauggucgaugguugguacggcuuccgucaccagaacagugaggggauuggacaggcagcugaccuuaagagcacccaagccgcgauagaucagaucaauggcaaauugaaccgccucauugguaagacgaacgaaaaguuccaccagaucgagaaagaauuuuccgagguugaagggagaauccaggaccuggagaaguauguggaggauaccaaaauugacuuauggucuuacaaugccgaacugcucguagcacuugagaaccaacauacaauagaucugacugacagcgaaaugaauaaguuguucgagaaaaccaagaagcagcuaagggaaaacgcugaggauaugggcaauggaugcuuuaaaaucuaucacaagugugacaacgccugcauuggcucaauccggaaugggacauacgaucaugacguguaucgagacgaggcucugaacaaucgcuuccagauuaaaggagucgaacucaagagugguuacaaagauuggauccuguggauauccuuugccaucagcugcuuccuucuguguguggcauugcucggcuuuauuaugugggccugccagaaggggaacaucagauguaauauuugcaucuga

SEQ ID NO: 140895 - RNA, 1701 nt, Artificial Sequence
  derived and/or modified CDS sequence (opt3) from hemagglutinin__InfluenzaA__AJJ98897
augaagaccaucauugcccugagcuacauacucugccuuguguucgcucagaaacugcccggcaacgacaauuccacagcaacuuuguguuuagggcaccaugccgucccuaacggaacgaucguuaagaccauuacaaaugaucaaaucgaggugacuaacgcgaccgaacugguacagucuucaaguacaggugagauuugcgacagcccacaccagauccuagauggcgaaaauuguacccucauagacgcucugcuuggggauccgcagugcgacggauuucaaaacaaaaagugggaucuguucguggagagauccaaagccuauucuaauuguuaccccuaugacgucccugauuacgcaucguugaggucacucguggccagcaguggcacucuggaauuuaacaaugaguccuucaacuggacagguguuacccagaaugggacgucuagcgcuugcauccggcgcuccaacucaaguuucuuuagccgacugaauuggcucacucauuuaaaguuuaaguauccagcacugaacgugaccaugcccaauaacgagaaauucgacaaacuuuacauuuggggaguccaccauccuggcacagauaacgaccagaucuuuuuguaugcccaggcuucuggccguauuacuguguccaccaagagaucacaacagacaguaaucccaaauauagggagcaggccccggguucgcaacauuccuaguagaaucucuauuuacuggaccaucgugaagccaggagauauccugcuaauuaauuccacggguaaccucauagccccgaggggcuacuucaaaauccggagcgggaagucgucuauuaugcgcuccgacgcgcccaucggaaaguguaauucagaaugcauaacuccuaacggcaguauuccaaaugacaaacccuuucagaacgucaaucgaaucacauauggugcauguccuagauacgugaagcagaacacccugaaacuugccacugggaugaggaaugugccagagaagcaaacacggggaaucuucggcgcuauugccggcuuuaucgaaaacgggugggagggaauggucgaugguugguauggcuuccgucaccagaauagcgaggggauuggacaggcagcugaccugaaauccacccaagccgcgauagaucagaucaacggcaaguugaaucgccucauugguaaaacgaacgaaaaguuccaccagaucgagaaggaauuuucugagguugaagggagaauccaggaccuggagaaauacguggaggauaccaagguagacuuauggagcuauaacgccgaacugcucguggcacuugagaaucaacauacaauugaucugacugacucagaaaugaacaaauuguucgagaagaccaaaaagcagcuaagggaaaaugcugaggauaugggcaacggaugcuuuaagauauaccacaaaugugacaaugccugcaucggcaguauucggaacgggacauaugaucaugacgucuaccgagacgaggcucugaauaaccgcuuccagaucaagggaguggaacucaaauccgguuacaaggauuggauucuguggaucagcuuugccauaucuugcuuccuucuguguguugcauugcucggcuuuaucaugugggccugccagaaagggaauauuagauguaacaucugcauuuga

SEQ ID NO: 140896 - RNA, 1701 nt, Artificial Sequence; identical to SEQ ID NO: 139818
  derived and/or modified CDS sequence (opt3) from hemagglutinin__InfluenzaA__AJJ98909

SEQ ID NO: 140897 - RNA, 1701 nt, Artificial Sequence
  derived and/or modified CDS sequence (opt3) from hemagglutinin__InfluenzaA__AJJ98921
augaagaccaucauugcccugagcuacauacucugccuuguguucgcucagaaacugcccggcaaggacaacuccacagcaacuuuguguuuagggcaccaugccgucccuaauggaacgaucguuaaaaccauuacaaacgaucaaaucgaggugacuaaugcgaccgaacugguacagucuucaaguacaggugagauuugcaacagcccacaccagauccuagacggcgaaaauuguacccucauagaugcucugcuuggggacccgcagugcgauggauuucaaaacaagaaaugggaccuguucguggagagauccaaggccuauucuaauuguuaccccuaugaugucccugacuacgcaucguugaggucacucguggccagcaguggcacucuggaauuuaacaaugaguccuucaacuggacagguguuaagcagaaugggaccucuagcgcuugcauccggcgcuccaacucaaguuucuuuagccgacugaauuggcucacgcauuuaaacuuuaaauauccagcacugaaugugacuaugcccaacaacgagcaguucgauaagcuguacauuuggggaguccaccauccuggcaccgacaaagaucagaucuuuuuguaugcccaaucuuccggccguauuacagugucaacuaagagaagccagcaggcuguaaucccaaauauagggaguaggccccggauucgcaacaucccuucuagaauuuccaucuacuggaccaucguuaaaccaggagacauucugcuaauaaauagcacagguaaccucaucgccccgaggggcuacuucaagauucggucggggaagucuuccaucaugcgcucagaugcgcccauaggaaaauguaauagugaaugcauuaccccuaacggcagcaucccaaaugacaagcccuuucagaacgugaaucgaaucacguauggugcauguccuagauacgucaaacaauccacucugaaacuugccacagggaugaggaacgugccagagaagcagacccggggaauuuucggcgcuaucgccggcuuuauugaaaaugggugggagggaaugguggacgguugguauggcuuccgucaccagaacucugaggggcgcggacaagcagcugaucuuaagagcacucaggccgcgauagaccagaucaauggcaaauugaacagacucauugguaagacaaaugaaaaguuccaccagaucgagaaagaauuuucagaggucgaagggaggauccaagaucuggagaaguacguugaggacaccaaaauugauuuauggaguuauaacgccgaacugcucguggcacuugagaaccagcauacgauagaccugaccgauuccgaaaugaauaaguuguucgagaaaacaaagaagcagcuacgggaaaacgcugaggacaugggcaauggaugcuuuaaaaucuaccacaagugugauaacgccugcauuggcagcauccgaaaugggacuuauaaccaugacguauaccgcgaugaggcucugaauaacagauuccagauuaaaggaguggaacucaagucugguuacaaagacuggauccuguggauaucauuugccaucaguugcuuccuucugugugucgcauugcucggcuuuauuaugugggccugccaaaaggggaauaucagguguaacauuugcaucuga

SEQ ID NO: 140898 - RNA, 1701 nt, Artificial Sequence; identical to SEQ ID NO: 137501
  derived and/or modified CDS sequence (opt3) from hemagglutinin__InfluenzaA__AJJ98933

SEQ ID NO: 140899 - RNA, 1701 nt, Artificial Sequence; identical to SEQ ID NO: 135030
  derived and/or modified CDS sequence (opt3) from hemagglutinin__InfluenzaA__AJJ98945

SEQ ID NO: 140900 - RNA, 1701 nt, Artificial Sequence
  derived and/or modified CDS sequence (opt3) from hemagglutinin__InfluenzaA__AJJ98957
augaagaccaucauugcccugagcuacauacucugccuuguguucgcucagaaacugcccggcaacgacaauuccacagcaacuuuguguuuagggcaccaugccgucccuaacggaacgaucguuaagaccauuacaaaugaucaaaucgaggugacuaacgcgaccgaacugguacagucuucaaguacaggugagauuugcgacagcccacaccagauccuagauggcgaaaauuguacccucauagacgcucugcuuggggauccgcagugcgacggauuucaaaacaaaaagugggaucuguucguggagagauccaaagccuauucuaauuguuaccccuaugacgucccugauuacgcaucguugaggucacucguggccagcaguggcacucuggaauuuaacaaugaguccuucaacuggacagguguuacccagaaugggacgucuagcgcuugcauccggcgcuccaacaauucauuuuucagucgacugaacuggcucacucauagcaaguuuaaguauccagcauuaaaugugaccaugcccaacaacgagcaguucgacaaacuguacauuuggggaguccaccauccuggcacagauaaugaccagaucuuucuuuaugcccaggcuucuggccguauuacuguguccaccaagagaucacaacagacaguaaucccaaacauagggagcaggccccggguucgcaauauuccuaguagaaucucuauuuacuggaccaucgugaaaccaggagauaucuugcugauuaacuccacggguaaucuaauagccccgaggggcuacuucaagauccggagcgggaaaucgucuauuaugcgcuccgacgcgcccaucggaaaguguaacucagaaugcauaacuccuaauggcaguauuccaaacgacaagcccuuucagaaugucaaccgaaucacauauggugcauguccuagauacgugaaacaaaauacccucaagcuggccacugggaugaggaacgugccagagaaacagacacggggaaucuucggcgcuauugccggcuuuaucgaaaaugggugggagggaauggucgaugguugguauggcuuccgucaccagaacagcgaggggcgcggacaagcagcugaccuuaaguccacccaggccgcgauugaucagauaaauggcaaacugaacagauugaucgguaagacgaacgaaaaauuccaccagauugagaaggaauuuucugagguugaagggaggauccaagaccucgagaaguacguggaggauaccaaaaucgaccuguggagcuauaaugccgaauuacugguagcacucgagaaccagcauacaauugaucuuacugacucagaaaugaauaagcuguucgagaaaaccaagaaacaguugcgggaaaacgcugaggauaugggcaauggaugcuuuaagauauaccacaagugugacaacgccugcaucggcaguauucgaaaugggacauaugaucaugacguguaccgcgacgaggcucuaaacaauagauuccagaucaaaggagucgaacugaaguccgguuacaaagauuggauucucuggaucagcuuugccauaucuugcuuccugcuuuguguggcacuguugggcuuuaucaugugggccugccaaaaggggaacauuagguguaauaucugcauuuga

SEQ ID NO: 140901 - RNA, 1701 nt, Artificial Sequence; identical to SEQ ID NO: 130482
  derived and/or modified CDS sequence (opt3) from hemagglutinin__InfluenzaA__AJJ98969

SEQ ID NO: 140902 - RNA, 1701 nt, Artificial Sequence
  derived and/or modified CDS sequence (opt3) from hemagglutinin__InfluenzaA__AJJ98981
augaagaccaucauugcccugagcuacauacucugccuuguguucgcucagaaacugcccggcaacgacaauuccacagcaacuuuguguuuagggcaccaugccgucccuaacggaacgaucguuaagaccauuacaaaugauagaaucgaggugacuaacgcgaccgaacugguacaaaauucuucaauuggugagaucugcgacaguccacaccauauacuagauggcgaaaacuguacacucaucgacgcucugcuuggggauccgcagugcgacggauuucagaauaaaaagugggaucuguucguggagaggagcaaagccuauuccaacuguuaccccuaugacgucccugauuacgcaucuuugcggucgcucguggccucaagcggcacccuggaauuuaauaacgagaguuucaauuggacugguguuacacagaacgggaccuccucugcuugcauucgccgaagcaauuccucauuuuucagucgucugaacuggcucacgcacuuaaauuuuaaguauccagcacugaacgugacuaugcccaacaaugagcaauucgacaaacuuuacaucuggggaguccaucacccuggcaccgauaaagaccagaucuuuuuguaugcccagagcucuggcagaauuacaguguccacuaagaggucacagcaagcuguaauaccaaacauugggagccggccccgcaucagaaauguuccuaguaggauuucuaucuacuggaccaucgugaaaccaggagauauucugcuaauaaacuccacagguaaucucaucgccccgcggggcuacuucaagauucgcagcgggaaaucgucuaucaugcgauccgacgcgcccauaggaaaguguaagucagaaugcauuaccccuaacggcaguaucccaaaugacaaacccuuucagaacgucaauagaaucacguauggugcauguccuagguacgugaagcagagcacucugaaacuugccacagggaugcggaacgugccagagaagcagacccguggaauuuucggcgcuaucgccggcuuuauugaaaaugggugggagggaauggucgaugguugguauggcuuccgccaccaaaacuccgaggggagaggacaggcagcugaccugaaaucuacucaggccgcgauagaucaaaucaauggcaaguugaacaggcucauugguaaaacaaaugaaaaguuccaucagaucgagaaggaauuuagcgagguugaagggcggauccaggaccuggagaaauacguggaggauaccaagauugacuuauggucauauaacgccgaacugcucguagcacuugagaaccagcacacgauagaucugaccgacagugaaaugaauaaauuguucgagaagacaaagaagcaacuacgagaaaacgcugaggauaugggcaauggaugcuuuaagaucuaccauaaaugugacaacgccugcauuggcuccauccgcaaugggacuuaugaucacaacguguacagagacgaggcucugaauaacagguuccagauuaagggagucgaacucaaaagcgguuacaaggacuggauccuguggauaucuuuugccaucucaugcuuccuucuguguguggcauugcucggcuuuauuaugugggccugccagaaagggaauauccgguguaacauuugcaucuga

SEQ ID NO: 140903 - RNA, 1701 nt, Artificial Sequence
  derived and/or modified CDS sequence (opt3) from hemagglutinin__InfluenzaA__AJJ98993
augaagaccaucauugcccugagcuacauacucugccuuguguucgcucagaaacugcccggcaacgacaauuccacagcaacuuuguguuuagggcaccaugccgucccuaacggaacgaucguuaagaccauuacaaaugaucaaaucgaggugacuaacgcgaccgaacugguacagaauagcucaauuggugagaucugcgacaacccacaccagauacuagauggcgaaaauuguacacucaucgacgcucugcuuggggauccgcagugcgacggauuucaaaacaaaaagugggaucuguucguggagagaaguaaagccuauagcaauuguuaccccuaugacgucccugauuacgcauccuugaggucucucguggccucgucaggcacccuggaauuuaacaaugagagcuucaacuggacugguguuacacagaaugggaccaguuccgcuugcaugcggcgcucuaacagcuccuuuuucucacgacugaauuggcucacgcauuuaaacuuuaaguauccagcacugaacgugacuaugcccaauaacgagcaguucgacaaacuuuacauuuggggaguccaccauccuggcaccgauaaggaccagaucuuuuuguaugcccaaaguagcggccguauuacagugucuacuaagagaucccagcaggcuguaaucccaaauauagggucaaggccccggauucgcaacaucccuagcagaauuaguaucuacuggaccaucguuaaaccaggagauauucugcuaauaaauucuacagguaaccucaucgccccgaggggcuacuucaagauucgguccgggaaaagcucgaucaugcgcucugacgcgcccauaggaaaguguaauuccgaaugcauuaccccuaacggcucaaucccaaaugacaagcccuuucagaacgugaaucgaaucacguauggugcauguccuagauacgucaaacaaaguacucugaaacuugccacagggaugaggaacgugccagagaagcagacccggggaauuuucggcgcuaucgccggcuuuauugaaaaugggugggagggaaugguggaugguugguauggcuuccgucaccagaacagcgaggggcgcggacaagcagcugaccugaaguccacucaggccgcgauagaucagaucaauggcaaauugaacagacucauugguaagacaaacgaaaaauuccaccagaucgagaaggaauuuucugaggucgaagggaggauccaagaccuggagaaguacguugaggauaccaaaauugacuuauggagcuauaaugccgaacugcucguggcacuugagaaccagcauacgauagaucugaccgacucagaaaugaauaaguuguucgagaaaacaaagaaacagcuacgggaaaacgcugaggauaugggcaauggaugcuuuaagaucuaccacaagugugacaacgccugcauuggcaguauccgaaaugggacuuaugaucaugacguauaccgcgacgaggcucugaacaauagauuccagauuaaaggaguggaacucaaguccgguuacaaagauuggauccuguggauaucuuuugccaucucuugcuuccuucugugugucgcauugcucggcuuuauuaugugggccugccaaaaggggaacaucagguguaauauuugcaucuga

SEQ ID NO: 140904 - RNA, 1701 nt, Artificial Sequence
  derived and/or modified CDS sequence (opt3) from hemagglutinin__InfluenzaA__AJJ99005
augaagaccaucauugcccugagcuacauacucugccuuguguucgcucagaaacugcccggcaacgacaauuccacagcaacuuuguguuuagggcaccaugccgucccuaacggaacgaucguuaagaccauuacaaaugaucaaaucgaggugacuaacgcgaccgaacugguacagucuucaaguacaggugagauuugcaauagcccacaccagauccuagacggcgaaaacuguacccucauagaugcucugcuuggggacccgcagugcgauggauuucaaaauaaaaagugggaccuguucguggagagauccaaagcccauucuaacuguuaucccuacgaugucccugacuaugcaucguugaggucacucguggccagcaguggcacucuggaauuuaauaacgaguccuucaauuggaucgguguuacacagaacgggaccucuagcgcuugcauucggcgcuccaauaacucauuuuucagucgacugaauuggcucacgcacuuaaacuuuaaguacccagcacugaacgugacuaugcccaauaacgagcaguucgauaagcuguauaucuggggaguccaucacccuggcaccgacaaagaucagaucuuuuuguacgcccaagcuagcggccguauuacagugucuacuaagagaucccagcaggccguaauaccaaauauugggucaaggccccggguucgcaacaucccuagcagagugaguauuuauuggaccaucgucaaaccaggagacauccugcuaauuaauucuacagguaaccucauagcgccgaggggcuacuucaagauccgguccgggaaaagcucgauuaugcgcucugaugcacccaucggaaaguguaauuccgccugcauaaccccuaacggcucaauuccaaaugacaagcccuuucagaacgugaaucgaaucacguacggugcuuguccuagauaugugaaacaaaacacucugaaacuugccacagggaugaggaaugucccagaaaaacagacccggggaaucuucggcgcaauugcuggcuuuaucgagaacgggugggaaggaaugguugacgguugguacggcuuccgucaccagaauagugaggggcgcggacaagccgcggaucuuaagagcacucaggccgcaauugaccagauaaacggcaaauugaacagacucaucgguaagacaaaugagaaauuccaucagauugaaaaggaguuuuccgaaguggaggggaggauccaagaucuggaaaaguauguagaggacaccaaaaucgauuuauggucuuacaacgcugagcugcucguggcccuugaaaaucagcacacgauugaccugaccgauagcgagaugaacaaguuguucgaaaagacaaagaaacagcuacgggagaaugcugaagacaugggcaacggaugcuuuaagauauaucauaagugugauaaugccugcaucggcucaauucgaaacgggacuuacgaccacgaugucuaucgcgacgaggcacugaauaacagauuccagaucaaaggaguggagcucaagagugguuacaaagacuggauucuguggaucuccuuugccauaagcugcuuccuucuguguguugcuuugcucggcuuuaucaugugggcgugccaaaaggggaauauuagguguaacaucugcauuuga

SEQ ID NO: 140905 - RNA, 1701 nt, Artificial Sequence; identical to SEQ ID NO: 131459
  derived and/or modified CDS sequence (opt3) from hemagglutinin__InfluenzaA__AJJ99017

SEQ ID NO: 140906 - RNA, 1701 nt, Artificial Sequence
  derived and/or modified CDS sequence (opt3) from hemagglutinin__InfluenzaA__AJJ99029
augaagaccaucauugcccugagcuacauacucugccuuguguucgcucagaaacugcccggcaacgacaauuccacagcaacuuuguguuuagggcaccaugccgucccuaacggaacgaucguuaagaccauuacaaaugaucaaaucgaggugacuaacgcgaccgaacugguacagucuucaaguacaggugagauuugcgacagcccacaccagauccuagauggcgaaaauuguacccucauagacgcucugcuuggggauccgcagugcgacggauuucaaaacaaaaagugggaucuguucaucgagagauccaaagccuauucuaauuguuaccccuaugacgugccugauuacgcaucguugaggucacucgucgccagcaguggcacucuggaauuuaacaaugaguccuucaacuggacaggugugacccagaaugggacgucuagcuccugcauucggcgcucaaacaauagcuuuuucagccgacugaacuggcucacucauuuaaaguuuaaguauccagcucugaauguuaccaugcccaacaacgagcaguucgacaaacuuuacaucuggggagugcaccauccuggcacagauaaugaccagauuuuucuuuaugcacaagccucuggccguaucacugucuccaccaagagaucacagcagacagugauaccaaacauugggagcaggccccggguacgcaauaucccuaguagaauuucuaucuacuggaccaucguuaaaccaggagauauucugcuaauaaacuccacggguaaucucaucgcuccgaggggcuacuucaagauucggagcgggaaaucgucuaucaugcgcuccgacgcccccauaggaaaguguaacucagaaugcauuacuccuaauggcaguaucccaaacgacaagcccuuucagaaugugaaccgaaucacauauggugcguguccuagauacgucaaacaaaauacccugaaguuggcaacugggaugaggaacgugccagagaaacagacacggggaauuuucggcgccaucgcuggcuuuauugaaaaugggugggagggaaugguggaugguugguauggcuuccgucaccagaacagcgaggggcgcggacaagccgcagaccugaaguccacccaggcugccauagaucagaucaauggcaaauugaacagacucauugguaagacgaacgaaaaauuccaccagaucgagaaggaauuuucugaggucgaagggaggauccaagaccuggagaaguacguugaggauaccaaaauugacuuauggagcuauaaugcggaacugcucguggcccuugagaaccagcauacaauagaucugacugacucagaaaugaauaaguuguucgagaaaaccaagaaacagcuacgggaaaacgcagaggauaugggcaauggaugcuuuaagaucuaccacaagugugacaacgcuugcauuggcaguauccgaaaugggacauaugaucauaacguauaccgcgacgaggcccugaauaacagauuccagauuaaaggaguggaacucaaguccgguuacaaagacuggauccuguggauaaguuuugcuaucucuugcuuccuucugugugucgccuugcucggcuuuauuaugugggcaugccaaaaggggaauaucagguguaacauuugcaucuga

SEQ ID NO: 140907 - RNA, 1701 nt, Artificial Sequence
  derived and/or modified CDS sequence (opt3) from hemagglutinin__InfluenzaA__AJJ99041
augaagaccaucauugcccugagcuacauacucugccuuguguucgcucagaaacugcccggcaacgacaauuccacagcaacuuuguguuuagggcaccaugccgucccuaacggaacgaucguuaagaccauuacaaaugaucaaaucgaggugacuaacgcgaccgaacugguacagucuucaaguacaggugagauuugcgacagcccacaccagauccuagauggcgaaaauuguacccucauagacgcucugcuuggggauccgcagugcgacggauuucaaaacaaaaagugggaucuguucguggagagauccaaagccuauucuaauuguuaccccuaugacgucccugauuacgcaucguugaggucacucguggccagcaguggcacucuggaauuuaacaaugaguccuucaacuggacagguguuacccagaaugggacgucuagcgcuugcaagcggggauccgacaacucauuuuucagucgccugaauuggcucacucauuuaaaguuuaaauauccagcacugaacgugaccaugcccaauaacgagaaguucgauaaacuuuacaucuggggcguccaccauccuggcacagacaacgaucagauuuuuccauaugcccaggcuagcgggcgaaucacugugucuaccaagcguucccaacagacaguaauucccaauaucggaucaagaccuaggguucggaacauaccaagccgcauuaguaucuacuggaccauugugaaaccgggugacaucuugcugaucaauucuacgggcaaccuaauugcccccagaggguacuucaagauaagguccggaaagagcucgaucaugcggucugacgcgccuauuggcaaauguaauuccgguugcaucacuccaaacgggucaauacccaaugauaagccuuuucagaacgucaaucgcauuacauauggagcauguccacgauacgugaaacagaguacccucaagcuggccacuggcaugagaaacgugcccgaaaaacaaacaaggggcaucuucggggcuaucgccggauuuauugagaaugguugggaaggcauggucgacgggugguauggauuccggcaccagaacagcgagggcaucggucaggcagcugaucuuaaguccacccaagccgcgauuaaucagauaaacgggaaacugaaucguuugaucggcaagacgaacgagaaguuccaccagauugaaaaagaguuuucugaaguugagggacgcauccaggaccucgaaaaguacguggaggauaccaaaaucgaccuguggagcuauaacgccgaguuacugguagcacucgaaaaucaacauacaauugaucuuacugacucagagaugaacaagcuguucgaaagaaccaaaaagcaguugagggagaaugcugaagauaugggcaacgggugcuuuaagauauaccacaaaugugacaaugccugcaucggaaguauucggaacgguacauaugaucaugacguguaccgagacgaggcucuaaauaaccgcuuccagaucaagggcgucgagcugaaauccggguacaaggauuggauucucuggaucagcuuugccauaucuugcuuccugcuuuguguggcacuguugggauuuaucaugugggccugccagaaaggcaauauuagauguaacaucugcauuuga

SEQ ID NO: 140908 - RNA, 1701 nt, Artificial Sequence; identical to SEQ ID NO: 137906
  derived and/or modified CDS sequence (opt3) from hemagglutinin__InfluenzaA__AJJ99053

SEQ ID NO: 140909 - RNA, 1701 nt, Artificial Sequence; identical to SEQ ID NO: 137906
  derived and/or modified CDS sequence (opt3) from hemagglutinin__InfluenzaA__AJJ99065

SEQ ID NO: 140910 - RNA, 1701 nt, Artificial Sequence
  derived and/or modified CDS sequence (opt3) from hemagglutinin__InfluenzaA__AJJ99089
augaagaccaucauugcccugagcuacauacucugccuuguguucgcucagaaacugcccggcaacgacaauuccacagcaacuuuguguuuagggcaccaugccgucccuaacggaacgaucguuaagaccauuacaaaugauagaaucgaggugacuaacgcgaccgaacugguacaaaauucuucaauuggugagaucugcgacaguccacaccagauacuagauggcgaaaacuguacacucaucgacgcucugcuuggggauccgcagugcgacggauuucagaauaaaaagugggaucuguucguggagaggaacaaagccuauagcaauuguuaccccuaugacgucccugauuacgcauccuugcggucucucguggccucgucaggcacccuggaauuuaacaaugagagcuucaacuggacugguguuacacaaaaugggaccaguuccgcuugcauucgccgaucuaacagcuccuuuuucucacgucugaauuggcucacgcauuuaaacuuuaaguauccagcacugaacgugacuaugcccaauaacgagcaguucgacaaacuuuacaucuggggaguccaccauccuggcaccgauaaagaccagaucuuuuuguaugcccagaguagcggcagaauuacagugucuacuaagaggucccaacaggcuguaauaccaaauauugggucacggccccgcaucagaaacauuccuagcaggaucaguaucuacuggaccauuguuaaaccaggagauauacugcuaaucaauucuacagguaaccucauugccccgcggggcuacuucaagauccgcuccgggaaaagcucgauaaugcgaucugacgcgcccauuggaaaguguaaguccgaaugcaucaccccuaauggcucaaucccaaacgacaaacccuuucagaaugugaacagaauuacguauggugcauguccuagguacgucaagcagaguacucugaaacuugccacagggaugcggaaugugccagagaagcaaacccguggaaucuucggcgcuauugccggcuuuauagaaaacgggugggagggaaugguggaugguugguauggcuuccgccaccagaauagcgaggggagaggacaggcagcugaccugaaauccacucaagccgcgaucgaucagauuaacggcaaguugaauaggcucaucgguaaaacaaacgaaaaguuccaccagaucgagaaggaauuuucugaggucgaagggcggauucaggaccuggagaaauacguugaggauaccaagauagacuuauggagcuauaacgccgaacugcucguggcacuugagaaucaacauacgaucgaucugaccgacucagaaaugaacaaauuguucgagaagacaaagaagcagcuacgagaaaaugcugaggauaugggcaacggaugcuuuaagauuuaccacaaaugugacaaugccugcaucggcaguauucgcaacgggacuuaugaucaugacguauacagagacgaggcucugaauaacagguuccagaucaagggaguggaacucaaauccgguuacaaggauuggauacuguggaucagcuuugccauuucuugcuuccuucugugugucgcauugcucggcuuuaucaugugggccugccagaaagggaauauucgguguaacaucugcauauga

SEQ ID NO: 140911 - RNA, 1701 nt, Artificial Sequence; identical to SEQ ID NO: 137596
  derived and/or modified CDS sequence (opt3) from hemagglutinin__InfluenzaA__AJJ99101

SEQ ID NO: 140912 - RNA, 1701 nt, Artificial Sequence; identical to SEQ ID NO: 137501
  derived and/or modified CDS sequence (opt3) from hemagglutinin__InfluenzaA__AJJ99113

SEQ ID NO: 140913 - RNA, 1701 nt, Artificial Sequence
  derived and/or modified CDS sequence (opt3) from hemagglutinin__InfluenzaA__AJJ99125
augaagaccaucauugcccugagcuacauacucugcaugguguucgcucagaaacuucccggcaacgacaauuccacagcaacucuguguuuggggcaccaugccgucccuaacggaacgaucguuaagaccauuacaaaugaucaaaucgaggugacuaacgcgaccgaauuaguacagucuucaaguacaggugagauuugcaauagcccacaccagauccuggacggcgaaaacuguacccuaauagaugcucuccugggggacccgcagugcgauggauuucaaaauaaaaagugggaccuuuucguggagagauccaaagcccauucuaacuguuaucccuacgaugucccugacuaugcaucgcugaggucauugguggccagcaguggcacucucgaauuuaauaacgaguccuucaauuggacagguguuacccagaacgggacgucuagcgcuugcauccggcgcuccucaaauagcuuuuucagucgacugaacuggcugacucaccucaauuuuaaguacccagcauuaaacgugaccaugcccaacaaugagcaguucgauaagcuguauauuuggggaguccaucacccuggcacagacaaagaucagaucuuucuuuacgcccaggcuucuggccguauuacuguguccaccaagagaucacaacaggccguaaucccaaacauagggagcaggccccggguucgcaauauuccuaguagagugucuaucuauuggacaauugucaaaccaggagacaucuugcugaucaacuccaccgguaaucuaauugcgccgaggggcuacuucaagauacggagcgggaaaucgucuaucaugcgcuccgaugcacccauuggaaaguguaacucagccugcaucacgccuaauggcaguauaccaaacgacaagcccuuucagaaugugaaccgaauuacuuacggugcuuguccuagauaugugaaacaaaauacacucaagcuggccaccgggaugaggaacgucccagaaaaacagacucggggaaucuucggcgcaaucgcuggcuuuauugagaaugggugggaaggaaugguugacgguugguacggcuuccgucaccagaacagcgaggggcgcggacaagccgcggaucuuaaguccacacaggccgcaaucgaccagauuaauggcaaacugaacagauugauagguaagaccaacgagaaauuccaucagaucgaaaaggaguuuucugaaguggaggggaggauucaagaucucgaaaaguauguagaggacacgaaaaucgaucuguggagcuacaaugcugaguuacugguggcccucgaaaaccagcacaccaucgaccuuacagauucagagaugaauaagcuguucgagaaaacuaagaaacaguugcgggaaaacgcugaagacaugggcaauggaugcuuuaagauuuaucauaagugugauaacgccugcauaggcaguauccgaaaugggaccuacgaccacgaugucuaucgcgacgaggcacuaaacaauagauuccagauuaaaggaguggagcugaaguccgguuacaaagacuggauccucuggauuagcuuugccaucucuugcuuccugcuuuguguugcucuguugggcuuuauaaugugggcgugccaaaaggggaacaucagguguaauauuugcaucuga

SEQ ID NO: 140914 - RNA, 1701 nt, Artificial Sequence
  derived and/or modified CDS sequence (opt3) from hemagglutinin__InfluenzaA__AJJ99137
augaagaccaucauugcccugagcuacauacucugccuuguguucgcucagaaacugcccggcaacgacaauuccacagcaacuuuguguuuagggcaccaugccgucccuaacggaacgaucguuaagaccauuacaaaugaucaaaucgaggugacuaacgcgaccgaacugguacagucuucaaguacaggugagauuugcaauagcccacaccagauccuagacggcgaaaacuguacccucauagaugcucugcuuggggacccgcagugcgauggauuucaaaauaaaaagugggaccuguucguggagagauccaaagcccauucuaacuguuaucccuacgaugucccugacuaugcaucguugaggucacucguggccagcaguggcacucuggaauuuaauaacgaguccuucaauuggacagguguuacccagaacgggacgucuagcgcuugcauccggcgcuccaauaacucauuuuucagucgacugaauuggcucacucacuuaaacuuuaaguacccagcacugaacgugaccaugcccaauaacgagcaguucgauaagcuguauauuuggggaguccaucacccuggcacagacaaagaucagaucuuuuuguacgcccaagcuagcggccguauuacugugucuaccaagagaucccagcaggccguaaucccaaauauagggucaaggccccggguucgcaacauuccuagcagagugaguaucuauuggacaauugucaaaccaggagacauccugcuaaucaauucuaccgguaaccucauugcgccgaggggcuacuucaagauacgguccgggaaaagcucgaucaugcgcucugaugcacccauuggaaaguguaauuccgccugcaucacgccuaacggcucaauaccaaaugacaagcccuuucagaacgugaaucgaauuacuuacggugcuuguccuagauaugugaaacaaaacacacugaaacuugccaccgggaugaggaaugucccagaaaaacagacucggggaaucuucggcgcaaucgcuggcuuuauugagaacgggugggaaggaaugguugacgguugguacggcuuccgucaccagaauagugaggggcgcggacaagccgcggaucuuaagagcacacaggccgcaaucgaccagauuaacggcaaauugaacagacucauagguaagaccaaugagaaauuccaucagaucgaaaaggaguuuuccgaaguggaggggaggauucaagaucuggaaaaguauguagaggacacgaaaaucgauuuauggucuuacaacgcugagcugcucguggcccuugaaaaucagcacaccaucgaccugacagauagcgagaugaacaaguuguucgaaaagacuaagaaacagcuacgggagaaugcugaagacaugggcaacggaugcuuuaagauuuaucauaagugugauaaugccugcauagucucaauccgaaacggcaccuacgaccacgauguguaucgcgacgaggcacugaauaacagauuccagauuaaagggguugagcucaagaguggauacaaagacuggauccuguggauuuccuuugccaucagcugcuuccuucuguguguggcuuugcucgguuuuauaaugugggcgugccaaaagggcaauaucagguguaacauuugcaucuga

SEQ ID NO: 140915 - RNA, 1701 nt, Artificial Sequence
  derived and/or modified CDS sequence (opt3) from hemagglutinin__InfluenzaA__AJJ99149
augaagaccaucauugcccugagcuacauacucugccuuguguucgcucagaaauuucccggcaacgacaauuccacagcaacucuguguuuggggcaccaugccgucccuaacggaacgaucguuaagaccauuacaaaugaucaaaucgaggugacuaacgcgaccgaauuaguacagucuucaaguacaggugagauuugcgacagcccacaccagauccuggauggcaaaaauuguacccuaauagacgcucuccugggggauccgcagugcgacggauuccaaaacaagaaaugggaucuuuuuguggaaagauccaaggccuauucuaauuguuaccccuaugacaugccugauuacgcaucgcugaggucauuggucgccagcaguggcacucucgaguucaacaaugaauccuuuaacuggacaggugugacccagaaugggacgucuagcgcuugcauccggcgcuccaacucaaguuucuuuagccgacugaauuggcugacucaucucaacuucaaguaucaggcauuaaauguuaccaugccaaacaacgagcaguuugacaaacuguacauuuggggagugcaccaucccggcacagauaaggaccaaaucuuccuuuaugcccaggcuucuggccguauuacugucuccaccaaaagaucacagcagacagugaucccuaauauagggagcaggccacggguacgcaacauucccaguagaaucucuauuuacuggaccaucguuaagccuggagauaucuugcugauuaauuccacggguaaccuaauagccccaaggggcuacuuuaaaauccaaagcgggaagucgucuauuaugcgguccgacgcgccgaucggaaaguguaauucagagugcauaacucccaacggcaguauuccuaaugacaaaccauuccagaacgugaaucgcaucacauauggugcauguccccgauacgucaagcagaacacccucaaacuggccacugggaugagaaaugugccugaaaagcaaacaaggggaaucuuuggcgcuauugccggcuucaucgagaacgggugggaaggaaugguggaugguugguauggcuuccggcaccagaauagcgaggggcguggacaggcagcugaccuuaaauccacccaggccgcgauugaucaaauaaacggcaagcugaaucgcuugaucgguaaaacgaacgagaaguuucaccagauugaaaaggaguucucugaagucgaggggagaauccaggaccucgaaaaauacguugaggauaccaagaucgaccuguggagcuauaacgccgaguuacugguggcacucgaaaaucagcauacaauugaucuuacugacucagagaugaacaaacuguuugaaaagaccaaaaagcaauugagggagaaugcugaagauaugggcaacggaugcuucaagauauaccacaaaugugacaaugccugcaucggcaguauucggaacgggacauaugaucaugacguauaccgagacgaggcucuaaauaaccgcuuucagaucaagggaguggagcugaaauccgguuacaaggauuggauucucuggaucagcuucgccauaucuugcuuucugcuuugugucgcacuguugggcuucaucaugugggccugccagaaagggaauauuagauguaacaucugcauuuga

SEQ ID NO: 140916 - RNA, 1701 nt, Artificial Sequence
  derived and/or modified CDS sequence (opt3) from hemagglutinin__InfluenzaA__AJJ99161
augaagaccaucauugcccugagcuacauacucugccuuguguucgcucagaaacugcccggcaacgacaauuccacagcaacuuuguguuuagggcaccaugccgucccuaacggaacgaucguuaagaccauuacaaaugaucaaaucgaggugacuaacgcgaccgaacugguacagucuucaaguacaggugagauuugcgacagcccacaccagauccuagauggcgaaaauuguacccucauagacgcucugcuuggggauccgcagugcgacggauuucaaaacaaaaagugggaucuguucguggagagauccaaagccuauucuaauuguuaccccuaugacgucccugauuacgcaucguugaggucacucguggccagcaguggcacucuggaauuuaacaaugaguccuucaacuggacagguguuacccagaaugggacgucuagcgcuugcauccggcgcuccaacaauucauuuuucagucgacugaacuggcucacucauuuaaaguuuaaguauccagcacugaaugugaccaugcccaacaacgagcaguucgacaaacuuuacauuuggggaguccaccauccuggcacagauaaugaccagaucuuuuuguaugcccaagcuagcggccguauuacugugucuaccaagagaucccagcagacaguaaucccaaacauagggucaaggccccggguucgcgauauuccuagcagaaucaguauuuacuggaccaucgugaaaccaggagacauccugcuaauuaauucuacggguaaccucauagccccgaggggcuacuucaagauccgguccgggaaaagcucgauuaugcgcucugacgcgcccaucggaaaguguaauuccgaaugcauaacuccuaacggcucaauuccaaaugauaagcccuuucagaacgucaaucgaaucacauauggugcauguccuagauacgugaaacaaaacacccugaagcuggccacugggaugaggaaugugccagagaaacagacacggggaaucuucggcgcuauugccggcuuuaucgaaaacgggugggagggaauggucgacgguugguauggcuuccgucaccagaauagugaggggcgcggacaagcagcugaucuuaagagcacccaggccgcgauugaccagauaaacggcaaauugaauagacucaucgguaagacgaacgaaaaauuccaccagauugagaaggaauuuuccgagguugaagggaggauccaagaucuggagaaguacguggaggacaccaaaaucgauuuauggucuuauaacgccgaacugcucguagcacuugagaaucagcauacaauugaccugacugauagcgaaaugaacaaguuguucgagaaaaccaagaaacagcuacgggaaaaugcugaggacaugggcaacggaugcuuuaagauauaccacaagugugauaaugccugcaucggcucaauucgaaacgggacauaugaccaugacguguaccgcgaugaggcucugaauaacagauuccagaucaaaggagucgaacucaagagugguuacaaagacuggauucuguggaucuccuuugccauaagcugcuuccuucuguguguggcauugcucggcuuuaucaugugggccugccaaaaggggaauauuagguguaacaucugcauuuga

SEQ ID NO: 140917 - RNA, 1701 nt, Artificial Sequence
  derived and/or modified CDS sequence (opt3) from hemagglutinin__InfluenzaA__AJJ99173
augaagaccaucauugcccugagcuacauacucugccuuguguucgcucagaaacugcccggcaacgacaauuccacagcaacuuuguguuuagggcaccaugccgucccuaacggaacgaucguuaagaccauuacaaaugaucaaaucgaggugacuaacgcgaccgaacugguacagucuucaaguacaggugagauuugcaauagcccacaccagauccuagacggcgaaaacuguacccucauagaugcucugcuuggggacccgcagugcgauggauuucaaaauaaaaagugggaccuguucguggagagauccaaagccuauucuaacuguuaccccuaugaugucccugacuacgcaucguugaggucacucguggccagcaguggcacucuggaauuuaauaacgaguccuucaauuggacagguguuacccagaacgggacgucuagcgcuugcauccggcgcuccaauucaaguuucuuuagccgacugaacuggcucacucauuuaaaguuuaaguauccagcacugaaugugaccaugcccaacaacgagcaguucgauaaacuuuacauuuggggaguccaccauccuggcacagacaaugaucagaucuuuuuguaugcccaggcuucuggccguauuacuguguccaccaagagaucacaacagacaguaaucccaaacauagggagcaggccccggguucgcaauauuccuaguagaaucucuauuuacuggaccaucgugaaaccaggagacauccugcuaauuaacuccacggguaaucucauagccccgaggggcuacuucaagauccggagcgggaaaucgucuauuaugcgcuccgaugcgcccaucggaaaguguaacucagaaugcauaacuccuaauggcaguauuccaaacgacaagcccuuucagaaugucaaccgaaucacauauggugcauguccuagauacgugaaacaaaauacccugaaacuugccacugggaugaggaacgugccagagaagcagacacggggaaucuucggcgcuauugccggcuuuaucgaaaaugggugggagggaauggucgacgguugguauggcuuccgucaccagaacagcgaggggcgcggacaagcagcugaucugaaguccacccaggccgcgauugaccagauaaauggcaaauugaacagacucaucgguaagacgaacgaaaaauuccaccagauugagaaggaauuuucugagguugaagggaggauccaagaucuggagaaguacguggaggacaccaaaaucgauuuauggagcuauaaugccgaacugcucguagcacuugagaaccagcauacaauugaccugacugauucagaaaugaauaaguuguucgagaaaaccaagaaacagcuacgggaaaacgcugaggacaugggcaauggaugcuuucgaauauaccacaagugugauaacgccugcaucggcaguauucgcaaugggacauaugaccaugauguguacagagacgaggcucugaacaauagguuccagaucaagggagucgaacucaaauccgguuacaaggacuggauucuguggaucagcuuugccauaucuugcuuccuucuguguguggcauugcucggcuuuaucaugugggccugccaaaaagggaacauucgguguaauaucugcauuuga

SEQ ID NO: 140918 - RNA, 1701 nt, Artificial Sequence
  derived and/or modified CDS sequence (opt3) from hemagglutinin__InfluenzaA__AJJ99185
augaagaccaucauugcccugagcuacauacucugccuuguguucgcucagaaacugcccggcaacgacaauuccacagcaacuuuguguuuagggcaccaugccgucccuaacggaacgaucguuaagaccauuacaaaugaucaaaucgaggugacuaacgcgaccgaacugguacagucuucaaguacaggugagauuugcgacagcccacaccagauccuagauggcgaaaauuguacccucauagacgcucugcuuggggauccgcagugcgacggauuucaaaacaaaaagugggaucuguucguggagagauccaaagccuauucuaauuguuaccccuaugacgucccugauuacgcaucguugaggucacucguggccagcaguggcacucuggaauuuaacaaugaguccuucaacuggacagguguuacccagaaugggacgucuagcgcuugcauccggaaguccaacaauucauuuuucagucgccugaacuggcucacucauuuaaaguuuaaauauccagcacugaaugugaccaugcccaacaacgagcaguucgacaaacuuuacauuuggggaguccaccauccuggcacagauaaugaccagaucuuuuuguaugcccaagcuagcggccgaauuacugugucuaccaagcguucccagcagacaguaaucccaaacauagggucaagacccaggguucggaauauuccuagccgcaucaguauuuacuggaccaucgugaagccaggagauauccugcuaauuaacucuacggguaaucucauagccccgagaggcuacuucaaaaucagguccggaaagagcucgauuaugcgggcggacgcacccaucgggaaguguaacucugaaugcauaacuccuaauggcuccauuccaaacgacaaacccuuucagaaugucaaccgcaucacauauggugccuguccucgauacgugaagcaaaauacccugaaacuugcuacugggaugagaaacgugccagagaagcagacaaggggaaucuucggcgccauugcaggcuuuaucgaaaaugggugggagggaauggucgaugguugguauggcuuccggcaccagaacucagaggggcguggacaagcugccgaccugaaaaguacccaggcggccauugaucagauaaauggcaaguugaaccgccucaucgguaaaacgaacgaaaaguuccaccagauugagaaggaauuuagcgagguugaagggagaauccaagaccuggagaaauacguggaggauaccaagaucgacuuaugguccuauaaugcagaacugcucguagcucuugagaaccagcauacaauugaucugacugacucugaaaugaauaaauuguucgagaagaccaaaaagcagcuaagggaaaacgccgaggauaugggcaauggaugcuuuaagauauaccacaaaugugacaacgcuugcaucggcagcauucggaaugggacauaugaucaugacguguaccgagacgaggcccugaacaaucgcuuccagaucaagggagucgaacucaaaucagguuacaaggauuggauucuguggaucaguuuugcaauauccugcuuccuucuguguguggccuugcucggcuuuaucaugugggcuugccaaaaagggaacauuagauguaauaucugcauuuga

SEQ ID NO: 140919 - RNA, 1701 nt, Artificial Sequence; identical to SEQ ID NO: 136856
  derived and/or modified CDS sequence (opt3) from hemagglutinin__InfluenzaA__AJJ99197

SEQ ID NO: 140920 - RNA, 1701 nt, Artificial Sequence
  derived and/or modified CDS sequence (opt3) from hemagglutinin__InfluenzaA__AJJ99209
augaagaccaucauugcccugagcuacauacucugccuuguguucgcucagaaacugcccggcaacgacaauuccacagcaacuuuguguuuagggcaccaugccgucccuaacggaacgaucguuaagaccauuacaaaugaucaaaucgaggugacuaacgcgaccgaacugguacagucuucaaguacagguggcauuugcgacagcccacaccagauccuagauggggagaauuguacccucauagacgcucugcuuggagauccgcagugcgacggcuuucaaaacaaaaagugggaucuguucguggaaagauccaaagccuauucuaauuguuaccccuaugacgucccugauuacgcaucguugaggucacucguggccagcagugguacucuggaguuuaacaaugaauccuucaacuggacagggguuacccagaauggaacgucuagcgcuugcaagcggaaguccgacaacucauuuuucagucgccugaauuggcucacucauuuaaaauuuaaguauccagcacugaacgugaccaugcccaauaacgaggaguucgauaaacuuuacaucuggggcguccaccauccuggcacagacaacgaucagauuuuucuuuaugcccaggcuagcgggcgaaucacugugucuaccaagcguucccaacagacaguaauuccaaauaucggaucaagacccaggguucggaacauaccuagccgcauuaguaucuacuggaccauugugaaaccaggugacauccugcuaaucaauucuacgggcaaccucauugccccgagaggguacuucaagauaagguccggaaagagcucgaucaugcggucugacgcgcccauuggcaaauguaauuccgaaugcaucacuccuaacgguucaauaccaaaugauaagcccuuucagaacgucaaucgcauuacauauggggcauguccucgauacgugaaacagaguacccugaaguuggccacuggaaugagaaacgugccagagaaacaaacaaggggcaucuucggcgcuaucgccggguuuauugaaaauggaugggaggguauggucgacggcugguauggguuccggcaccagaacagcgagggaaucggccaggcagcugaucugaaguccacccaagccgcgauuaaucagauaaacgguaaauugaaucgucucaucgggaagacgaacgaaaaguuccaccagauugagaaagaauuuucugagguugaaggccgcauccaggaccuggagaaguacguggaggauaccaaaaucgacuuauggagcuauaacgccgaacugcucguagcacuugagaaucaacauacaauugaucugacugacucagaaaugaacaaguuguucgagagaaccaaaaagcagcuaagggaaaaugcugaggauaugggaaacggcugcuuuaagauauaccacaaaugugacaaugccugcaucgggaguauucggaacggaacauaugaucaugacguguaccgagacgaggcucugaauaaccgcuuccagaucaagggugucgaacucaaauccggcuacaaggauuggauucuguggaucagcuuugccaugucuugcuuccuucuguguguggcauugcucggguuuauaaugugggccugccagaaaggaaauaucagauguaacauuugcaucuga

SEQ ID NO: 140921 - RNA, 1701 nt, Artificial Sequence
  derived and/or modified CDS sequence (opt3) from hemagglutinin__InfluenzaA__AJJ99221
augaagaccaucauugcccugagcuacauacucugccuuguguucgcucagaaacugcccggcaacgacaauuccacagcaacuuuguguuuagggcaccaugccgucccuaacggaacgaucguuaagaccauuacaaaugaucaaaucgaggugacuaacgcgaccgaacugguacagucuucaaguacaggugagauuugcgacagcccacaccagauccuagauggcgaaaauuguacccucauagacgcucugcuuggggauccgcagugcgacggauuucaaaacaaaaagugggaucuguucguggagagauccaaagccuauucuaauuguuaccccuaugacgucccugauuacgcaucguugaggucacucguggccagcaguggcacucuggaauuuaacaaugaguccuucaacuggacagguguuacccagaaugggacgucuagcgcuugcauccggcgcuccaacucaaguuucuuuagccgacugaauuggcucacucauuuaaaguuuaaguauccagcacugaacgugaccaugcccaauaacgagaaauucgacaaacuuuacauuuggggaguccaccauccuggcacagauaacgaccagaucuuuuuguaugcccaggcuucuggccguauuacuguguccaccaagagaucacaacagacaguaaucccaaauauagggagcaggccccggguucgcaacauuccuaguagaaucucuauuuacuggaccaucgugaagccaggagauauccugcuaauuaauuccacggguaaccucauagccccgaggggcuacuucaaaauccagagcgggaagucgucuauuaugcgguccgacgcgcccaucggaaaguguaauucagaaugcauaacuccuaacggcaguauuccaaaugacaaacccuuucagaacgucaaucgcaucacauauggugcauguccucgauacgugaagcaaaacacccugaaacuugccacugggaugagaaaugugccagagaagcagacaaggggaaucuucggcgcuauugccggcuuuaucgaaaacgggugggagggaauggucgaugguugguauggcuuccggcaccagaauagcgaggggauuggacaagcagcugaccugaaauccacccaggccgcgauagaucagaucaacggcaaguugaaucgucucauugguaaaacgaacgaaaaguuccaccagaucgagaaggaauuuucugagguugaagggcgcauccaagaccuggagaaauacguggaggauaccaagauugacuuauggagcuauaacgccgaacugcucguagcacuugagaaucagcauacaauagaucugacugacucagaaaugaacaaauuguucgagaagaccaaaaagcagcuaagagaaaaugcugaggauaugggcaacggaugcuuuaagaucuaccacaaaugugacaaugccugcauuggcaguaucaggaacgggacauaugaucaugacguguaccgggacgaggcucugaauaaccgauuccagauuaagggagucgaacucaaauccgguuacaaggauuggauccuguggaucagcuuugccauaucuugcuuccuucuguguguggcauugcucggcuuuauuaugugggccugccaaaaagggaauauccgcuguaacauuugcaucuga

SEQ ID NO: 140922 - RNA, 1701 nt, Artificial Sequence; identical to SEQ ID NO: 129963
  derived and/or modified CDS sequence (opt3) from hemagglutinin__InfluenzaA__AJJ99233

SEQ ID NO: 140923 - RNA, 1701 nt, Artificial Sequence
  derived and/or modified CDS sequence (opt3) from hemagglutinin__InfluenzaA__AJJ99244
augaaggccauccugguggucaugcucuacaccuucgcuacagcaaacgccgacacucuuugcauuggcuaucacgcgaauaacagcacggauaccguugacacagugcuggagaaaaauguaacugugacccauuccgucaacuuguuagaagauaagcacaaugggaaacuguguaagcuaagaggaguggcuccccuccaucuggguaaaugcaacauagccggcuggauccuugggaauccugagugugaaucucugucaacagcaaguagcugguccuacauuguugagaccucuggaucggacaacggcacuugcuauccaggugauuuuaucgacuacgaagaguugagggagcagcucucaagcgugaguuccuucgaacgguuugagauuuucccgaagacaucuagcuggcccaaucacgauuccaacaagggggucaccgccgcuuguccucaugcaggagccaaaggcuuuuauaagaaucugaucuggcuggugaaaaagggcaacucauacccaaaacucaguaagagcuauauaaaugacaaggggaaagaaguauuaguucuguggggaauccaccaccccucuacgacugcugaucaacagucccuuuaccagaacgccgacaccuacguguucgucgguacaucacgcuauagcaagaaauuuaagccugagauugcgauccgaccaaaagugcgugaucaggagggcagaaugaauuacuauuggacuuugguggaacccggggacaagauuaccuucgaggcaacaggaaaccuggucguuccuagguacgccuuugcuauggaacggaacgccggcagugguaucauaauuucugauaccccagugcaugacugcaauacgacuugucaaacaccgaaaggggcaaucaacaccucccuacccuuccagaauauucacccuaucacuaucggaaagugcccaaaguauguaaaaagcacaaagcuccgccuggcuaccggccuuagaaacgugcccucgauucagucuaggggccuguuuggggccauagcgggauucaucgaggguggcuggacggggauggucgacggaugguacggcuaucaucaccagaaugaacaagguuccggguacgccgcagauuugaaaucaacccagaacgcuauugacaagaucacaaauaaagugaacaguguuauagagaagaugaauacucaguuuaccgccgugggcaaggaguucaaccaccucgaaaaacggauugagaaucugaacaagaaagucgaugacggauucuuagauaucuggacauacaaugcugaacugcucgugcuucuggagaacgaacgcacuuuggacuaucaugauagcaauguaaagaaccuauacgagaaaguucgaaaccagcugaagaauaacgccaaggagaucggcaauggguguuuugaguucuaucacaaaugcgacaacaccuguauggaauccgugaagaauggaacauacgauuauccuaaauacucugaagaggcaaagcucaacagagaagagauugacggugucaaacuggagagcaccaggaucuaucaaauucuugccauauacucaacuguggcuaguucccuggucuuggugguuagccucggcgcgaucucuuuuuggaugugcucaaaugggagucugcagugccggauuuguaucuga

SEQ ID NO: 140924 - RNA, 1701 nt, Artificial Sequence
  derived and/or modified CDS sequence (opt3) from hemagglutinin__InfluenzaA__AJJ99255
augaaggccauccuggugguccuccuuuacaccuucgcuacagcaaacgccgacacucugugcauuggcuaucacgcgaauaacagcacggauaccguugacacaguguuggagaaaaauguaacugugacccauuccgucaacuuacuggaagauaaucacaacgggaagcuauguaaacucagaggaguggcuccccugcaucuugguaagugcaauauagccggcuggauccuggggaacccugagugugaaucuuugucaacagcaaguagcugguccuacauuguugagaccucuucgucagacaauggaacuugcuauccaggcgauuuuaucaacuacgaagaacucagggagcagcugagcaguguguccucuuucgaacgguuugagauuuucccgaaaacaagcuccuggcccaaucacgacucaaacaagggugucaccgccgcuuguccucgcgcaggggccaagaguuuuuauaaaaaucugaucuggcucgugaagaaaggaaacagcuacccaaaguuaucuaaauccuauauaaaugauaagggcaaggaaguacugguuauguggggcauccaucaccccucaacgacugcugaccaacagagccuuuaccagaacgccgaugcguacguguucgucgggaccagucgauauucuaaagaguuuaagccugagauugcaauccguccaaaagugagagaccaggaaggaaggaugaacuacuauuggacauugguggagcccggugauaagauuacuuucgaagccaccggcaaucugcuagucccucgguacgcuuuugccauggagcgcaacgcaggguccggaaucauaauuagcgacacaccaguucacgauugcaauaccacgugucaaacuccgaaaggcgcuaucaacacaucgcuccccuuccagaauauucauccuaucaccaucgguaagugcccaaaauaugugaagucuacuaagcugagacuugccacagggcugaggaacguacccuccauucagucacggggauuguuuggcgcgauagccggcuucaucgaagggggauggaccgguaugguggacggcugguacggguaucaccaucagaaugagcaaggaaguggcuacgcagcugaccucaaaagcacgcagaacgccauugauaagaucaccaauaaagucaacuccgugauagagaagaugaauacacaguuuacugcuguugguaaagaguucaaccaccuggagaagcgcauugaaaauuuaaacaagaaaguggacgauggguuccuggacaucuggaccuacaaugccgagcuccuuguccuguuggaaaacgagcgaacacuagauuaucacgacucuaacgugaagaaucuguacgagaaaguaagaaaccagcucaagaauaacgcaaaagaaaucggcaauggauguuuugaguucuaucauaagugcgauaacacuuguauggaaagcguuaagaauggcaccuacgacuauccuaaauacucagaggaagccaagcugaacagggaggagauugauggggugaaacuugaaaguacacggaucuaucaaauucuggcuauauacuccaccgucgcgagcucuuuggugcucgucgugucacugggagcaaucaguuuuuggaugugcagcaaugguuccuuacagugccguauuuguaucuga

SEQ ID NO: 140925 - RNA, 1698 nt, Artificial Sequence
  derived and/or modified CDS sequence (opt3) from hemagglutinin__InfluenzaA__AJJ99267
augaaggugaaacugcucguccuucugugcaccuucacagccacuuacgcugacacgaucuguauuggcuaucacgcaaacaauagcaccgauacaguugacacuguguuggagaagaacguaaccgugacacauuccgucaauuuacuggaaaacucucacaaugggaaacuaugccuccugaagggaauagcgccccuucagcuggguaacuguucaguggccggcuggaucuuggggaauccugagugcgaacuccugauuaguaaagagagcugguccuacaucguugaaaagccaaacccggagaauggaaccuguuaucccggccauuuugcugauuacgaggaacugagagagcaacucucuucggugagcucauucgaaagguuugagauuuucccuaaggagaguuccuggccaaaccacacuaucacaggugucucugccagcugcucccauaauggggaaucaaguuuuuaucggaacuuacuguggcuuaccggcaaaaauggauuguaccccaaccugagcaagucuuaugcaaauaacaaagagaaggaagugcuaguacucuggggcguucaccacccuccaaacauaggggaccagaaagcccuguaccauacggagaaugcuuacguguccgucgugucaagccacuauagucgcaaguucacucccgaaaucgcaaagcgaccuaaagugcgugaucaggagggaagaauuaacuacuauuggacccuucuggagccaggugacacaaucauuuuugaagccaauggcaacuugaucgcuccgagguacgccuucgcgcucucucggggguuuggauccggcauaauuaauagcaacgcacccauggauaagugugacgccaaaugccagacuccucaaggugcuaucaauucgucucugccauuccagaacguccaucccguuaccauuggggaguguccuaaguaugugcgcuccgccaaauuaagaaugguaacaggacugaggaauaucccaucaauccagagucggggccucuuuggcgcaauugcuggguucauagaaggagguuggaccggcaugguggaugggugguacggauaucaccaccagaacgagcaaggcagcgguuacgccgcggaccagaaguccacgcagaaugccaucaacgggauuacuaauaaagucaacucugugaucgaaaagaugaauacacaguuuaccgcaguuggcaaggaguucaacaaacuugagcgccgaauggaaaaccugaauaagaaaguggaugacggauucauagauauuuggacuuacaacgcugaguugcuaguccugcucgaaaaugagagaacacuggacuuucaugacagcaacgugaagaaucuuuaugaaaaaguaaagucacaacugaagaacaaugccaaagagaucggcaacgggugcuucgaguuuuaccacaaguguaaugaugaaugcauggagaguguuaaaaacggaaccuaugacuaccccaaguauuccgaagagagcaaauugaauagggagaagaucgauggugugaagcucgaaucuaugggcgucuaccagauucuggcuaucuauucaacgguggccaguagcuuaguccugcuagugucccucggggcaguuucuuucuggaugugcucgaacggaagccugcagugucgggugugcauuuga

SEQ ID NO: 140926 - RNA, 1701 nt, Artificial Sequence; identical to SEQ ID NO: 135098
  derived and/or modified CDS sequence (opt3) from hemagglutinin__InfluenzaA__AJJ99278

SEQ ID NO: 140927 - RNA, 1701 nt, Artificial Sequence; identical to SEQ ID NO: 135101
  derived and/or modified CDS sequence (opt3) from hemagglutinin__InfluenzaA__AJJ99289

SEQ ID NO: 140928 - RNA, 1698 nt, Artificial Sequence
  derived and/or modified CDS sequence (opt3) from hemagglutinin__InfluenzaA__AJJ99301
augaaggugaaacugcucguccuucugugcaccuucacagccacuuacgcugacacgaucuguauuggcuaucacgcaaacaauagcaccgauacaguugacacuguguuggagaagaacguaaccgugacacauuccgucaauuuacuggaaaacucucacaaugggaaacuaugccuccugaagggaauagcgccccuucagcuggguaacuguucaguggccggcuggaucuuggggaauccugagugcgaaagucucauuagcaaagaguccuggucuuacaucguugaaaagccaaacccggagaauggaaccuguuaucccggccauuuugcugauuacgaggaacugagagagcaacugucgucagugagcaguuucgaaagguuugagauuuucccuaaggaguccucuuggccaaaccacacugucacaggugugagcgccuccugcucacauaauggggaaaguagcuuuuaucggaaccucuuauggcugaccggcaaaaauggacuuuaccccaacuugucuaaguccuaugcaaauaacaaagagaaggaaguacugguucuauggggcgugcaccacccuccaaacaucggggaccagaaagcccucuaccauacggagaaugcuuacgucucaguggugagcagucacuauucucgcaaguucacucccgaaauagcaaagcgaccuaaaguccgugaucaggagggaagaaucaacuacuauuggacccugcuugagccaggugacacaauuaucuuugaagccaauggcaaccugauugcuccgagguacgccuucgcguugucccggggguuuggaagcggcaucauaaauucgaacgcacccauggauaagugugacgccaaaugccagacuccucaaggugcuauuaauucuucccucccauuccagaacguucaucccgugaccaucggggaguguccuaaguauguacgcucagccaaacugagaauggugacaggauuaaggaauauuccaaguauccagagccggggccuguuuggcgcaaucgcuggguucauugaaggagguuggaccggcauggucgaugggugguacggauaucaccaccagaacgagcaaggcuccgguuacgccgcggaccagaagucuacgcagaaugccauaaacgggaucacuaauaaagugaacagcguuauugaaaagaugaauacacaguuuaccgcagugggcaaggaguucaacaaacucgagcgccgaauggaaaaccuuaauaagaaagucgaugacggauucaucgauauauggacuuacaacgcugagcuguuggugcuacuggaaaaugagagaacacucgacuuucaugacucaaacguaaagaaucuguaugaaaaaguuaagagucaacuuaagaacaaugccaaagagauuggcaacgggugcuucgaguuuuaccacaaguguaaugaugaaugcauggaguccgugaaaaacggaaccuaugacuaccccaaguauagcgaagagucuaaacugaauagggagaagaucgauggugucaaguuggaaucaaugggcguguaccagauccucgcuauuuauaguacggucgccagcucccugguguuacugguuucucuaggggcaaucucguucuggaugugcagcaacggaucccuccagugucggauuugcauauga

SEQ ID NO: 140929 - RNA, 1698 nt, Artificial Sequence
  derived and/or modified CDS sequence (opt3) from hemagglutinin__InfluenzaA__AJJ99324
augaaggugaaacugcucguccuucugugcaccuucacagccacuuacgcugacacgaucuguauuggcuaucacgcaaacaauagcaccgauacaguugacacuguguuggagaagaacguaaccgugacacauuccgucaauuuacuggaaaacucucacaaugggaaacuaugccuccugaagggaauagcgccccuucagcuggguaacuguucaguggccggcuggaucuuggggaauccugagugcgaacuccugauuaguaaagagagcugguccuacaucguugaaaagccaaacccggagaauggaaccuguuaucccggccauuuugcugauuacgaggaacugagagagcaacucucuucggugagcucauucgaaagguuugagauuuucccuaaggagaguuccuggccaaaccacacugucacaggugugucugccagcugcucccauaauggggaaaacucauuuuaucggaauuuacuguggcuuaccggaaaaaguggcuuguaccccaaccugagcaagucuuaugcaaauaacaaagagaaggaaguucuaguacucuggggcgugcaccacccuccaaacaucgccgaccagaaaacgcuguaccauacugagaaugcuuacgucuccguggugucaagccacuauagucgcaaguucacccccgaaauagcaaagcgaccuaaaguccgugaucaggaggggagaaucaacuacuauuggacacuucuggagccaggagacacuauuaucuuugaagccaaugguaacuugauugcuccgagguacgccuucgcgcucucucggggcuuuggguccggaaucauaaauagcaacgcacccauggauaagugugacgccaaaugccagaccccucaaggcgcuauuaauucgucucugccauuccagaacguucaucccgugacaaucggugaguguccuaaguauguacgcuccgccaaauuaagaauggugaccgggcugaggaauauuccaucaauccagagucggggacucuuuggcgcaaucgcuggcuucauugaagggggauggacggguauggucgauggcugguacggguaucaccaccagaacgagcaaggaagcggcuacgccgcggaccagaaguccacucagaaugccauaaacgguaucacaaauaaagugaacucuguuauugaaaagaugaauacccaguuuacugcaguggggaaggaguucaacaaacuugagcgccgaauggaaaaccugaauaagaaagucgaugacggcuucaucgauauauggacauacaacgcugaguugcuagugcugcucgaaaaugagagaacccuggacuuucaugacagcaacguaaagaaucuuuaugaaaaaguuaagucacaacugaagaacaaugccaaagagauuggaaacggcugcuucgaguuuuaccacaaguguaaugaugaaugcauggagagugugaaaaacgggacguaugacuaccccaaguauuccgaagagagcaaauugaauagggagaagaucgauggagucaagcucgaaucuauggguguguaccagauccuggcuauuuauucaaccgucgccaguagcuuagugcugcuaguuucccucggcgcaaucucuuucuggaugugcucgaacgggagccugcagugucggauuugcauauga

SEQ ID NO: 140930 - RNA, 1701 nt, Artificial Sequence
  derived and/or modified CDS sequence (opt3) from hemagglutinin__InfluenzaA__AJJ99335
auggaggccauccuggugguccuccuuuacaccuucgcuacagcaaacgccgacacucugugcauuggcuaucacgcgaauaacagcacggauaccguugacacaguguuggaaaagaauguaacugugacccauuccgucaacuuacuggaggauaaacacaaugggaagcuauguaaacucagaggaguggcuccccugcaucuugguaagugcaacauagccggcuggauccuggggaauccugaaugugagucuuugucaacagcaaguagcugguccuacauuguugaaaccucuucgucaaacaauggaacuugcuauccaggcgacuuuaucgauuacgaggagcucagggaacagcugagcaguguguccucuuucgagcgguuugaaauuuucccgaaaacaagcuccuggcccaaccacgacucaaauaagggugucaccgccgcuuguccucaugcaggggccaagaguuuuuauaaaaaccugaucuggcucgugaagaaaggaaauagcuacccaaaguuaucuaaauccuauauaaacgauaagggcaaggagguacugguucuuuggggcauccaccaccccucaacgagcgcugaccaacagaguuuguaccagaaugccgaugcguacguguucgucgggucuucccgcuauagcaaaaaguuuaaaccugagauugcaauccgaccaaaggugcgugaccaggaaggaagaaugaacuacuauuggacucugguggagcccggugauaaaauuaccuucgaagccacaggcaaccuagucguuccuagguacgcuuuugccauggagcggaaugcagggucgggaaucauaauuucugacacuccagugcaugauugcaacaccacaugucaaaccccgaauggcgcuaucaacacgucccuccccuuccacaauauucauccuaucacuaucgguaagugcccaaaauauguaaagucaacaaagcugcgccuugccaccgggcugagaaacgugcccaguauucagagcaggggauuguuuggcgcgauagccggcuucaucgaagggggauggacugguauggucgacggcugguacggguaucaccaccagaaugagcagggauccggcuacgcagcugaccucaaaucuacacaaaacgccauugaugagaucaccaauaaggugaacagcguuauagaaaagaugaauacgcaguuuaccgcuguggguaaggaguucaaccaucuggaaaaacggauugagaauuuaaacaagaaggucgacgauggguuccuggacaucuggacauacaaugccgaacuccuugugcuguuggagaacgagcgcacucuagauuaucacgacucaaacguuaaaaaucuguacgaaaagguacgaagucagcucaaaaacaaugcaaaggagaucggcaacggauguuuugaguucuaucauaaaugcgauaauaccuguauggaauccgugaagaacggcacauacgacuauccuaaguacagcgaagaggccaaacugaauagagaggaaauugauggggucaaacuugagucuacuaggaucuaucagauucuggcuauauacucaaccguggcgaguagcuugguccucgugguuucccugggagcaaucucuuuuuggaugugcucgaacgguagcuuacaaugccggauuuguaucuga

SEQ ID NO: 140931 - RNA, 1701 nt, Artificial Sequence; identical to SEQ ID NO: 132833
  derived and/or modified CDS sequence (opt3) from hemagglutinin__InfluenzaA__AJJ99357

SEQ ID NO: 140932 - RNA, 1701 nt, Artificial Sequence; identical to SEQ ID NO: 134872
  derived and/or modified CDS sequence (opt3) from hemagglutinin__InfluenzaA__AJJ99368

SEQ ID NO: 140933 - RNA, 1701 nt, Artificial Sequence; identical to SEQ ID NO: 134483
  derived and/or modified CDS sequence (opt3) from hemagglutinin__InfluenzaA__AJJ99379

SEQ ID NO: 140934 - RNA, 1701 nt, Artificial Sequence
  derived and/or modified CDS sequence (opt3) from hemagglutinin__InfluenzaA__AJJ99390
auggaggccauccuggugguccuccuuuacaccuucgcuacagcaaacgccgacacucugugcauuggcuaucacgcgaauaacagcacggauaccguugacacaguguuggaaaagaauguaacugugacccauuccgucaacuuacuggaggauaaacacaaugggaagcuauguaaacucagaggaguggcuccccugcaucuugguaagugcaacauagccggcuggauccuggggaauccugaaugugagucuuugucaacagcaaguagcugguccuacauuguugaaaccucuucgucagacaacggaacuugcuauccaggcgauuuuaucgacuacgaggagcucagggaacagcugagcaguguguccucuuucgagcgguuugaaauuuucccgaaaacaagcuccuggcccaaucacgauucaaacaagggugucaccgccgcuuguccucaugcaggggccaagaguuuuuauaaaaaucugaucuggcucgugaagaaaggaaacagcuacccaaaguuaucuaaauccuauauaaaugacaagggcaaggagguacugguucuuuggggcauccaccaccccucaacgagcgcugaucaacagaguuuguaccagaacgccgacgcguacguguucgucgggucuucccgcuauagcaaaaaguuuaaaccugagauugcaauccgaccaaaggugcgugaucaggaaggaagaaugaauuacuauuggacucugguggagcccggugacaaaauuaccuucgaagccacaggcaaccuagucguuccuagguacgcuuuugccauggagcggaacgcagggucgggaaucauaauuucugauacuccagugcaugacugcaauaccacaugucaaaccccgaagggcgcuaucaacacgucccuccccuuccacaauauucauccuaucacuaucgguaaaugcccaaaguauguaaagucaacaaaacugcgccuugccaccgggcugagaaacgugcccaguauucagagcaggggauuguuuggcgcgauagccggcuucaucgaagggggauggacugguauggucgacggcugguacggguaucaccaccagaaugagcagggauccggcuacgcagcugaucucaagucuacacaaaacgccauugacaaaaucaccaauaaggugaacagcguuauagagaaaaugaauacgcaguuuaccgcuguggguaaggaguucaaccaucuggaaaagcggauugaaaauuuaaacaaaaaggucgaugacggguuccuggauaucuggacauacaaugccgagcuccuugugcuguuggaaaacgagcgcacucuagacuaucacgauucaaauguaaagaaccuguacgagaagguucgaagucagcucaaaaacaaugcaaaggaaaucggcaacggauguuuugaguucuaucauaagugcgacaauaccuguauggaauccgugaaaaacggcacauacgauuauccuaaguacagcgaggaagccaaacugaauagagaggagauugacggggucaaacuugaaucuacuaggaucuaucagauucuggcuauauacucaaccguggcgaguagcuugguccucgugguuucccugggagcaaucucuuuuuggaugugcucgaacgguagcuuacaaugccggauuuguaucuga

SEQ ID NO: 140935 - RNA, 1701 nt, Artificial Sequence; identical to SEQ ID NO: 132833
  derived and/or modified CDS sequence (opt3) from hemagglutinin__InfluenzaA__AJJ99401

SEQ ID NO: 140936 - RNA, 1698 nt, Artificial Sequence
  derived and/or modified CDS sequence (opt3) from hemagglutinin__InfluenzaA__AJJ99413
augaaggugaaacugcucguccuucugugcaccuucacagccacuuacgcugacacgaucuguauuggcuaucacgcaaacaauagcaccgauacaguugacacuguguuggagaagaacguaaccgugacacauuccgucaauuuacuggaaaacucucacaaugggaaacuaugccuccugaagggaauagcgccccuucagcuggguaacuguucaguggccggcuggaucuuggggaauccugagugcgaacuccugauuaguaaagagagcugguccuacaucguugaaaagccaaacccggagaauggaaccuguuaucccggccauuuugcugauuacgaggaacugagagagcaacucucuucggugagcucauucgaaagguuugagauuuucccuaaggagaguuccuggccaaaccacacugucacaggugugucugccagcugcucccauaauggggaaaacucauuuuaucggaauuuacuguggcuuaccggcaaaaacggauuguaccccaaucugaguaagagcuaugcaaacaacaaagagaaggaagugcuaguucucuggggcgugcaccacccuccaaauaucgccgaccagaaaacgcuguaccauacugagaacgcuuacgucucugugguguccucacacuauagccgcaaguucacccccgaaauagcaaagcgaccuaaaguccgugaucaggaggggagaaucaauuacuauuggacacuucuggagccaggagacacuauuaucuuugaagccaacgguaauuugauugcuccgagguacgccuucgcgcucagucggggcuuugggucuggaaucauaaacuccaaugcaagcauggauaagugugacgccaaaugccagacaccccaaggcgcuauuaacucgucucugccuuuccagaauguucauccagugaccaucggugagugucccaaguauguacgcuccgccaaauuaagaauggugaccgggcugaggaacauuccuucaauccagagucggggacucuuuggcgcaaucgcuggcuucauugaagggggauggacggguauggucgauggcugguacggguaucaccaccagaaugagcaaggaagcggcuacgccgcggaccagaaguccacucagaacgccauaaaugguaucacaaacaaaguaaauucuguuauugaaaagaugaacacccaguuuacugcaguggggaaggaguucaacaaacuugagcgccgaauggaaaaucugaacaagaaagucgaugacggcuucaucgauauauggacauacaaugcugaguugcuagugcugcucgaaaacgagagaacccuggacuuucaugacagcaauguaaagaaccuuuaugaaaaaguuaagucacaacugaagaauaacgccaaagagauuggaaauggcugcuucgaguuuuaccacaaguguaacgaugaaugcauggagagugugaaaaaugggacguaugacuacccaaaguauuccgaagagagcaaauugaacagggagaagaucgauggagucaagcucgaaucuauggguguguaccagauccuggcuauuuauucaaccgucgccaguagcuuagugcugcuaguuucccucggcgcaaucucuuucuggaugugcucgaaugggagccugcagugucggauuugcauauga

SEQ ID NO: 140937 - RNA, 1698 nt, Artificial Sequence; identical to SEQ ID NO: 131674
  derived and/or modified CDS sequence (opt3) from hemagglutinin__InfluenzaA__AJJ99425

SEQ ID NO: 140938 - RNA, 1698 nt, Artificial Sequence
  derived and/or modified CDS sequence (opt3) from hemagglutinin__InfluenzaA__AJJ99437
augaaggugaaacugcucguccuucugugcaccuucacagccacuuacgcugacacgaucuguauuggcuaucacgcaaacaauagcaccgauacaguugacacuguguuggagaagaacguaaccgugacacauuccgucaauuuacuggaaaacucucacaaugggaaacuaugccuccugaagggaauagcgccccuucagcuggguaacuguucaguggccggcuggaucuuggggaauccugagugcgaacuccugauuaguaaagagagcugguccuacaucguugaaaagccaaacccggagaauggaaccuguuaucccggccauuuugcugauuacgaggaacugagagagcaacucucuucggugagcucauucgaaagguuugagauuuucccuaaggagaguuccuggccaaaccacacugucacaggugugucugccagcugcucccauaauggggaaaacucauuuuaucggaauuuacuguggcuuaccggcaaaaacggauuguaccccagucugagcaagucuuaugcaaauaacaaagagaaggaaguucuaguacucuggggcgugcaccacccuccaaacaucgccgaccagaaaacgcuguaccauacugagaaugcuuacgucuccguggugucaagccacuauagucgcaaguucacccccgaaauagcaaagcgaccuaaaguccgugaucaggaggggagaaucaacuacuauuggacacuucuggagccaggagacacuauuaucuuugaagccaaugguaacuugauugcuccgagguacgccuucgcgcucucucggggcuuuggguccggaaucauaaauagcaacgcacccauggauaagugugacgccaaaugccagaccccucaaggcgcuauuaauucgucucugccauuccagaacguucaucccgugacaaucggugaguguccuaaguauguacgcuccgccaaauuaagaauggugaccgggcugaggaauauuccaucaauccagagucggggacucuuuggcgcaaucgcuggcuucauugaagggggauggacggguauggucgauggcugguacggguaucaccaccagaacgagcaaggaagcggcuacgccgcggaccagaaguccacucagaaugccauaaacgguaucacaaauaaagugaacucuguuauugaaaagaugaauacccaguuuacugcaguggggaaggaguucaacaaacuugagcgccgaauggaaaaccugaauaagaaagucgaugacggcuucaucgauauauggacauacaacgcugaguugcuagugcugcucgaaaaugagagaacccuggacuuucaugacagcaacguaaagaaucuuuaugaaaaaguuaagucacaacugaagaacaaugccaaagagauuggaaacggcugcuucgaguuuuaccacaaguguaaugaugaaugcauggagagugugaaaaacgggacguaugacuaccccaaguauuccgaagagagcaaauugaauagggagaagaucgauggagucaagcucgaaucuauggguguguaccagauccuggcuauuuauucaaccgucgccaguagcuuagugcugcuaguuucccucggcgcaaucucuuucuggaugugcucgaacgggagccugcagugucggauuugcauauga

SEQ ID NO: 140939 - RNA, 1698 nt, Artificial Sequence
  derived and/or modified CDS sequence (opt3) from hemagglutinin__InfluenzaA__AJJ99449
augaaggugaaacugcucguccuucugugcaccuucacagccacuuacgcugacacgaucuguauuggcuaucacgcaaacaauagcaccgauacaguugacacuguguuggagaagaacguaaccgugacacauuccgucaauuuacuggaaaacucucacaaugggaaacuaugccuccugaagggaauagcgccccuucagcuggguaacuguucaguggccggcuggaucuuggggaauccugagugcgaacuccugauuaguaaagagagcugguccuacaucguugaaaagccaaacccggagaauggaaccuguuaucccggccauuuugcugauuacgaggaacugagagagcaacucucuucggugagcucauucgaaagguuugagauuuucccuaaggagaguuccuggccaaaccacacugucacaggugugucugccagcugcucccauaauggggaaucaaguuuuuaucggaacuuacuguggcuuaccggcaaaaauggauuguaccccaaccugagcaagucuuaugcaaauaacaaagagaaggaaguucuaguacucuggggcgugcaccacccuccaaacaucggggaccagaaagcccuguaccauacggagaaugcuuacgucuccguggugucaagccacuauagucgcaaguucacucccgaaauagcaaagcgaccuaaaguccgugaucaggagggaagaaucaacuacuauuggacccuucuggagccaggugacacaauuaucuuugaagccaauggcaacuugauugcuccgagguacgccuucgcgcucucucggggguuuggauccggcaucauaaauagcaacgcacccauggguaagugugaugccaaaugccagacuccucaaggggcuauuaauucgucucugccauuccagaacguucaucccgugaccaucggagaguguccuaaguauguacgcuccgccaaauuaagaauggugacaggccugaggaauauuccaucaauccagagucggggccucuuuggggcaaucgcuggauucauugaagguggcuggaccgggauggucgacggaugguacggcuaucaccaccagaacgagcaagguagcggguacgccgcggaucagaaguccacgcagaaugccauaaacggcaucacuaauaaagugaacucuguuauugaaaagaugaauacacaguuuaccgcagugggaaaggaguucaacaaacuugagcgccgaauggaaaaccugaauaagaaagucgacgauggcuucaucgacauauggacuuacaacgcugaguugcuagugcugcucgaaaaugagagaacacuggauuuucaugacagcaacguaaagaaucuuuaugaaaaaguuaagucacaacugaagaacaaugccaaagagauugggaacggaugcuucgaguuuuaccacaaguguaaugacgaaugcauggagagugugaaaaacgguaccuaugauuaccccaaguauuccaaagaaagcaaguugaauagggagaagaucgacggcgucaaacucgagucuauggggguguaccagauccuggcuauuuauucaacggucgccaguagcuuagugcugcuaguuucccucggagcaaucucuuucuggaugugcucgaacggcagccugcagugucggauuugcauauga

SEQ ID NO: 140940 - RNA, 1698 nt, Artificial Sequence; identical to SEQ ID NO: 130536
  derived and/or modified CDS sequence (opt3) from hemagglutinin__InfluenzaA__AJJ99461

SEQ ID NO: 140941 - RNA, 1701 nt, Artificial Sequence
  derived and/or modified CDS sequence (opt3) from hemagglutinin__InfluenzaA__AJJ99483
augaaggccauccugcucgugcuucuguacaccuucgcuacagcaaacgccgacacuuugugcauuggcuaucacgcgaauaacagcacggauaccgucgacacaguuuuagagaaaaaugugacuguaacccauuccgugaaccugcuagaagauaagcacaaugggaaacucuguaagcugagaggagucgcuccccuucaucuggguaaaugcaacauagccggcuggaucuuggggaauccugagugugaaucucucucaacagcaaguagcugguccuacauuguggagaccucuucgucagacaacggaacuugcuauccaggcgauuuuaucaauuacgaggagcugagggagcagcugagcaguguuuccucuuucgaacgguuugagauuuucccgaagacaagcuccuggcccaaccacgacucaaauaagggugugaccgccgcuuguccucgcgcaggggccaaaaguuuuuauaagaaccucaucugguuagucaaaaagggaaauagcuacccaaaacugucuaaguccuauauaaacgauaagggcaaagaagugcuuguauuguggggcauccaucaccccucaacgacugcugaccaacagagccuguaccagaaugccgaugcguacguuuucguggggaccagucgauauucuaagaaauuuaagccugagauugcaauccguccaaaagucagagaccaggagggaaggaugaacuacuauuggacucuaguggaacccggugauaagauuacauucgaggccaccggcaaccuccuggugccucgguacgcuuuugccauggaacgcaaugcaggguccggaaucauaauuagcgacacaccaguccacgauugcaacaccacgugucaaacuccgaaaggcgcuaucaauacaucgcuucccuuccagaacauucauccuaucaccaucgguaagugcccaaaguauguuaaaucuacuaagcugagauuggccacagggcucaggaaugugcccuccauucagucacggggacuguuuggcgcgauagccggcuucaucgaagggggauggaccgguaugguagacggcugguacggguaucaccaucagaacgaacaaggaaguggcuacgcagcugacuuaaaaagcacgcagaaugccauugauaagaucaccaacaaagucaauuccgugauagagaagaugaacacacaguuuacugcuguggguaaggaguucaaucaccuggaaaaacgcauugagaaccucaauaagaaaguugacgauggguuccuugacaucuggaccuacaacgccgaacuguuggugcuacuggagaaugaacgaacacucgauuaucacgacucuaacgucaagaaccuguacgagaaagugagaaaucagcuuaagaacaaugcaaaggagaucggcaacggauguuuugaguucuaucauaaaugcgauaauacuuguauggaaagcguaaagaacggcaccuacgacuauccuaaauacucagaagaggccaagcugaauagggaagagauugaugggguuaaauuggagaguacacggaucuaucaaauucucgcuauauacuccaccguggcgagcucucuggucuuaguggucucacugggagcaaucaguuuuuggaugugcagcaacgguucccuacagugccguauuuguaucuga

SEQ ID NO: 140942 - RNA, 1701 nt, Artificial Sequence; identical to SEQ ID NO: 135101
  derived and/or modified CDS sequence (opt3) from hemagglutinin__InfluenzaA__AJJ99494

SEQ ID NO: 140943 - RNA, 1701 nt, Artificial Sequence
  derived and/or modified CDS sequence (opt3) from hemagglutinin__InfluenzaA__AJJ99505
augaaggccauccuggugguccuccuuuacaccuucgcuacagcaaacgccgacacucugugcauuggcuaucacgcgaauaacagcacggauaccguugacacaguguuggagaaaaauguaacugugacccauuccgucaacuuacuggaagauaagcacaaugggaaacuauguaagcucagaggaguggcuccccugcaucuugguaaaugcaacauagccggcuggauccuggggaauccugagugugaaucuuugucaacagcaaguagcugguccuacauuguugagaccucuucgucagacaacggaacuugcuauccaggcgauuuuaucaauuacgaggagcucagggagcagcugagcaguguguccucuuucgaacgguuugagauuuucccgaagacaagcuccuggcccaaccacgacucaaauaagggugucaccgccgcuuguccucaugcaggggccaaaaguuuuuauaagaaccugaucuggcucgugaaaaagggaaauagcuacccaaaauuaucuaaguccuauauaaacgauaagggcaaagaaguacugguucuuuggggcauccaccaccccucaacgagcgcugaccaacagaguuuguaccagaaugccgaugcguacguguucgucgggacuucuaaguauuccaaaaaguuuaaaccugagauugcagugcgcccaaaggugcgagaccaggagggacguaugaacuacuauuggacccuggucgaacccggugauaaaaucacauucgaggccacuggcaaccuacucguuccuagauacgcuuuugccauggaaaggaaugcagggagcggaauuaucauaucggacaccccagugcaugauugcaacacaaccugucaaacgccgaagggcgcuauuaauacuucucugcccuuccagaacauccacccuauuacaaucgguaagugcccaaaauauguaaaguccaccaaacuucggcuggccacuggguugcgcaaugugcccucaauccagaguagaggacucuuuggcgcgauugccggcuucauagaagggggauggacagguauggucgacggcugguacggguaucaucaccagaacgaacaaggaagcggcuacgcagcugaccugaaguccacccagaaugccaucgauaaaauuacgaacaagguaaauucuguuaucgagaagaugaacacccaguuuacagcuguggguaaaggguucaaucacuuagagaagaggauagaaaaccugaauaaaaaggucgacgauggcuuccucgacauuuggacuuacaacgccgagcuucugguguugcuagaaaaugagcggacccuggauuaucaugacagcaacgugaaaaaccucuacgaaaagguucgcucacagcugaagaauaacgcaaaagagaucggaaauggcuguuuugaguucuaucacaagugcgauaacacauguauggaaagugugaaaaaugggacuuacgacuauccuaaguacuccgaggaagccaaacuuaaccgagaggaaaucgauggagucaagcuggagagcaccagaauuuaucaaaucuuggcuauuuacucuacaguggcgucaagucucguccuggugguuagcuuaggugcaauauccuuuuggaugugcucuaauggcucgcugcagugcaggaucuguauuuga

SEQ ID NO: 140944 - RNA, 1701 nt, Artificial Sequence; identical to SEQ ID NO: 130959
  derived and/or modified CDS sequence (opt3) from hemagglutinin__InfluenzaA__AJJ99516

SEQ ID NO: 140945 - RNA, 1701 nt, Artificial Sequence
  derived and/or modified CDS sequence (opt3) from hemagglutinin__InfluenzaA__AJJ99527
augaaggccauccugcucgugcuucuguacaccuucgcuacagcaaacgccgacacuuugugcauuggcuaucacgcgaauaacagcacggauaccgucgacacaguuuuagagaaaaaugugacuguaacccauuccgugaaccugcuagaagauaagcacaaugggaaacucuguaagcugagaggagucgcuccccuucaucuggguaaaugcaacauagccggcuggaucuuggggaauccugagugugaaucucucucaacagcaaguagcugguccuacauuguggagaccucuucgucagacaacggaacuugcuauccaggcgauuuuaucaauuacgaggagcugagggagcagcugagcaguguuuccucuuucgaacgguuugagauuuucccgaagacaagcuccuggcccaaccacgacucaaauaagggugugaccgccgcuuguccucgcgcaggggccaaaaguuuuuauaagaaccucaucugguuagucaaaaagggaaauagcuacccaaaacugucuaaguccuauauaaacgauaagggcaaagaagugcuuguauuguggggcauccaucaccccucaacgacugcugaccaacagagccuguaccagaaugccgaugcguacguuuucguggggaccagucgauauucuaagaaauuuaagccugagauugcaauccguccaaaagucagagaccaggagggaaggaugaacuacuauuggacucuaguggaacccggugauaagauuacauucgaggccaccggcaaccuccuggugccucgguacgcuuuugccauggaacgcaaugcaggguccggaaucauaauuagcgacacaccaguccacgauugcaacaccacgugucaaacuccgaaaggcgcuaucaauacaucgcuucccuuccagaacauucauccuaucaccaucgguaagugcccaaaguauguuaaaucuacuaagcugagauuggccacagggcucaggaaugugcccuccauucagucacggggacuguuuggcgcgauagccggcuucaucgaagggggauggaccgguaugguagacggcugguacggguaucaccaucagaacgaacaaggaaguggcuacgcagcugacuuaaaaagcacgcagaaugugauugauaagaucaccaacaaagucaauuccgugauagagaagaugaacacacaguuuacugccguugguaaggaguucaaucaccuggaaaaacgcauugagaaccucaauaagaaaguggacgauggguuccuugacaucuggaccuacaacgcugaacuguugguccuacuggagaaugaacgaacacucgauuaucacgacucuaacgugaagaaccuguacgagaaaguaagaaaucagcuuaagaacaaugccaaggagaucggcaacggauguuuugaguucuaucauaaaugcgauaauacuuguauggaaagcguuaagaacggcaccuacgacuauccuaaauacucagaagaggcaaagcugaauagggaagagauugauggggugaaauuggagaguacacggaucuaucaaauucucgccauauacuccaccgucgcuagcucucugguguuagucgugucacugggagcgaucaguuuuuggaugugcagcaacgguucccuacagugccguauuuguaucuga

SEQ ID NO: 140946 - RNA, 1701 nt, Artificial Sequence
  derived and/or modified CDS sequence (opt3) from hemagglutinin__InfluenzaA__AJJ99538
augaaggccauccuggugguccuccuuuacaccuucgcuacagcaaacgccgacacucugugcauuggcuaucacgcgaauaacagcacggauaccguugacacaguguuggagaaaaauguaacugugacccauuccgucaacuuacuggaagauaagcacaaugggaaacuauguaagcucagaggaguggcuccccugcaucuugguaaaugcaacauagccggcuggauccuggggaauccugagugugaaucuuugucaacagcaaguagcugguccuacauuguugagaccucuucgucagacaacggaacuugcuauccaggcgauuuuaucgacuacgaggagcucagggagcagcugagcaguguguccucuuucgaacgguuugagauuuucccgaagacaagcuccuggcccaaucacgauucaaacaagggugucaccgccgcuuguccucaugcaggggccaaaaguuuuuauaagaaucugaucuggcucgugaaaaagggaaacagcuacccaaaauuaucuaaguccuauauaaaugacaagggcaaagaaguacugguucuuuggggcauccaccaccccucaacgacugcugaucaacagagcuuguaccagaacgccgacaccuacguguucgucgggacaagucgcuauucuaagaaauuuaagccugagauugcgauccgaccaaaagugcgugaucaggagggaagaaugaauuacuauuggacucugguggaacccggugacaagauuaccuucgaggcaacaggcaaccuagucguuccuagguacgccuuugcuauggaacggaacgccggguccggaaucauaauuagcgauaccccagugcaugacugcaauacgacuugucaaacaccgaaaggcgcaaucaacaccucgcuccccuuccagaauauucacccuaucacuaucgguaagugcccaaaguauguaaaaucuacaaagcugcgccuugcuaccgggcugagaaacgugcccuccauucagucaaggggauuguuuggcgccauagcgggcuucaucgaagggggauggacggguauggucgacggcugguacggguaucaucaccagaaugaacaaggaaguggcuacgccgcagaucucaaaagcacccagaacgcuauugacaagaucacaaauaaagugaacuccguuauagagaagaugaauacucaguuuaccgccguggguaaggaguucaaccaccuggaaaaacggauugagaauuuaaacaagaaagucgaugacggguuccuggauaucuggacauacaaugcugaacuccuugugcuguuggagaacgaacgcacucuagacuaucaugauucuaauguaaagaaccuguacgagaaaguucgaaaccagcucaagaauaacgccaaggagaccggcaauggauguuuugaguucuaucacaaaugcgacaacacauguauggaaagcgugaagaauggcaccuacgauuauccuaaauacucagaagaggcaaagcugaacagagaaaagaucgacggggucaaacuugagaguacuaggauuuaucaaauccuggccauuuacuccacgguggcuagcucuuugguccucgugguuucacugggagcgauaaguuuuuggaugugcagcaaugguuccuuacagugccggaucuguauuuga

SEQ ID NO: 140947 - RNA, 1701 nt, Artificial Sequence
  derived and/or modified CDS sequence (opt3) from hemagglutinin__InfluenzaA__AJJ99549
augaaggccauccuggugguccuccuuuacaccuucgcuacagcaaacgccgacacucugugcauuggcuaucacgcgaauaacagcacggauaccguugacacaguguuggagaaaaauguaacugugacccauuccgucaacuuacuggaagauaagcacaaugggaaacuauguaagcucagaggaguggcuccccugcaucuugguaaaugcaacauagccggcuggauccuggggaauccugagugugaaucuuugucaacagcaaguagcugguccuacauuguugagaccucuucgucagacaacggaacuugcuauccaggcgauuuuaucgacuacgaagaacucagggagcagcugagcaguguguccucuuucgaacgguuugagauuuucccgaagacaagcuccuggcccaaucacgauucaaacaagggugucaccgccgcuuguccucaugcaggggccaaaggauuuuauaagaaucugaucuggcucgugaaaaagggcaacaguuacccaaaauuaagcaagucuuauauaaaugacaagggcaaagaaguacugguucuuugggggauccaccaccccuccacgacugcugaucaacagucauuguaccagaacgccgacaccuacguguucgucggaacaagccgcuauaguaagaaauuuaagccugagauugcgauccgaccaaaagugcgugaucaggaggguagaaugaauuacuauuggacucugguggaacccggcgacaagauuaccuucgaggcaacagggaaccuagucguuccuagguacgccuuugcuauggaacggaacgccggaucuggcaucauaauuuccgauaccccagugcaugacugcaauacgacuugucaaacaccgaaaggugcaaucaacaccagccuccccuuccagaauauucacccuaucacuaucgggaagugcccaaaguauguaaaaucgacaaagcugcgccuugcuaccggacugagaaacgugcccucuauucaguccaggggcuuguuuggcgccauagcgggguucaucgagggagguuggacgggcauggucgacgggugguacggauaucaucaccagaaugaacaaggcucagguuacgccgcagaucucaaaaguacccagaacgcuauugacaagaucacaaauaaagugaacagcguuauagagaagaugaauacucaguuuaccgccguggggaaggaguucaaccaccuggaaaaacggauugagaauuuaaacaagaaagucgaugacggcuuccuggauaucuggacauacaaugcugaacuccuugugcuguuggagaacgaacgcacucuagacuaucaugauuccaauguaaagaaccuguacgagaaaguucgaaaccagcucaagaauaacgccaaggagaucggaaauggcuguuuugaguucuaucacaaaugcgacaacauguguauggagucugugaagaaugggaccuacgauuauccuaaauacagcgaagaggcaaagcugaacagagaagagauugacggagucaaacuugagucaacaaggaucuaucaaauucuggccauauacaguaccgcugcguccagcuuggugcucgucgugucucugggugcaaucucauuuuggaugugcaguaauggcagcuuacagugccggauuuguaucuga

SEQ ID NO: 140948 - RNA, 1701 nt, Artificial Sequence; identical to SEQ ID NO: 135137
  derived and/or modified CDS sequence (opt3) from hemagglutinin__InfluenzaA__AJJ99560

SEQ ID NO: 140949 - RNA, 1701 nt, Artificial Sequence
  derived and/or modified CDS sequence (opt3) from hemagglutinin__InfluenzaA__AJJ99571
augaaggccauccuggugguccuccuuuacaccuucgcuacagcaaacgccgacacucugugcauuggcuaucacgcgaauaacagcacggauaccguugacacaguguuggagaaaaauguaacugugacccauuccgucaacuuacuggaagauaagcacaaugggaaacuauguaagcucagaggaguggcuccccugcaucuugguaaaugcaacauagccggcuggauccuggggaauccugagugugaaucuuugucaacagcaaguagcugguccuacauuguugagaccucuucgucagacaacggaacuugcuauccaggcgauuuuaucgacuacgaggagcucagggagcagcugagcaguguguccucuuucgaacgguuugagauuuucccgaagacaagcuccuggcccaaucacgauucaaacaagggugucaccgccgcuuguccucaugcaggggccaaaaguuuuuauaagaaucugaucuggcucgugaaaaagggaaacagcuacccaaaauuaucuaaguccuauauaaaugacaagggcaaagaaguacugguucuuuggggcauccaccaccccucaacgacugcugaucaacagagcuuguaccagaacgccgacaccuacguguucgucgggacaagucgcuauucuaagaaauuuaagccugagauugcgauccgaccaaaagugcgugaucaggagggaagaaugaauuacuauuggacucugguggaacccggugacaagauuaccuucgaggcaacaggcaaccuagucguuccuagguacgccuuugcuauggaacggaacgccggguccggaaucauaauuagcgauaccccagugcaugacugcaauacgacuugucaaacaccgaaaggcgcaaucaacaccucgcuccccuuccagaauauucacccuaucacuaucgguaagugcccaaaguauguaaaaucuacaaagcugcgccuugcuaccgggcugagaaacgugcccuccauucagucaaggggauuguuuggcgccauagcgggcuucaucgaagggggauggacggguauggucgacggcugguacggguaucaucaccagaaugaacaaggaaguggcuacgccgcagaucucaaaagcacccagaacgcuauugacaagaucacaaauaaagugaacuccguuauagagaagaugaauauucaguuuacugccguggguaaggaguucaaccaccuggaaaaacggaucgagaauuuaaacaagaaagucgaugacggguuccuggauaucuggaccuacaaugcugaacuccuugugcuguuggagaacgaacgcacacuagacuaucaugauucuaauguaaagaaccuguacgagaaaguucgaaaccagcucaagaauaacgccaaggagauuggcaauggauguuuugaguucuaucacaaaugcgacaacacuuguauggaaagcgugaagaauggcaccuacgauuauccuaaauacucagaagaggcaaagcugaacagagaagagaucgacggggucaaacuugagaguacaaggauuuaucaaauacuggccaucuacuccaccguggcuagcucuuugguccucgugguuucacugggagcgauuaguuuuuggaugugcagcaaugguuccuuacagugccggaucuguaucuga

SEQ ID NO: 140950 - RNA, 1701 nt, Artificial Sequence
  derived and/or modified CDS sequence (opt3) from hemagglutinin__InfluenzaA__AJJ99582
augaaggccauccuggugguccuccuuuacaccuucgcuacagcaaacgccgacacucugugcauuggcuaucacgcgaauaacagcacggauaccguugacacaguguuggagaagaauguaacugugacccauuccgucaacuuacuggaagauaagcacaaugggaaacuauguaagcucagaggaguggcuccccugcaucuugguaaaugcaacauagccggcuggauccuggggaauccugagugugaaucuuugucaacagcaaguagcugguccuacauuguugagaccucuucgucagacaacggaacuugcuauccaggcgauuuuaucgacuacgaggagcucagggagcagcugagcaguguguccucuuucgaacgguuugagauuuucccgaagacaagcuccuggcccaaucacgauucaaacaagggugucaccgccgcuuguccucaugcaggggccaaaaguuuuuauaagaaucugaucuggcucgugaaaaagggaaacagcuacccaaaauuaucuaaguccuauauaaaugacaagggcaaagaaguacugguucuuuggggcauccaccaccccucaacgagcgcugaucaacagaguuuguaccagaacgccgacgcguacguguucgucgggacuucucgcuauuccaagaaauuuaagccugagauugcaauccgaccaaaagugcgugaucaggagggaagaaugaauuacuauuggacccugguggaacccggugacaagauuacauucgaggccacuggcaaccuagucguuccuagguacgcuuuugccauggaacggaacgcagggagcggaaucauaauuucggauaccccagugcaugacugcaauacaaccugucaaacgccgaacggcgcuaucaauacuucucuccccuuccagaacauucacccuaucacaaucgguaaaugcccaaaguauguaaaguccaccaaacugcgccuugccacugggcugagaaaugugcccucaauucagaguaggggauuguuuggcgcgauagccggcuucaucgaagggggauggacagguauggucgacggcugguacggguaucaucaccagaacgaacaaggaagcggcuacgcagcugaucucaaguccacccagaaugccauugacaaaaucacgaacaagguaaauucuguuauagagaaaaugaacacccaguuuacagcuguggguaaggaguucaaucaccuggaaaagcggauugagaacuuaaauaaaaaggucgaugacggguuccuggauaucuggacuuacaacgccgaacuccuugugcuguuggagaaugaacgcacccuagacuaucaugauagcaacgugaaaaaccuguacgagaagguucgaucacagcucaaaaauaacgcaaaggagaucggcaauggauguuuugaguucuaucacaagugcgacaacacauguauggaaagugugaaaaauggcacuuacgauuauccuaaguacuccgaagaggccaaacugaacagagaagagauugacggggucaaacuugagagcaccaggaucuaucaaauucuggcuauauacucuacaguggcgucaaguuugguccucgugguuagccugggagcaaucuccuuuuggaugugcucuaaugguucguuacagugccggauuuguaucuga

SEQ ID NO: 140951 - RNA, 1701 nt, Artificial Sequence; identical to SEQ ID NO: 130959
  derived and/or modified CDS sequence (opt3) from hemagglutinin__InfluenzaA__AJJ99593

SEQ ID NO: 140952 - RNA, 1701 nt, Artificial Sequence
  derived and/or modified CDS sequence (opt3) from hemagglutinin__InfluenzaA__AJJ99604
augaaggccauccuggugguccuccuuuacaccuucgcuacagcaaacgccgacacucugugcauuggcuaucacgcgaauaacagcacggauaccguugacacaguguuggagaaaaauguaacugugacccauuccgucaacuuacuggaagauaagcacaaugggaaacuauguaagcucagaggaguggcuccccugcaucuugguaaaugcaacauagccggcuggauccuggggaauccugagugugaaucuuugucaacagcaaguagcugguccuacauuguugagaccucuucgucagacaacggaacuugcuauccaggcgauuuuaucgacuacgaggagcucagggagcagcugagcaguguguccucuuucgaacgguuugagauuuucccgaagacaagcuccuggcccaaucacgauucaaacaagggugucaccgccgcuuguccucaugcaggggccaaaaguuuuuauaagaaucugaucuggcucgugaaaaagggaaacagcuacccaaaauuaucuaaguccuauauaaaugacaagggcaaagaaguacugguucuuuggggcauccaccaccccucaacgagcgcugaucaacagaguuuguaccagaacgccgacgcguacguguucgucgggacuucucgcuauuccaagaaauuuaagccugagauugcaauccgaccacgugugagagaucaggagggaaggaugaauuacuauuggacccugguggaacccggugacaaaauuacauucgaggccacuggcaaccuagucguuccucgguacgcuuuugccauggaacgcgaugcagggagcggaaucauaauuucggacaccccagugcaugacugcaacacaaccugucaaacgccgaagggcgcuaucaauacuucucuccccuuccagaacauucacccuaucacaaucgguaaaugcccaaaguauguaaaguccaccaaacugagacuugccacugggcugaggaaugugcccucaauucagagucggggauuguuuggcgcgauagccggcuucaucgaagggggauggacagguauggucgauggcugguacggguaucaucaccagaacgaacaaggaagcggcuacgcagcugaccucaaguccacccagaaugccauugaugagaucacgaacaaaguuaauucugugauagagaagaugaacacccaguuuacagcuguggguaaagaguucaaucaccuggaaaagcgcauugaaaacuuaaauaagaaaaucgacgauggguuccuggacaucuggacuuacaacgccgagcuccuuguccuguuggaaaaugagcgaacccuagauuaucaugacagcaacgugaagaaucuguacgagaaaguaagaucacagcucaagaacaacgcaaaagaaauuggcaauggauguuuugaguucuaucacaagugcgauaacacauguauggaaaguguuaagaauggcacuuacgacuauccuaaauacuccgaggaagccaagcugaacagggaggagaucgauggggugaaacuugaaagcacccggauuuaucaaauacuggcuaucuacucuacagucgcgucaaguuuggugcucgucgugagccugggagcaauuuccuuuuggaugugcucuaaugguucguuacagugccguaucuguaucuga

SEQ ID NO: 140953 - RNA, 1698 nt, Artificial Sequence
  derived and/or modified CDS sequence (opt3) from hemagglutinin__InfluenzaA__AJJ99616
augaaggugaaacugcucguccuucugugcaccuucacagccacuuacgcugacacgaucuguauuggcuaucacgcaaacaauagcaccgauacaguugacacuguguuggagaagaacguaaccgugacacauuccgucaauuuacuggaaaacucucacaaugggaaacuaugccuccugaagggaauagcgccccuucagcuggguaacuguucaguggccggcuggaucuuggggaauccugagugcgaacuccugauuaguaaagagagcugguccuacaucguugaaaagccaaacccggagaauggaaccuguuaucccggccauuuugcugauuacgaggaacugagagagcaacucucuucggugagcucauucgaaagguuugagauuuucccuaaggagaguuccuggccaaaccacacugucacaggugugucugccagcugcucccauaauggggaaaacucauuuuaucggaauuuacuguggcuuaccggaaagaacggcuuguaccccaaucugaguaagagcuaugcaaacaacaaagagaaggaaguacuuguucucuggggcgugcaccacccuccaaauaucgccaaccagaaaacgcuguaccauacugagaaugcuuacgucucugugguguccucacacuauagccgcaagcuaacccccgaaauagcaaagcgaccuaaaguccgugaccaggaggggagaaucaacuacuauuggacacuguuggagccaggagauacuauuaucuucgaagccaaugguaaccucauugcuccgagguacgccuuugcgcugagucggggcuucgggucuggaaucauaaauuccaacgcacccauggacaagugugaugccaaaugccagaccccucaaggcgcuauuaauagcucguuaccauuucagaacguucaucccgugacaaucggugaguguccuaaguauguacgcucugccaaacugagaauggugaccgggcucaggaauauuccauccauccagucacggggacuuuucggcgcaaucgcuggcuuuauugaagggggauggacggguauggucgacggcugguacggguaucaccaccagaacgagcaaggaaguggcuacgccgcggaucagaaaagcacucagaaugccauaaacgguaucacaaauaaagugaacuccguuauugaaaagaugaacacccaguucacugcaguggggaaggaguuuaauaaacuggagcgccgaauggaaaacuugaauaagaaagucgacgauggcuucaucgacauauggacauacaacgcugagcuacuggugcuccuggaaaaugagagaacccuugauuuccaugacucuaacguaaagaaucuguaugaaaaaguuaagagccaauugaagaacaaugccaaagagauuggaaacggcugcuuugaguucuaccacaaguguaaugacgaaugcauggagucagugaaaaacgggacguaugauuaccccaaguauagugaagaguccaaacucaauagggagaagaucgacggagucaagcuggaaagcauggguguguaccagaucuuagcuauuuauucuaccgucgccucaagucuggugcuacucguuagccugggcgcaaucuccuuuuggaugugcucuaacgggucgcuucagugucggauuugcauauga

SEQ ID NO: 140954 - RNA, 1698 nt, Artificial Sequence; identical to SEQ ID NO: 131674
  derived and/or modified CDS sequence (opt3) from hemagglutinin__InfluenzaA__AJJ99628

SEQ ID NO: 140955 - RNA, 1698 nt, Artificial Sequence
  derived and/or modified CDS sequence (opt3) from hemagglutinin__InfluenzaA__AJJ99640
augaaggugaaacugcucguccuucugugcaccuucacagccacuuacgcugacacgaucuguauuggcuaucacgcaaacaauagcaccgauacaguugacacuguguuggagaagaacguaaccgugacacauuccgucaauuuacuggaaaacucucacaaugggaaacuaugccuccugaagggaauagcgccccuucagcuggguaacuguucaguggccggcuggaucuuggggaauccugagugcgaacuccugauuaguaaagagagcugguccuacaucguugaaaagccaaacccggagaauggaaccuguuaucccggccauuuugcugauuacgaggaacugagagagcaacucucuucggugagcucauucgaaagguuugagauuuucccuaaggagaguuccuggccaaaccacacugucacaggugugucugccagcugcucccauaauggggaaaacucauuuuaucggaauuuacuguggcuuaccggaaagaacggcuuguaccccaaucugaguaagagcuaugcaaacaacaaagagaaggaagugcuaguucucuggggcgugcaccacccuccaaauaucgccaaccagaaaacgcuguaccauacugagaaugcuuacgucucugugguguccucacacuauagccgcaaguucacccccgaaauagcaaagcgaccuaaaguccgugaccaggaggggagaaucaacuacuauuggacacuucuggagccaggagauacuauuaucuuugaagccaaugguaacuugauugcuccgagguacgccuucgcgcucagucggggcuuugggucuggaaucauaaauuccaacgcacccauggacaagugugaugccaaaugccagaccccucaaggcgcuauuaauagcucgcugccauuccagaacguucaucccgugacaaucggugaguguccuaaguauguacgcucugccaaauuaagaauggugaccgggcugaggaauauuccauccauccagucacggggacucuuuggcgcagucgcuggcuucaucgaagggggauggacggguaugguggacggcugguacggguaucaccaccagaacgagcaaggaaguggcuacgccgcggaucagaaaagcacucagaaugccauuaacgguauaacaaauaaaguuaacuccgugaucgaaaagaugaacacccaguuuacugcagucgggaaggaguucaauaaacuugagcgccgaauggaaaaccugaauaagaaaguggacgauggcuucauugacaucuggacauacaacgcugaguugcuaguacugcucgaaaaugagagaacccuggauuuucaugacucuaacguuaagaaucuuuaugaaaaaguaaagagccaacugaagaacaaugccaaagagauaggaaacggcugcuucgaguuuuaccacaaguguaaugacgaaugcauggagucagucaaaaacgggacguaugauuaccccaaguauagugaagaguccaaauugaauagggagaagauugacggagugaagcucgaaagcaugggugucuaccagauccuggcuaucuauucuaccguggccucaaguuuaguucugcuagugagccucggcgcaauuuccuucuggaugugcucuaacgggucgcugcagugucggaucugcauuuga

SEQ ID NO: 140956 - RNA, 1698 nt, Artificial Sequence; identical to SEQ ID NO: 131674
  derived and/or modified CDS sequence (opt3) from hemagglutinin__InfluenzaA__AJJ99652

SEQ ID NO: 140957 - RNA, 1698 nt, Artificial Sequence
  derived and/or modified CDS sequence (opt3) from hemagglutinin__InfluenzaA__AJJ99664
augaaggccaaacugcucgugcuucugugcaccuucacagcuacuuacgcagacacgaucuguauuggcuaucacgccaacaauagcaccgauacagucgacacuguuuuggagaagaacgugaccguaacacauuccgugaauuuacuggaaaacucucacaaugggaaacuaugccuccugaagggaauagcgccccuucagcuggguaacuguucaaucgcuggcuggauuuuggggaauccugagugcgaacuccugaucaguaaagagagcugguccuacauugucgaaaagccaaacccggagaauggaaccuguuaucccggccauuuugccgauuacgaggaacugagagagcaacucucuucggugagcucauucgaaagguuugagaucuucccuaaggagaguuccuggccaaaccacacuguuacaggugugucugcaagcugcucccauaauggggaaucaaguuuuuaucggaacuuacuguggcuuaccggcaaaaauggauuguaccccaaccugagcaagucuuaugccaauaacaaagagaaggaaguccuagugcucuggggcguacaccacccuccaaacauaggggaccagaaagcucuguaccauacggagaaugcauacguuuccguggucucaagccacuauagucgcaaguucacucccgaaaucgccaagcgaccuaaagugcgugaucaggagggaagaauuaacuacuauuggacccuucuggagccaggugacacaaucauuuuugaagcuaauggcaacuugaucgccccgagguacgcguucgcacucucucggggguuuggauccggcauaauuaauagcaacgcccccauggauaagugugacgcuaaaugccagacuccucaaggugccaucaauucgucucugccauuccagaacgugcaucccgucaccauuggggaguguccuaaguauguucgcuccgcaaaauuaagaauggugacaggacugaggaauaucccaucaauccagagucggggccucuuuggcgcuauugccggguucauagaaggagguuggaccggcaugguagaugggugguacggauaucaccaccagaacgagcaaggcagcgguuacgcggccgaccagaaguccacgcagaaugcaaucaacgggauuacuaauaaagugaacucugucaucgaaaagaugaauacacaguuuaccgcugugggcaaggaguucaacaaacuugagcgccgaauggaaaaccugaauaagaaaguugaugacggauucauagauauuuggacuuacaacgccgaguugcuagugcugcucgaaaaugagagaacacuggacuuucaugacagcaacgucaagaaucuuuaugaaaaagugaagucacaacugaagaacaaugcuaaagagaucggcaacgggugcuucgaguuuuaccacaaguguaaugaugaaugcauggagaguguuaaaaacggaaccuaugacuaccccaaguauuccgaagagagcaaauugaauagggagaagaucgaugguguaaagcucgaaucuaugggcguguaccagauucuggccaucuauucaacggucgcaaguagcuuagugcugcuagucucccucggggccauuucuuucuggaugugcucgaacggaagccugcagugucggauaugcaucuga

SEQ ID NO: 140958 - RNA, 1701 nt, Artificial Sequence
  derived and/or modified CDS sequence (opt3) from hemagglutinin__InfluenzaA__AJJ99675
augaaggccauccugcucgugcuucuguacaccuucgcuacagcaaaagccgacacuuugugcauuggcuaucacgcgaacaauagcacggauaccgucgacacaguuuuagagaagaacgugacuguaacccauuccgugaaucugcuagaagauaaacacaacgggaagcucuguaaacugagaggagucgcuccccuucaucuggguaagugcaauauagccggcuggaucuuggggaacccugagugugaaucucucucaacagcaaguagcugguccuacauuguggagaccucuucgucagacaauggaacuugcuauccaggcgauuuuaucaacuacgaggagcugagggagcagcugagcaguguuuccucuuucgaacgguuugagauuuucccgaagacaagcuccuggcccaaucacgacucaaacaaaggugugaccgccgcuuguccucgcgcaggggccaagaguuuuuauaaaaaucucaucugguuagucaagaaaggaaacagcuacccaaagcugucuaaguccuauauaaaugauaaaggcaaggaagugcuuguauuguggggcauccaucaccccucaacgacugcugaccaacagagccuguaccagaacgccgaugcguacguuuucguggggaccagucgauauucuaaaaaguuuaaaccugagauugcaauccguccaaaggucagagaccaggagggaaggaugaauuacuauuggacucuaguggaacccggugauaaaauuacauucgaggccaccggcaaccuccuggugccucgguacgcuuuugccauggaacgcaacgcaggguccggaaucauaauuagcgacacaccaguccacgauugcaauaccacgugucaaacuccgaagggcgcuaucaacacaucgcuucccuuccagaauauucauccuaucaccaucgguaagugcccaaaauauguuaagucuacuaaacugagauuggccacagggcucaggaacgugcccuccauucagucacggggacuguuuggcgcgauagccggcuucaucgaagggggauggaccgguaugguagacggcugguacggguaucaccaucagaaugaacaaggaaguggcuacgcagcugacuuaaagagcacgcagaacgccauugauaaaaucaccgacaagguaaauuccgucauagagaagaugaacacacaguuuacugcuguggguaaagaguucaaucaccuggaaaagcgcauugagaaccucaauaaaaagguugaugacggguuccuugauaucuggaccuacaacgccgaacuguuggugcuacuggagaaugaacgaacacucgacuaucacgauucuaacgucaaaaaucuguacgagaaggugagaaaccagcuuaagaacaaugcaaaagagaucggcaacggauguuuugaguucuaucauaagugcgacaauacuuguauggaaagcgugaaaaacggcaccuacgauuauccuaaguacucagaagaggccaaacugaauagggaagagauugacgggguuaaguuggagaguacacggaucuaucaaauucucgcuauauacuccaccguggcgagcucucuggucuuaguggucucacugggagcaaucaguuuuuggaugugcagcaacgguucccuacagugccguauuuguaucuga

SEQ ID NO: 140959 - RNA, 1701 nt, Artificial Sequence
  derived and/or modified CDS sequence (opt3) from hemagglutinin__InfluenzaA__AJJ99686
augaccgccauccugcucgugcuucuguacacauucgcuacugcaaacgccgacacguugugcauuggcuaucacgcgaauaacagcaccgauacagucgacacuguuuuagagaagaaugugaccguaacacauuccgugaaccugcuagaagauaaacacaaugggaagcucuguaaacugagaggagucgcuccccuucaucuggguaagugcaacauagccggcuggaucuuggggaauccugagugugaaucucucucaaccgcaaguagcugguccuacauuguggagacuucuucgucagacaacggaacaugcuauccaggcgauuuuaucaauuacgaggagcugagggagcagcugagcaguguuuccucuuucgaacgguuugagauuuucccgaaaaccagcuccuggcccaaccacgacucaaauaagggugugacggccgcuuguccucgcgcaggggccaagaguuuuuauaaaaaccucaucugguuagucaagaaaggaaauagcuacccaaagcugucuaaauccuauauaaacgauaagggcaaggaagugcuuguauuguggggcauccaucaccccucaacuaccgcugaccaacagagccuguaccagaaugccgaugcguacguuuucguggggacaagucgauauucuaaaaaguuuaaaccugagauugcaauccguccaaaggucagagaccaggagggaaggaugaacuacuauuggacucuaguggaacccggugauaaaauuaccuucgaggccacaggcaaccuccuggugccucgguacgcuuuugccauggaacgcaaugcaggguccggaaucauaauuagcgacaccccaguccacgauugcaacacgacuugucaaacaccgaagggcgcuaucaauaccucgcuucccuuccagaacauucauccuaucacuaucgguaaaugcccaaaguauguuaagucuacaaaacugagauuggccaccgggcucaggaaugugcccuccauucagucacggggacuguuuggcgcgauagccggcuucaucgaagggggauggacggguaugguagacggcugguacggguaucaccaucagaacgaacaaggaaguggcuacgcagcugacuuaaagagcacccagaaugccauugauaaaaucacaaacaagguaaauuccgucauagagaaaaugaacacucaguuuaccgcuguggguaaggaguucaaucaccuggaaaagcgcauugagaaccucaauaaaaagguugacgauggguuccuugacaucuggacauacaacgccgaacuguuggugcuacuggagaaugaacgaacucucgauuaucacgacucuaacgucaaaaaccuguacgagaaggugagaaaucagcuuaaaaacaaugcaaaggagaucggcaacggauguuuugaguucuaucauaagugcgauaauaccuguauggaaagcgugaaaaacggcacauacgacuauccuaaguacucagaagaggccaaacugaauagggaagagauugaugggguuaaguuggagaguacccggaucuaucaaauucucgcuauauacuccacuguggcgagcucucuggucuuaguggucucacugggagcaaucaguuuuuggaugugcagcaacgguucccuacagugccguauuuguaucuga

SEQ ID NO: 140960 - RNA, 1701 nt, Artificial Sequence
  derived and/or modified CDS sequence (opt3) from hemagglutinin__InfluenzaA__AJJ99697
augaaggccauccuggugguccuccuuuacaccuucgcuacagcaaacgccgacacucugugcauuggcuaucacgcgaauaacagcacggauaccguugacacaguguuggagaaaaauguaacugugacccauuccgucaacuuacuggaagauaagcacaaugggaaacuauguaagcucagaggaguggcuccccugcaucuugguaaaugcaacauagccggcuggauccuggggaauccugagugugaaucuuugucaacagcaaguagcugguccuacauuguugagaccucuucgucagacaacggaacuugcuauccaggcgauuuuaucgacuacgaggagcucagggagcagcugagcaguguguccucuuucgaacgguuugagauuuucccgaagacaagcuccuggcccaaucacgauucaaacaagggugucaccgccgcuuguccucaugcaggggccaaaaguuuuuauaagaaucugaucuggcucgugaaaaagggaaacagcuacccaaaauuaucuaaguccuauauaaaugacaagggcaaagaaguacugguucuuuggggcauccaccaccccucaacgacugcugaucaacagagcuuguaccagaacgccgacaccuacguguucgucgggacaagucgcuauucuaagaaauuuaagccugagauugcgauccgaccaaaagugcgugaucaggagggaagaaugaauuacuauuggacucugguggaacccggugacaagauuaccuucgaggcaacaggcaaccuagucguuccuagguacgccuuugugauggaacggaacgcuggguccggaaucauaauuagcgauaccccaguacaugacugcaauacgacuugucaaacaccgaaaggcgccaucaacaccucgcuccccuuccagaauauucacccuaucacuaucgguaagugcccaaaguaugugaaaucuacaaagcugcgccuugcaaccgggcugagaaacguccccuccauucagucaaggggauuguuuggcgcuauagccggcuucaucgaagggggauggacggguaugguggacggcugguacggguaucaucaccagaaugaacaaggaaguggcuacgcggccgaucucaaaagcacccagaacgcaauugacaagaucacaaauaaaguuaacuccgugauagagaagaugaauacucaguuuaccgcugucgguaaggaguucaaccaccuggaaaaacggauugagaauuuaaacaagaaaguggaugacggguuccuggauaucuggacauacaaugccgaacuccuuguacuguuggagaacgaacgcacucuagacuaucaugauucuaauguuaagaaccuguacgagaaagugcgaaaccagcucaagaauaacgcuaaggagaccggcaauggauguuuugaguucuaucacaaaugcgacaacacauguauggaaagcgucaagaauggcaccuacgauuauccuaaauacucagaagaggccaagcugaacagagaaaagaucgacggggugaaacuugagaguacuaggauuuaucaaauccuggcaauuuacuccacggucgccagcucuuuggugcucguugugucacugggagcuauaaguuuuuggaugugcagcaaugguuccuuacagugccggaucuguauuuga

SEQ ID NO: 140961 - RNA, 1701 nt, Artificial Sequence
  derived and/or modified CDS sequence (opt3) from hemagglutinin__InfluenzaA__AJJ99708
augaaggccauccuggugguccuccuuuacaccuucgcuacagcaaacgccgacacucugugcauuggcuaucacgcgaauaacagcacggauaccguugacacaguguuggagaaaaauguaacugugacccauuccgucaacuuacuggaagauaagcacaaugggaaacuauguaagcucagaggaguggcuccccugcaucuugguaaaugcaacauagccggcuggauccuggggaauccugagugugaaucuuugucaacagcaaguagcugguccuacauuguugagaccucuucgucagacaacggaacuugcuauccaggcgauuuuaucgacuacgaggagcucagggagcagcugagcaguguguccucuuucgaacgguuugagauuuucccgaagacaagcuccuggcccgaucacgacucaaauaagggugucaccgccgcuuguccucaugcaggggccaaaaguuuuuauaagaaccugaucuggcucgugaaaaagggaaauagcuacccaaaauuaucuaaguccuauauaaacgauaagggcaaagaaguacugguucuuuggggcauccaccaccccucaacgacugcugaccaacagagcuuguaccagaaugccgauaccuacguguucgucgggacaagucgcuauucuaagaaauuuaagccugagauugcgauccgaccaaaagugcgugaccaggagggaagaaugaacuacuauuggacucugguggaacccggugauaagauuaccuucgaggcaacaggcaaucuagucguuccuagguacgccuuugugauggaacggaacgcuggguccggaaucauaauuagcgacaccccaguacaugacugcaacacgacuugucaaacaccgaaaggcgccaucaauaccucgcuccccuuccagaacauucacccuaucacuaucgguaagugcccaaaguaugugaaaucuacaaagcugcgccuugcaaccgggcugagaaauguccccuccauucagucaaggggauuguuuggcgcuauagccggcuucaucgaagggggauggacggguaugguggauggcugguacggguaucaucaccagaacgaacaaggaaguggcuacgcggccgaccucaaaagcacccagaaugcaauugauaagaucacaaacaaaguuaauuccgugauagagaagaugaacacucaguuuaccgcugucgguaaggaguucaaucaccuggaaaaacggauugagaacuuaaauaagaaaguggacgauggguuccuggacaucuggacauacaacgccgaacuccuuguacuguuggagaaugaacgcacucuagauuaucaugacucuaacguuaagaaucuguacgagaaagugcgaaaccagcucaagaacaaugcuaaggagaccggcaacggauguuuugaguucuaucacaaaugcgauaauacauguauggaaagcgucaagaacggcaccuacgacuauccuaaauacucagaagaggccaagcugaauagagaaaagaucgauggggugaaacuugagaguacuaggauuuaucaaauccuggcaauuuacuccacggucgccagcucuuuggugcucguugugucacugggagcuauaaguuuuuggaugugcagcaacgguuccuuacagugccggaucuguauuuga

SEQ ID NO: 140962 - RNA, 1701 nt, Artificial Sequence
  derived and/or modified CDS sequence (opt3) from hemagglutinin__InfluenzaA__AJJ99719
augaaggccauccugguggucaugcucuacaccuucgcuacagcaaacgccgacacucuuugcauuggcuaucacgcgaauaacagcacggauaccguugacacagugcuggagaaaaauguaacugugacccauuccgucaacuuguuagaagauaagcacaaugggaaacuguguaagcuaagaggaguggcuccccuccaucuggguaaaugcaacauagccggcuggauccuugggaauccugagugugaaucucugucaacagcaaguagcugguccuacauuguugagaccucuucgucagacaacggaacuugcuauccaggcgauuuuaucgacuacgaagaguugagggagcagcucagcaguguguccucuuucgaacgguuugagauuuucccgaagacaagcuccuggcccaaucacgauucaaacaagggugucaccgccgcuuguccucaugcaggggccaaaggauuuuauaagaaucugaucuggcuggugaaaaagggcaacaguuacccaaaacucagcaagucuuauauaaaugacaagggcaaagaaguauuaguucugugggggauccaccaccccuccacgacugcugaucaacagucacuuuaccagaacgccgacaccuacguguucgucggaacaagccgcuauaguaagaaauuuaagccugagauugcgauccgaccaaaagugcgugaucaggaggguagaaugaauuacuauuggacuuugguggaacccggcgacaagauuaccuucgaggcaacagggaaccuggucguuccuagguacgccuuugcuauggaacggaacgccggaucuggcaucauaauuuccgauaccccagugcaugacugcaauacgacuugucaaacaccgaaaggugcaaucaacaccagccuacccuuccagaauauucacccuaucacuaucgggaagugcccaaaguauguaaaaucgacaaagcuccgccuggcuaccggacuuagaaacgugcccucuauucaguccaggggccuguuuggcgccauagcgggguucaucgagggagguuggacgggcauggucgacgggugguacggauaucaucaccagaaugaacaaggcucagguuacgccgcagauuugaaaaguacccagaacgcuauugacaagaucacaaauaaagugaacagcguuauagagaagaugaauacucaguuuaccgccguggggaaggaguucaaccaccucgaaaaacggauugagaaucugaacaagaaagucgaugacggcuucuuagauaucuggacauacaaugcugaacugcucgugcuucuggagaacgaacgcacuuuggacuaucaugauuccaauguaaagaaccuauacgagaaaguucgaaaccagcugaagaauaacgccaaggagaucggaaauggcuguuuugaguucuaucacaaaugcgacaacaccuguauggaaucugugaagaaugggacauacgauuauccuaaauacagcgaagaggcaaagcucaacagagaagagauugagggagucaaacuggaaucaaccaggaucuaucaaauucuugccauauacaguacuguggcuuccagccuggucuuggugguuucucucggugcgaucucauuuuggaugugcaguaauggcagccugcagugccggauuuguaucuga

SEQ ID NO: 140963 - RNA, 1701 nt, Artificial Sequence
  derived and/or modified CDS sequence (opt3) from hemagglutinin__InfluenzaA__AJJ99730
augaaggccauccugguggucaugcucuacaccuucgcuacagcaaacgccgacacucuuugcauuggcuaucacgcgaauaacagcacggauaccguugacacagugcuggagaaaaauguaacugugacccauuccgucaacuuguuagaagauaagcacaaugggaaacuguguaagcuaagaggaguggcuccccuccaucuggguaaaugcaacauagccggcuggauccuugggaauccugagugugaaucucugucaacagcaaguagcugguccuacauuguugagaccucuucgucagacaacggaacuugcuauccaggcgauuuuaucgacuacgaagaguugagggagcagcucagcaguguguccucuuucgaacgguuugagauuuucccgaagacaagcuccuggcccaaucacgauucaaacaagggugucaccgccgcuuguccucaugcaggggccaaaggauuuuauaagaaucugaucuggcuggugaaaaagggcaacaguuacccaaaacucagcaagucuuauauaaaugacaagggcaaagaaguauuaguucugugggggauccaccaccccuccacgacugcugaucaacagucacuuuaccagaacgccgacaccuacguguucgucggaacaagccgcuauaguaagaaauuuaagccugagauugcgauccgaccaaaagugcgugaucaggaggguagaaugaauuacuauuggacuuugauugaacccggcgacaagaucaccuucgaggcaacagggaaccugguggucccuagguacgccuuugcuauggaacggaacgccggaucuggcauaauuaucuccgauaccccaguucaugacugcaauacgacuugucaaacaccgaaaggugcaauuaacaccagccuacccuuccagaauauccacccuaucacuauugggaagugcccaaaguaugugaaaucgacaaagcuccgccuggcuaccggacuuagaaacguacccucuauacaguccaggggccuguuuggcgccaucgcgggguucauugagggagguuggacgggcaugguggacgggugguacggauaucaucaccagaaugaacaaggcucagguuacgccgcagauuugaaaaguacccagaacgcuaucgacaagauaacaaauaaagucaacagcgugauugagaagaugaauacucaguuuaccgccguugggaaggaguucaaccaccucgaaaaacggaucgagaaucugaacaagaaaguggaugacggcuucuuagauaucuggacauacaaugcugaacugcucguccuucuggagaacgaacgcacuuuggacuaucaugauuccaaugugaagaaccuauacgagaaaguacgaaaccagcugaagaauaacgccaaggagauuggaaauggcuguuuugaguuccaccauaaaugcgacaacaccuguauggaaucuguuaagaaugggacauaugauuacccuaaauauagcgaagaggcaaagcucaacagagaagagaucgacggagugaaacuggagucaaccaggauuuaccaaauacuugccaucuauaguacugucgcuuccagccugguguuggucgugucucucggugcgauuucauuuuggaugugcaguaauggcagccugcagugccggaucuguaucuga

SEQ ID NO: 140964 - RNA, 1701 nt, Artificial Sequence; identical to SEQ ID NO: 135090
  derived and/or modified CDS sequence (opt3) from hemagglutinin__InfluenzaA__AJJ99741

SEQ ID NO: 140965 - RNA, 1701 nt, Artificial Sequence; identical to SEQ ID NO: 131881
  derived and/or modified CDS sequence (opt3) from hemagglutinin__InfluenzaA__AJJ99752

SEQ ID NO: 140966 - RNA, 1701 nt, Artificial Sequence; identical to SEQ ID NO: 130717
  derived and/or modified CDS sequence (opt3) from hemagglutinin__InfluenzaA__AJJ99763

SEQ ID NO: 140967 - RNA, 1698 nt, Artificial Sequence
  derived and/or modified CDS sequence (opt3) from hemagglutinin__InfluenzaA__AJJ99775
augaaggugaaacugcucguccuucugugcaccuucacagccacuuacgcugacacgaucuguauuggcuaucacgcaaacaauagcaccgauacaguugacacuguguuggagaagaacguaaccgugacacauuccgucaauuuacuggaaaacucucacaaugggaaacuaugccuccugaagggaauagcgccccuucagcuggguaacuguucaguggccggcuggaucuuggggaauccugagugcgaacuccugauuaguaaagagagcugguccuacaucguugaaaagccaaacccggagaauggaaccuguuaucccggccauuuugcugauuacgaggaacugagagagcaacucucuucggugagcucauucgaaagguuugagauuuucccuaaggagaguuccuggccaaaccacacugucacaggugugucugccagcugcucccauaauggggaaaacucauuuuaucggaauuuacuguggcuuaccggaaagaacggcuuguaccccaaucugaguaagagcuaugcaaacaacaaagagaaggaagugcuaguucucuggggcgugcaccacccuccaaauaucgccgaccagaaaacgcuguaccauacugagaacgcuuacgucucugugguguccucacacuauagccgcaaguucacccccgaaauagcaaagcgaccuaaaguccgugaucaggaggggagaaucaauuacuauuggacacuucuggagccaggagacacuauuaucuuugaagccaacgguaauuugauugcuccgagguacgccuucgcgcucagucggggcuuugggucuggaaucauaaacuccaaugcacccaccgauaagugugacgccaaaugccagacaccucaaggcgcuauuaacagcucgcugccauuccagaauguucaucccgugaccaucggugaguguccuaaguauguacgcucugccaaauuaagaauggugacggggcugaggaacauuccauccauccagucacggggacucuuuggcgcaaucgcuggcuucauugaagggggauggacugguauggucgauggcugguacggguaucaccaccagaaugagcaaggaaguggcuacgccgcggaccagaaaagcacacagaacgccauaaaugguaucaccaacaaaguaaauuccguuauugaaaagaugaacacucaguuuacagcaguggggaaggaguucaacaaacuugagcgccgaauggaaaaucugaacaagaaagucgaugacggcuucaucgauauauggaccuacaaugcugaguugcuagugcugcucgaaaacgagagaacgcuggacuuucaugacucuaauguaaagaaccuuuaugaaaaaguuaagagccaacugaagaauaacgccaaagagauuggaaauggcugcuucgaguuuuaccacaaguguaacgaugaaugcauggagucagugaaaaaugggaccuaugacuaccccaaguauagugaagaguccaaauugaacagggagaagaucgauggagucaagcucgaaagcauggguguguaccagauccuggcuauuuauucuacagucgccucaaguuuagugcugcuaguuagccucggcgcaaucuccuucuggaugugcucuaaugggucgcugcagugucggauuugcauauga

SEQ ID NO: 140968 - RNA, 1701 nt, Artificial Sequence
  derived and/or modified CDS sequence (opt3) from hemagglutinin__InfluenzaA__AJJ99786
augaaggccauccuggugguccuccuuuacaccuucgcuacagcaaacgccgacacucugugcauuggcuaucacgcgaauaacagcacggauaccguugacacaguguuggagaaaaauguaacugugacccauuccgucaacuuacuggaagauaagcacaaugggaaacuauguaagcucagaggaguggcuccccugcaucuugguaaaugcaacauagccggcuggauccuggggaauccugagugugaaucuuugucaacagcaaguagcugguccuacauuguugagaccucuucgucagacaacggaacuugcuauccaggcgauuuuaucgacuacgaggagcucagggagcagcugagcaguguguccucuuucgaacgguuugagauuuucccgaagacaagcuccuggcccaaucacgauucaaacaagggugucaccgccgcuuguccucaugcaggggccaaaaguuuuuauaagaaucugaucuggcucgugaaaaagggaaacagcuacccaaaauuaucuaaguccuauauaaaugacaagggcaaagaaguacugguucuuuggggcauccaccaccccucaacgagcgcugaucaacagaguuuguaccagaacgccgacgcguacguguucgucgggacuucucgcuauuccaagaaauuuaagccugagauugcaauccgaccaaaagugcgugaucaggagggaagaaugaauuacuauuggacccugguggaacccggugacaagauuacauucgaggccacuggcaaccuagucguuccuagguacgcuuuugccauggaacgggaugcagggagcggaaucauaauuucggacaccccagugcaugacugcaacacaaccugucaaacgccgaaaggcgcuaucaauacuucucuccccuuccagaacauucacccuaucacaaucgguaagugcccaaaguauguaaaauccaccaagcugcgccuugccacugggcugagaaauauucccucaauacagaguaggggauuguuuggcgcgaucgccggcuucauugaagggggauggacagguaugguggauggcugguacggguaucaucaccagaacgaacaaggaagcggcuacgcagcugaccucaaauccacccagaaugccaucgaugagauaacgaacaaggucaauucugugauugagaaaaugaacacccaguuuacagcuguugguaaggaguucaaucaccuggaaaagcggaucgaaaacuuaaauaaaaagaucgacgauggguuccuggacauuuggacuuacaacgccgagcuccuugugcuguuggaaaaugagcgcacccuagauuaucaugacagcaacgucaaaaaucuguacgagaaggugcgaucacagcucaaaaacaacgcaaaggaaaucggcaauggauguuuugaguucuaucacaagugcgauaacacauguauggaaaguguaaagaauggcacuuacgacuauccuaaguacuccgaggaagccaaacugaacagagaggagauugaugggguuaaacuugaaagcaccaggauauaucaaauccuggcuauuuacucugcgguggcaucaaguuugguccucguggucagccugggagccaucuccuuuuggaugugcucuaaugguucguuacagugccggaucuguauuuga

SEQ ID NO: 140969 - RNA, 1698 nt, Artificial Sequence
  derived and/or modified CDS sequence (opt3) from hemagglutinin__InfluenzaA__AJJ99798
augaaggugaaacugcucguccuucugugcaccuucacagccacuuacgcugacacgaucuguauuggcuaucacgcaaacaauagcaccgauacaguugacacuguguuggagaagaacguaaccgugacacauuccgucaauuuacuggaaaacucucacaaugggaaacuaugccuccugaagggaauagcgccccuucagcuggguaacuguucaguggccggcuggaucuuggggaauccugagugcgaacuccugauuaguaaagagagcugguccuacaucguugaaagaccaaacccggagaauggaaccuguuaucccggccauuuugcugauuacgaggaacugagggagcaacucucuucggugagcucauucgaacgguuugagauuuucccuaaggagaguuccuggccaaaccacacugucacaggugugucugccagcugcucccauaauggggaaaacucauuuuaucgcaauuuacuguggcuuaccggaaagaacggcuuguaccccaaucugaguaaaagcuaugcaaacaacaaggagaaagaaguucuaguacucuggggcgugcaccacccuccaaauaucgccaaccagaagacgcuguaccauacugagaaugcuuacgucucugugguguccucacacuauagccgaaaauucacccccgaaauagcaaagcguccuaaggucagagaccaggaggggaggaucaacuacuauuggacacuucuggagccaggagauacuauuauguuugaagccaaugguaacuugaucgcuccgcgguacgccuucgcgcucagucgcggcuuugggucuggaauuaucaauuccaacgcacccauggacaaaugugaugccaagugccagaccccucaaggcgcuauaaauagcucgcugccauuccagaacguucaucccgugacaauuggugaguguccuaaauauguaagaucugccaaguuaaggauggugaccgggcugcggaauaucccauccauucagucacgcggacucuuuggcgcaaucgcuggcuucaucgaagggggauggacggguauggucgacggcugguacggguaucaccaccagaacgagcaaggaaguggcuacgccgcggaucagaaaagcacucagaaugccauuaacgguauaacaaauaaggugaacuccguuaucgaaaagaugaacacccaguuuacugcaguggggaaggaguucaauaaacuugagcgaagaauggaaaaccugaauaaaaaggucgacgauggcuucauugacaucuggacauacaacgcugaguugcuagugcugcucgaaaaugagaggacccuggauuuucaugacucuaacguuaaaaaucuuuaugaaaagguaaaaagccaacugaagaacaaugccaaggagauaggaaacggcugcuucgaguuuuaccacaaauguaaugacgaaugcauggagucagugaagaacgggacguaugauuaccccaaauauagugaagaguccaaguugaaucgggagaaaauugacggagucaagcucgaaagcauggguguguaccagauccuggcuaucuauucuaccgucgccucaaguuuagugcugcuaguuagccucggcgcaauuuccuucuggaugugcucuaacgggucgcugcagugucguaucugcauuuga

SEQ ID NO: 140970 - RNA, 1698 nt, Artificial Sequence; identical to SEQ ID NO: 130536
  derived and/or modified CDS sequence (opt3) from hemagglutinin__InfluenzaA__AJJ99810

SEQ ID NO: 140971 - RNA, 1698 nt, Artificial Sequence
  derived and/or modified CDS sequence (opt3) from hemagglutinin__InfluenzaA__AJJ99822
augaaggugaaacugcucguccuucugugcaccuucacagccacuuacgcugacacgaucuguauuggcuaucacgcaaacaauagcaccgauacaguugacacuguguuggagaagaacguaaccgugacacauuccgucaauuuacuggaaaacucucacaaugggaaacuaugccuccugaagggaauagcgccccuucagcuggguaacuguucaguggccggcuggaucuuggggaauccugagugcgaacuccugauuaguaaagagagcugguccuacaucguugaaaagccaaacccggagaauggaaccuguuaucccggccauuuugcugauuacgaggaacugagagagcaacucucuucggugagcucauucgaaagguuugagauuuucccuaaggagaguuccuggccaaaccacacugucacaggugugucugccagcugcucccauaauggggaaucaaguuuuuaucggaacuuacuguggcuuaccggaaagaauggcuuguaccccaaccugagcaagucuuaugcaaauaacaaagagaaggaaguucuaguacucuggggcgugcaccacccuccaaacaucggggaccagaaagcccuguaccauacggagaaugcuuacgucuccguggugucaagccacuauagucgcaaguucacucccgaaauagcaaagcgaccuaaaguccgugaucaggagggaagaaucaacuacuauuggacccuucuggagccaggugacacaauuaucuuugaagccaauggcaacuugauugcuccgagguacgccuucgcgcucucucggggguuuggauccggcaucauaaauagcaacgcacccauggauaagugugacgccaaaugccagacuccucaaggugcuauuaauucgucucugccauuccagaacguucaucccgugaccaucggggaguguccuaaguauguacgcuccgccaaauuaagaauggugacaggacugaggaauauuccauuuauccagucacggggccucuucggcgcaaucgcuggguuuauugaaggagguuggaccggcauggucgaugggugguacggauaucaccaccagaacgagcaaggcagugguuacgccgcggaccagaaaagcacgcagaaugccauaaacgggaucacuaauaaagugaacuccguuauugaaaagaugaauacacaguucaccgcagugggcaaggaguucaacaaacuugagcgccgaauggaaaaccugaauaagaaagucgaugacggauuuaucgauauauggacuuacaacgcugaguugcuagugcugcucgaaaaugagagaacacuggacuuccaugacucuaacguaaagaaucuuuaugaaaaaguuaagagccaacugaagaacaaugccaaagagauuggcaacgggugcuuugaguucuaccacaaguguaaugaugaaugcauggagucagugaaaaacggaaccuaugacuaccccaaguauagugaagaguccaaauugaauagggagaagaucgauggugucaagcucgaaagcaugggcguguaccagauccuggcuauuuauucuacggucgccucaaguuuagugcugcuaguuagccucggggcaaucuccuuuuggaugugcucuaacggaucgcugcagugucggauuugcauauga

SEQ ID NO: 140972 - RNA, 1701 nt, Artificial Sequence
  derived and/or modified CDS sequence (opt3) from hemagglutinin__InfluenzaA__AJJ99833
augaaggccauccugcucgugcuucuguacaccuucgcuacagcaaacgccgacacuuugugcauuggcuaucacgcgaauaacagcacggauaccgucgacacaguuuuagagaaaaaugugacuguaacccauuccgugaaccugcuagaagauaagcacaaugggaaacucuguaagcugagaggagucgcuccccuucaucuggguaaaugcaacauagccggcuggaucuuggggaauccugagugugaaucucucucaacagcaaguagcugguccuacauuguggagaccucuucgucagacaacggaacuugcuauccaggcgauuuuaucaauuacgaggagcugagggagcagcugagcaguguuuccucuuucgaacgguuugagauuuucccgaagacaagcuccuggcccaaccacgacucaaauaagggugugaccgccgcuuguccucgcgcaggggccaaaaguuuuuauaagaaccucaucugguuagucaaaaagggaaauagcuaccugaaacuuucuaaguccuauauaaacgauaagggcaaagaaguguugguacuguggggcauccaucacccaucaacgacugcugaccaacagagccuauaccagaaugccgaugcguacguuuucguggggaccagucgauauucuaagaaauuuaagcccgagauugcaauccguccuaaagucagagaccaggagggaaggaugaacuacuauuggacacucguggaaccaggugauaagauuacuuucgaggccaccggcaaccugcuugugccccgguacgcuuuugccauggaacgcaaugcaggguccggaaucauaauuagcgacacaccuguccacgauugcaacaccacgugucaaacuccaaaaggcgcuaucaauacaucgcugccguuccagaacauucaucccaucaccaucgguaagugcccuaaguauguuaaaucuacuaaguugagacucgccacagggcugaggaaugugccauccauucagucacggggauuauuuggcgcgauagccggcuucaucgaagggggauggaccgguaugguagacggcugguacggguaucaccaucagaacgaacaaggaaguggcuacgcagcugaccugaaaagcacgcagaaugccauugauaagaucaccaacaaagucaauuccgugauagagaagaugaacacacaguuuacugcuguggguaaggaguucaaucaccucgaaaaacgcauugagaaccuuaauaagaaaguugacgauggguuccuggacaucuggaccuacaacgccgaauugcuagugcugcucgagaaugaacgaacacuggauuaucacgacucuaacgucaagaaccuuuacgagaaagugagaaaucagcugaagaacaaugcaaaggagaucggcaacggauguuuugaguucuaucauaaaugcgauaauacuuguauggaaagcguaaagaacggcaccuacgacuaucccaaauacucagaagaggccaaguugaauagggaagagauugaugggguuaaacucgagaguacacggaucuaucaaauucuggcuauauacuccaccguggcgagcucuuuaguccugguggucucacuaggagcaaucaguuuuuggaugugcagcaacgguucccuccagugccguauuuguaucuga

SEQ ID NO: 140973 - RNA, 1701 nt, Artificial Sequence; identical to SEQ ID NO: 134872
  derived and/or modified CDS sequence (opt3) from hemagglutinin__InfluenzaA__AJJ99844

SEQ ID NO: 140974 - RNA, 1701 nt, Artificial Sequence
  derived and/or modified CDS sequence (opt3) from hemagglutinin__InfluenzaA__AJJ99855
augaaggccauccuggugguccuccuuuacaccuucgcuacagcaaacgccgacacucugugcauuggcuaucacgcgaauaacagcacggauaccguugacacaguguuggagaaaaauguaacugugacccauuccgucaacuuacuggaagauaagcacaaugggaaacuauguaagcucagaggaguggcuccccugcaucuugguaaaugcaacauagccggcuggauccuggggaauccugagugugaaucuuugucaacagcaaguagcugguccuacauuguugagaccucuucgucagacaacggaacuugcuauccaggcgauuuuaucgacuacgaggagcucagggagcagcugagcaguguguccucuuucgaacgguuugagauuuucccgaagacaagcuccuggcccaaucacgauucaaacaagggugucaccgccgcuuguccucaugcaggggccaaaaguuuuuauaagaaucugaucuggcucgugaaaaagggaaacagcuacccaaaauuaucuaaguccuauauaaaugacaagggcaaagaaguacugguucuuuggggcauccaccaccccucaacgacugcugaucaacagagcuuguaccagaacgccgacaccuacguguucgucgggacaagucgcuauucuaagaaauuuaagccugagauugcgauccgaccaaaagugcgugaucaggagggaagaaugaauuacuauuggacucugguggaacccggugacaagauuaccuucgaggcaacaggcaaccuagucguuccuagguacgccuuugcuauggaacggaacgccggguccggaaucauaauuagcgauaccccagugcaugacugcaauacgacuugucaaacaccgaaaggcgcaaucaacaccucgcuccccuuccagaauauucacccuaucacuaucgguaagugcccaaaguauguaaaaucuacaaagcugcgccuugcuaccgggcugagaaacgugcccuccauucagucaaggggauuguuuggcgccauagcgggcuucaucgaagggggauggacggguauggucgacggcugguacggguaucaucaccagaaugaacaaggaaguggcuacgccgcagaucucaaaagcacccagaacgcuauugacaagaucacaaauaaagugaacuccguuauagagaagaugaauacucaguuuaccgccguggguaaggaguucaaccaccuggaaaaacggauugagaauuuaaacaagaaagucgaugacggguuccuggauaucuggacauacaaugcugaacuccuugugcuguuggagaacgaacgcacucuagacuaucaugauucuaauguaaagaaccuguacgagaaaguucgaaaccagcucaagaauaacgccaaggagaucggcaauggauguuuugaguucuaucacaaaugcgacagcaccuguauggaaucagugaagaacggcacauacgauuauccuaaauacagugaagaggcaaagcugaauagagaagagauugacggggucaaacuugaguccaccaggaucuaucaaauucuggccauauacagcacuguggcuucuucauugguccucgugguuagucugggagcgaucagcuuuuggaugugcuccaacgguucuuuacagugccggauuuguaucuga

SEQ ID NO: 140975 - RNA, 1701 nt, Artificial Sequence
  derived and/or modified CDS sequence (opt3) from hemagglutinin__InfluenzaA__AJJ99866
augaaggccauccuggugguccuccuuuacaccuucgcuacagcaaacgccgacacucugugcauuggcuaucacgcgaauaacagcacggauaccguugacacaguguuggagaaaaauguaacugugacccauuccgucaacuuacuggaagauaagcacaaugggaaacuauguaagcucaaaggaguggcuccccugcaucuugguaagugcaacauagccggcuggauccuggggaauccugagugugaaucuuugucaacagcaaguagcugguccuacauuguugagaccucuucgucagacaacggaacuugcuauccaggcgauuuuaucgacuacgaggagcucagagagcagcugagcaguguguccucuuucgaaagguuugagauuuucccgaagacaagcuccuggcccaaucacgauucaaacaaaggugucaccgccgcuuguccucaugcaggggccaagaguuuuuauaaaaaucugaucuggcucgugaagaaaggaaacagcuacccaaaguuaucuaaguccuauauaaaugacaaaggcaaggaaguacugguucuuuggggcauccaccaccccucaacgagcgcugaucaacagaguuuguaccagaacgccgacgcguacguguucgucgggacuucucgguauuccaaaaaguuuaaaccugagauugcaauccgcccaaaggugcgagaucaggagggacguaugaauuacuauuggacccugguggaacccggugacaaaauuacauucgaggccacuggcaaccuagucguuccuagauacgcuuuugccauggaaaggaacgcagggagcggaaucauaauuucggauaccccagugcaugacugcaauacaaccugucaaacgccgaagggcgcuaucaacacuucucuccccuuccagaauauucacccuaucacaaucgguaagugcccaaaauauguaaaguccaccaaacugcggcuugccacugggcugcgcaacgugcccucaauucagaguagaggauuguuuggcgcgauagccggcuucaucgaagggggauggacagguauggucgacggcugguacggguaucaucaccagaaugaacaaggaagcggcuacgcagcugaucucaaguccacccagaacgccauugacgagaucacgaauaaagugaacucuguuauagagaagaugaauacccaguuuacagcuguggguaaggaauuuaaccaccuggagaaaaggauugaaaauuuaaacaagaaagucgaugacggguuccuggauaucuggacuuacaaugccgagcuccuugugcuguuggaaaacgagcggacccuagacuaucaugauagcaauguaaagaaccuguacgagaaaguucgcucacagcucaagaacaaugcaaaggaaaucggcaacggauguuucgaguucuaucacaaaugcgacaauacauguauggaaagugugaagaacggcacuuacgauuauccuaaauacuccgaggaagccaagcugaaucgagaggagauugacggggucaaacuugaaagcaccagaaucuaucaaauucuggcuauauacucuacaguggcgucaaguuugguccucgugguuagccugggagcaaucuccuuuuggaugugcucuaacgguucguuacagugcaggauuuguaucuga

SEQ ID NO: 140976 - RNA, 1701 nt, Artificial Sequence
  derived and/or modified CDS sequence (opt3) from hemagglutinin__InfluenzaA__AJJ99877
auggaggccauccuggugguccuccuuuacaccuucgcuacagcaaacgccgacacucugugcauuggcuaucacgcgaauaacagcacggauaccguugacacaguguuggaaaagaauguaacugugacccauuccgucaacuuacuggaggauaagcacaaugggaagcuauguaaacucagaggaguggcuccccugcaucuugguaagugcaacauagccggcuggauccuggggaauccugaaugugagucuuugucaacagcaaguagcugguccuacauuguugaaaccucuucgucagacaacggaacuugcuauccaggcgauuuuaucgacuacgaggagcucagggaacagcugagcaguguguccucuuucgagcgguuugaaauuuucccgaaaacaagcuccuggcccaaucacgauucaaacaagggugucaccgccgcuuguccucaugcaggggccaagaguuuuuauaaaaaucugaucuggcucgugaagaaaggaaacagcuacccaaaguuaucuaaauccuauauaaaugacaagggcaaggagguacugguucuuuggggcauccaccaccccucaacgagcgcugaucaacagaguuuguaccagaacgccgacgcguacguguucgucgggucuucccgcuauagcaaaaaguuuaaaccugagauugcaauccgaccaaaggugcgugaucaggaaggaagaaugaauuacuauuggacucugguggagcccggugacaaaauuaccuucgaagccacaggcaaccuagucguuccuagguacgcuuuugccauggagcggaacgcagggucgggaaucauaauuucugauacuccagugcaugacugcaauaccacaugucaaaccccgaagggcgcuaucaacacgucccuccccuuccacaauauucauccuaucacuaucgguaaaugcccaaaguauguaaagucaacaaaacugcgccuugccaccgggcugagaaacgugcccaguauucagagcaggggauuguuuggcgcgauagccggcuucaucgaagggggauggacugguauggucgacggcugguacggguaucaccaccagaaugagcagggauccggcuacgcagcugaucucaagucuacacaaaacgccauugacgagaucaccaauaaagugaacagcguuauagaaaagaugaauacgcaguuuaccgcuguggguaaagaguucaaccaucuggaaaagcggauugagaauuuaaacaagaaagucgaugacggguuccuggauaucuggacauacaaugccgaacuccuugugcuguuggagaacgagcgcacucuagacuaucacgauucaaauguacgaaaccuguacgaaaagguuagaagucagcucaaaaacaaugcaaaggagaucggcaacggauguuuugaguucuaucauaaaugcgacaauaccuguauggaauccgugaagaacggcacauacgauuauccuaaguacagcgaagaggccaaacugaauagggaggaaauugacggggucaaacuugagucuacucggaucuaucagauucuggcuauauacucaaccguggcgaguagcuugguccucgugguuucccugggagcaaucucuuuuuggaugugcucgaacgguagcuuacaaugccguauuuguaucuga

SEQ ID NO: 140977 - RNA, 1701 nt, Artificial Sequence
  derived and/or modified CDS sequence (opt3) from hemagglutinin__InfluenzaA__AJJ99888
augaaggccauccuggugguccuccuuuacaccuucgcuacagcaaacgccgacacucugugcauuggcuaucacgcgaauaacagcacggauaccguugacacaguguuggagaagaauguaacugugacccauuccgucaacuuacuggaagauaagcacaaugggaaacuauguaagcucagaggaguggcuccccugcaucuugguaaaugcaacauagccggcuggauccuggggaauccugagugugaaucuuugucaacagcaaguagcugguccuacauuguugagaccucuucgucagacaacggaacuugcuauccaggcgauuuuaucgacuacgaagaacucagggagcagcugagcaguguguccucuuucgaacgguuugagauuuucccgaagacaagcuccuggcccaaucacgauucaaacaagggugucaccgccgcuuguccucaugcaggggccaaaggauuuuauaagaaucugaucuggcucgugaaaaagggcaacaguuacccaaaauuaagcaagucuuauauaaaugacaagggcaaagaaguacugguucuuugggggauccaccaccccuccacgucagcugaucaacagagcuuguaccagaacgccgacgcguacguguucgucggaacuucccgcuauucuaagaaauuuaagccugagauugcaauccgaccaaaagugcgugaucaggaggguagaaugaauuacuauuggacccugguggaacccggcgacaagauuacauucgaggccacugggaaccuagucguuccuagguacgcuuuugccauggaacgggaugcaggauccggcaucauaauuagcgacaccccagugcaugacugcaacacaaccugucaaacgccgaaaggugcuaucaauacuucgcuccccuuccagaacauucacccuaucacaaucgggaagugcccaaaguauguaaaaucuaccaagcugcgccuugccacuggacugagaaaugugcccuccauucagucaaggggcuuguuuggcgcgauagccggguucaucgagggagguuggacaggcauggucgaugggugguacggauaucaucaccagaacgaacaaggcagugguuacgcagcugaccucaaaagcacccagaaugccauugaugagaucacgaacaaggugaauaguguuauagagaaaaugaacacccaguuuacagcuguggggaaggaguucaaucaccuggagaagcggauugaaaacuuaaauaaaaagaucgacgauggcuuccuggacaucuggacuuacaacgccgagcuccuuguccuguuggaaaaugagcgcacccuagauuaucaugacucuaacgugaaaaaucuguacgagaagguacgaagccagcucaaaaacaacgcaaaggaaauuggaaauggcuguuuugaguucuaucacaagugcgauaacacauguauggaaucaguuaaaaaugggacuuacgacuauccuaaguacagugaggaagccaaacugaacagagaggagaucgauggagugaaacuugaauccaccaggauuuaucaaauacuggcuaucuacagcacagucgcgucuucauuggugcucgucgugagucugggugcaauuagcuuuuggaugugcuccaauggcucuuuacagugccggaucuguaucuga

SEQ ID NO: 140978 - RNA, 1701 nt, Artificial Sequence
  derived and/or modified CDS sequence (opt3) from hemagglutinin__InfluenzaA__AJJ99899
augaaggccauccuggugguccuccuuuacaccuucgcuacagcaaacgccgacacucugugcauuggcuaucacgcgaauaacagcacggauaccguugacacaguguuggagaaaaauguaacugugacccauuccgucaacuuacuggaagauaagcacaaugggaaacuauguaagcucagaggaguggcuccccugcaucuugguaaaugcaacauagccggcuggauccuggggaauccugagugugaaucuuugucaacagcaaguagcugguccuacauuguugagaccucuucgucagacaacggaacuugcuauccaggcgauuuuaucaauuacgaggagcucagggagcagcugagcaguguguccucuuucgaacgguuugagauuuucccgaagacaagcuccuggcccaaccacgacucaaauaagggugucaccgccgcuuguccucgcgcaggggccaaaaguuuuuauaagaaccugaucuggcucgugaaaaagggaaauagcuacccaaacuuaucuaaauccuauauaaaugauaagggcaaggaaguacugguucuuuggggcauccaucaccccucaacgacugcugaccaacagagcuuguaccagaacgccgaugcguacguguucgucgggaccagucgauauucuaaaaaguuuaaaccugagauugcaauccguccaaaggugagagaccaggagggaaggaugaacuacuauuggacacugcuagaacccggugauaaaauuacuuucgaggccaccggcaaucuccuggugccucgguacgcuuuugccauggaacgcaacgcaggguccggaaucauaauuagcgacacaccaguccacgauugcaauaccacgugucaaacuccgaagggcgcuaucaacacaucgcuucccuuccagaauauucauccuaucaccaucgguaaaugcccaaaguauguuaagucuacuaaacugagauuggccacagggcucaggaacgugcccuccauucagucacggggacuguuuggcgcgauagccggcuucaucgaagggggauggaccgguaugguagacggcugguacggguaucaccaucagaauggacaaggcagugguuacgcagcugacuuaaagagcacgcagaacgccguggauaaaauuaccaauaaggucaacuccgugaucgaaaagaugaauacacaguuuacugcuguugggaaagaguucaaccaccuggagaagcgcauagaaaaucucaacaaaaagguggacgauggcuuccuugacauuuggaccuacaaugccgagcuguugguccuacuggaaaacgagcgaacacucgauuaucacgacucuaacgugaaaaaucuguacgaaaagguaagaaaccagcuuaaaaauaacgcaaaggagaucggaaauggcuguuuugaguucuaucauaagugcgauaacacuuguauggaaagcguuaaaaaugggaccuacgacuauccuaaguacucagaggaagccaaacugaacagggaggaaaucgauggagugaaguuggagaguacacggauuuaucaaauccucgcuauuuacuccaccgucgcgagcucucugguguuagucgugucacugggugcaauaaguuuuuggaugugcagcaauggcucccuacagugccguaucuguauuuga

SEQ ID NO: 140979 - RNA, 1701 nt, Artificial Sequence
  derived and/or modified CDS sequence (opt3) from hemagglutinin__InfluenzaA__AJJ99910
augaaggccauccuggugguccuccuuuacaccuucgcuacagcaaacgccgacacucugugcauuggcuaucacgcgaauaacagcacggauaccguugacacaguguuggagaaaaauguaacugugacccauuccgucaacuuacuggaagauaagcacaaugggaaacuauguaagcucagaggaguggcuccccugcaucuugguaaaugcaacauagccggcuggauccuggggaauccugagugugaaucuuugucaacagcaaguagcugguccuacauuguugagaccucuucgucagacaacggaacuugcuauccaggcgauuuuaucgacuacgaggagcucagggagcagcugagcaguguguccucuuucgaacgguuugagauuuucccgaagacaagcuccuggcccaaucacgauucagacaagggugucaccgccgcuuguccucaugcaggggccaaaaguuuuuauaagaaccugaucuggcucgugaaaaagggaaauagcuacccaaaauuaucuaaguccuauauaaacgauaagggcaaagaaguacugguucuuuggggcauccaccaccccucaacgacugcugaccaacagagcuuguaccagaaugccgauaccuacguguucgucgggacaagucgcuauucuaagaaauuuaagccugagauugcgauccgaccaaaagugcgugaccaggagggaagaaugaacuacuauuggacucugguggaacccggugauaagauuaccuucgaggcaacaggcaaucuagucguuccuagguacgccuuugcuauggaacggaacgccggguccggaaucauaauuagcgacaccccagugcaugacugcaacacgacuugucaaacaccgaaaggcgcaaucaauaccucgcuccccuuccagaacauucacccuaucacuaucgguaagugcccaaaguauguaaaaucuacaaagcugcgccuugcuaccgggcugagaaaugugcccuccauucagucaaggggauuguuuggcgccauagcgggcuucaucgaagggggauggacggguauggucgauggcugguacggguaucaucaccagaacgaacaaggaaguggcuacgccgcagaccucaaaagcacccagaaugcuauugauaagaucacaaacaaaguuaauuccgugauagagaagaugaacacucaguuuaccgccguggguaaggaguucaaucaccuggaaaaacggauugagaacuuaaauaagaaagucgacgauggguuccuggacaucuggacauacaacgcugaacuccuugugcuguuggagaaugaacgcacucuagauuaucaugacucuaacguaaagaaucuguacgagaaaguucgaaaccagcucaagaacaaugccaaggagaccggcaacggauguuuugaguucuaucacaaaugcgauaauacauguauggaaagcgugaagaacggcaccuacgacuauccuaaauacucagaagaggcaaagcugaauagagaaaagaucgauggggucaaacuugagaguacuaggauuuaucaaauccuggccauuuacuccacgguggcuagcucuuugguccucgugguuucacugggagcgauaaguuuuuggaugugcagcaacgguuccuuacagugccggaucuguauuuga

SEQ ID NO: 140980 - RNA, 1701 nt, Artificial Sequence; identical to SEQ ID NO: 134872
  derived and/or modified CDS sequence (opt3) from hemagglutinin__InfluenzaA__AJJ99921

SEQ ID NO: 140981 - RNA, 1701 nt, Artificial Sequence
  derived and/or modified CDS sequence (opt3) from hemagglutinin__InfluenzaA__AJJ99932
augaaggccauccuggugguccuccuuuacaccuucgcuacagcaaacgccgacacucugugcauuggcuaucacgcgaauaacagcacggauaccguugacacaguguuggagaaaaauguaacugugacccauuccgucaacuuacuggaagauaagcacaaugggaaacuauguaagcucagaggaguggcuccccugcaucuugguaaaugcgacauagccggcuggauccuggggaacccugagugugaaucuuugucaacagcaaguagcugguccuacauuguugagaccucuucgucagauaauggaacuugcuauccaggcgacuuuaucgauuacgaggagcucagggagcagcugagcaguguguccucuuucgaacgguuugagauuuucccgaagacaagcuccuggcccaaccacgacucaaauaagggugucaccgccgcuuguccucaugcaggggccaaaaguuuuuauaagaaccugaucuggcucgugaaaaagggaaauagcuacccaaaauuaucuaaguccuauauaaacgauaagggcaaagaaguacugguucuuuggggcauccaccaccccucaacgacugcugaccaacagagcuuguaccagaaugccgaugcguacguguucgucgggaccagucgcuauucuaagaaauuuaagccugagauugcaauccgaccaaaagugcgugaccaggagggaagaaugaacuacuauuggacacugguggaacccggugauaagauuacuuucgaggccaccggcaaucuagucguuccuagguacgcuuuugccauggaacggaacgcaggguccggaaucauaauuagcgacacaccagugcaugacugcaacaccacgugucaaacuccgaaaggcgcuaucaauacaucgcuccccuuccagaacauucacccuaucaccaucgguaagugcccaaaguauguaaaaucuacuaagcugcgccuugccacagggcugagaaaugugcccuccauucagucaaggggauuguuuggcgcgauagccggcuucaucgaagggggauggaccgguauggucgauggcugguacggguaucaucaccagaacgaacaaggaaguggcuacgcagcugaccucaaaagcacgcagaaugccauugauaagaucaccaacaaaguuaauuccgugauagagaagaugaacacacaguuuacugcuguggguaaggaguucaaucaccuggaaaaacggauugagaacuuaaauaagaaagucgacgauggguuccuggacaucuggaccuacaacgccgaacuccuugugcuguuggagaaugaacgcacacuagauuaucaugacucuaacguaaagaaucuguacgagaaaguucgaaaccagcucaagaacaaugcaaaggagaucggcaacggauguuuugaguucuaucacaaaugcgauaauacuuguauggaaagcgugaagaacggcaccuacgacuauccuaaauacucagaagaggccaagcugaauagagaagagauugauggggucaaacuugagaguacaaggaucuaucaaauucuggcuauauacuccaccguggcgagcucuuugguccucgugguuucacugggagcaaucaguuuuuggaugugcagcaacgguuccuuacagugccggauuuguaucuga

SEQ ID NO: 140982 - RNA, 1701 nt, Artificial Sequence; identical to SEQ ID NO: 134502
  derived and/or modified CDS sequence (opt3) from hemagglutinin__InfluenzaA__AJJ99943

SEQ ID NO: 140983 - RNA, 1701 nt, Artificial Sequence
  derived and/or modified CDS sequence (opt3) from hemagglutinin__InfluenzaA__AJJ99954
augaaggccauccuggugguccuccuuuacaccuucgcuacagcaaacgccgacacucugugcauuggcuaucacgcgaauaacagcacggauaccguugacacaguguuggagaaaaauguaacugugacccauuccgucaacuuacuggaagauaagcacaaugggaaacuauguaagcucagaggaguggcuccccugcaucuugguaaaugcaacauagccggcuggauccuggggaauccugagugugaaucuuugucaacagcaaguagcugguccuacauuguugagaccucuucgucagacaacggaacuugcuauccaggcgauuuuaucgacuacgaagaacucagggagcagcugagcaguguguccucuuucgaaaaguuugagauuuucccgaagacaagcuccuggcccaaucacgauucaaacaaaggugucaccgccgcuuguccucaugcaggggccaagaguuuuuauaaaaaucugaucuggcucgugaagaaaggaaacagcuacccaaaguuaucuaaguccuauauaaaugacaaaggcaaggaaguacugguucuuuggggcauccaccaccccucaacgagcgcugaucaacagaguuuguaccagaacgccgacgcguacguguucgucgggacuucucgguauuccaaaaaguuuaaaccugagauugcaauccgcccaaaggugcgagaucaggagggacguaugaauuacuauuggacccugguggaacccggugacaaaauuacauucgaggccacuggcaaccuagucguuccuagauacgcuuuugccauggaaaggaacgcagggagcggaaucauaaccucggauacaccagugcaugacugcaauaccacgugucaaacuccgaagggcgcuauuaacacaucucuccccuuccagaauauccacccuauuaccaucgguaacugcccaaaguauguaaaauccacuaagcugcggcuugccacagggcugcgcaaugugcccucaauccagaguagaggauuguuuggcgcgauugccggcuucauagaagggggauggaccgguauggucgacggcugguacggguaucaucaccagaacgaacaaggaagcggcuacgcagcugaucucaaauccacgcagaaugccaucgacaagauuaccaacaaaguuaauucugugaucgagaagaugaacacacaguuuacugcuguggguaaggaguucaaucaccuggagaaaaggauagagaacuuaaauaagaaagucgaugacggguuccuggauauuuggaccuacaacgccgaacuccuugugcuguuggagaaugaacggacacuagacuaucaugauagcaacguaaagaaccuguacgagaaaguucgcucacagcucaagaauaacgcaaaggagaucggcaauggauguuuugaguucuaucacaaaugcgacaacacuuguauggagagugugaagaauggcaccuacgauuauccuaaauacuccgaagaggccaagcugaaccgagaagagaucgacggggucaaacuugagagcacaagaauuuaucaaauccuggcuauuuacucuaccguggcgucaaguuugguccucgugguuagccugggagcaauauccuuuuggaugugcucuaaugguucguuacagugcaggaucuguauuuga

SEQ ID NO: 140984 - RNA, 1701 nt, Artificial Sequence; identical to SEQ ID NO: 130959
  derived and/or modified CDS sequence (opt3) from hemagglutinin__InfluenzaA__AJJ99965

SEQ ID NO: 140985 - RNA, 1698 nt, Artificial Sequence
  derived and/or modified CDS sequence (opt3) from hemagglutinin__InfluenzaA__AJJ99989
augaaggugaaacugcucguccuucugugcaccuucacagccacuuacgcugacacgaucuguauuggcuaucacgcaaacaauagcaccgauacaguugacacuguguuggagagaaacguaaccgugacacauuccgucaauuuacuggaaaacucucacaaugggaagcuaugccuccugaaaggaauagcgccccuucagcuggguaacuguucaguggccggcuggaucuuggggaauccugagugcgaacuccugauuaguaaggagagcugguccuacaucguugaaaaaccaaacccggagaauggaaccuguuaucccggccauuuugcugauuacgaggaacugagggagcaacucucuucggugagcucauucgaacgguuugagauuuucccuaaggagaguuccuggccaaaccacacugucacaggugugucugccagcugcucccauaauggggaaucaaguuuuuaucgcaacuuacuguggcuuaccggaaagaauggcuuguaccccaaccugagcaaaucuuaugcaaauaacaaggagaaagaaguucuaguacucuggggcgugcaccacccuccaaacaucggggaccagaaggcccuguaccauacggagaaugcuuacgucuccguggugucaagccacuauaguaaaaaguucacucccgaaauagcaaagcgaccuaaaguccgugaucaggagggaagaaucaacuacuauuggacccuucuggagccaggugacacaauuaucuuugaagccaauggcaacuugauugcuccgagguacgccuucgcgcucucucggggguuuggauccggcaucauaaauagcaacgcacccauggauaagugugacgccaaaugccagacuccucaaggugcuauuaauucgucucugccauuccagaacguucaucccgugaccaucggggaguguccuaaguauguacgcuccgccaaauuaagaauggugacaggacugaggaauauuccaucaauccagagucggggccucuuuggcgcaaucgcuggguucauugaaggagguuggaccggcauggucgaugggugguacggauaucaccaccagaacgagcaaggcagcgguuacgccgcggaccagcgcuccacgcagaaugccauaaacgggaucacuaauaaggugaacucuguuauugaaaagaugaauacacaguuuaccgcagugggcaaggaguucaacaaacuugagcgaagaauggaaaaccugaauaaaaaggucgaugacggauucaucgauauauggacuuacaacgcugaguugcuagugcugcucgaaaaugagaggacacuggacuuucaugacagcaacguuaaaaaucuuuaugaaaagguaaaaucacaacugaagaacaaugccaaggagauuggcaacgggugcuucgaguuuuaccacaaauguaaugaugaaugcauggagagugugaagaacggaaccuaugacuaccccaaauauuccgaagagagcaaguugaaucgggagaaaaucgauggugucaagcucgaaucuaugggcguguaccagauccuggcuauuuauucaacggucgccaguagcuuagugcugcuaguuucccucggggcaaucucuuucuggaugugcucgaacggaagccugcagugucguauuugcauauga

SEQ ID NO: 140986 - RNA, 1701 nt, Artificial Sequence
  derived and/or modified CDS sequence (opt3) from hemagglutinin__InfluenzaA__AJK00001
augaaggccauccuggugguccuccuuuacaccuucgcuacagcaaacgccgacacucugugcauuggcuaucacgcgaauaacagcacggauaccguugacacaguguuggagaaaaauguaacugugacccauuccgucaacuuacuggaagauaagcacaaugggaaacuauguaagcucagaggaguggcuccccugcaucuugguaaaugcaacauagccggcuggauccuggggaauccugagugugaaucuuugucaacagcaaguagcugguccuacauuguugagaccucuucgucagacaacggaacuugcuauccaggcgauuuuaucaauuacgaagaacucagggagcagcugagcaguguguccucuuucgaacgguuugagauuuucccgaagacaagcuccuggcccaaccacgacucaaauaagggugucaccgccgcuuguccucgcgcaggggaaaagaguuuuuauaagaaccugaucuggcucgugaaaaagggaaauagcuacccaaaauuaucuaaguccuauauaaacgauaagggcaaagagguacugguucuuuggggcauccaucaccccucaacgacugccgaccaacagagcuuguaccagaaugcugaugccuacguguucgucgggaccagucgauauucuaagaaauuuaagccugagauugcgauccguccaaaagugagagaccaggaaggaaggaugaacuacuauuggacacugguggagcccggugauaagauuacuuucgaagcaaccggcaaccuacucgucccucgguacgccuuugcuauggagcgcaaugccggguccggaaucauaauuagcgacacaccaguucacgauugcaacaccacgugucaaacuccgaaaggcgcaaucaauacaucgcugcccuuccagaacauucauccuaucaccaucgguaagugcccaaaguaugugaaaucuacuaaacuuagacuggcuacaggguugaggaauguacccuccauucagucacggggacucuuuggcgccauagcgggcuucaucgaagggggauggaccgguaugguggacggcugguacggguaucaccaucagaacgagcaaggaaguggcuacgccgcagaccugaaaagcacgcagaaugcuauugauaagaucaccaacaaagucaauuccgugauagagaagaugaacacacaguuuacugccguugguaaggaguucaaucacuuagagaaacgcauugaaaaccugaauaagaaaguggacgauggguuccucgacaucuggaccuacaacgcugagcuucuggucuugcuagaaaaugagcgaacacuggauuaucacgacucuaacgugaagaaccucuacgagaaaguaagaaaucagcugaagaacaaugccaaggaaaucggcaacggauguuuugaguucuaucauaaaugcgauaauacuuguauggaaagcguuaagaacggcaccuacgacuauccuaaauacucagaggaagcaaaacuuaauagggagaagauugauggggugaagcuggagaguacacggaucuaucaaauuuuggccauauacuccaccgucgcuagcucucucgugcuggucgugucauuaggagcgaucaguuuuuggaugugcagcaacgguucccugcagugccguauuuguaucuga

SEQ ID NO: 140987 - RNA, 1701 nt, Artificial Sequence
  derived and/or modified CDS sequence (opt3) from hemagglutinin__InfluenzaA__AJK00012
augaaggccauccuggugguccuccuuugcaccuucgcuacagcaaacgccgacacucuguguauuggcuaccacgcgaauaacagcacggauaccguugacacaguguuggagaaaaauguaacugugacccauuccgucaacuuacuggaagauaagcacaaugggaaacuaugcaagcucagaggaguggcuccccugcaucuugguaaauguaacauagccggcuggauccuggggaauccugagugcgaaucuuugucaacagcaaguagcugguccuauauuguugagaccucuucgucagacaacggaacuuguuacccaggcgauuuuaucgacuaugaagaacucagggagcagcugagcaguguguccucuuucgaacgguuugagauuuucccgaagacaagcuccuggcccaaucacgauucaaacaagggugucaccgccgcuugcccucaugcaggggccaaaggauuuuacaagaaucugaucuggcucgugaaaaagggcaacaguuauccaaaauuaagcaagucuuacauaaaugacaagggcaaagaaguacugguucuuugggggauccaccaccccuccacgacugcugaucaacagucauuguaucagaacgccgacaccuacguguucgucggaacaagccgcuacaguaagaaauuuaagccugagauugcgauccgaccaaaagugcgugaucaggaggguagaaugaauuauuacuggacucugguggaacccggcgacaagauuaccuucgaggcaacagggaaccuagucguuccuagguaugccuuugcuauggaacggaacgccggaucuggcaucauaauuuccgauaccacggugcaugacuguaauacuacaugccaaaccccaaaaggugcaaucaacacuagccucccguuccagaauauucaccccaucacaaucgggaaguguccuaaguacguaaaaucgaccaagcugcgccuugcuacgggacugagaaacgugccaucuauucaguccaggggcuuguuuggcgccauagcgggguucaucgagggagguuggaccggcauggucgacgggugguauggauaccaucaccagaaugaacaaggcucagguuaugccgcagaucucaaaaguacacagaacgcuauugacaagaucacuaauaaagugaacagcguuauagagaagaugaauacccaguuuacagccguggggaaggaguucaaccaccuggaaaaacggauugagaauuuaaacaagaaagucgaugacggcuuccuggauaucuggacuuacaaugcugaacuccuugugcuguuggagaacgaacgcacccuagacuaccaugauuccaauguaaagaaccuguaugagaaaguucgaaaccagcucaagaauaacgccaaggagaucggagacggcugcuuugaguucuaccacaaaugugauaauacaugcauggagucugugaagaacgggaccuaugacuaccccaaauauagcgaagaggcaaagcugaauagagaaaagauugauggagucaaacuugagucaacuaggaucuaccaaauucuggccauauauaguacgguggcuuccagcuugguccucgugguuucucugggugcgaucucauuuuggaugugcaguaacggcagcuuacagugucggauuugcaucuga

SEQ ID NO: 140988 - RNA, 1701 nt, Artificial Sequence
  derived and/or modified CDS sequence (opt3) from hemagglutinin__InfluenzaA__AJK00023
augaaggccauccuggugguccuccuuuacaccuucgcuacagcaaacgccgacacucugugcauuggcuaucacgcgaauaacagcacggauaccguugacacaguguuggagaaaaauguaacugugacccauuccgucaacuuacuggaagauaagcacaaugggaaacuauguaagcucagaggaguggcuccccugcaucuugguaaaugcaacauagccggcuggauccuggggaauccugagugugaaucuuugucaacagcaaguagcugguccuacauuguugagaccucuucgucagacaacggaacuugcuauccaggcgauuuuaucaauuacgaggagcucagggagcagcugagcaguguguccucuuucgaacgguuugagauuuucccgaagacaagcuccuggcccaaccacgacucaaauaagggugucaccgccgcuuguccucgcgcaggggccaaaaguuuuuauaagaaccugaucuggcucgugaaaaagggaaauagcuacccaaaauuaucuaaguccuauauaaacgauaagggcaaagaaguacugguucuuuggggcauccaucaccccucaacgacugcugaccaacagagcuuguaccagaaugccgaugcguacguguucgucgggaccagucgauauucuaagaaauuuaagccugagauugcaauccguccaaaagugagagaccaggagggaaggaugaacuacuauuggacacugguggaacccggugauaagauuacuuucgaggccaccggcaaccuacucgucccucgguacgcuuuugccauggaacgcaaugcaggguccggaaucauaauuagcgacacaccaguucacgauugcaacaccacgugucaaacuccgaaaggcgcuaucaauacaucgcugcccuuccagaacauucauccuaucaccaucgguaagugcccaaaguaugugaaaucuacuaagcugagacuugccacaggguugaggaauguacccuccauucagucacggggacucuuuggcgcgauagccggcuucaucgaagggggauggaccgguaugguggacggcugguacggguaucaccaucagaacgaacaaggaaguggcuacgcagcugaccugaaaagcacgcagaaugccauugauaagaucaccaacaaagucaauuccgugauagagaagaugaacacacaguuuacugcuguugguaaggaguucaaucacuuagaaaaacgcauugagaaccugaauaagaaaguggacgauggguuccucgacaucuggaccuacaacgccgaacuucuggucuugcuagagaaugaacgaacacuggauuaucacgacucuaacgugaagaaccucuacgagaaaguaagaaaucagcugaagaacaaugcaaaggagaucggcaacggauguuuugaguucuaucauaaaugcgauaauacuuguauggaaagcguuaagaacggcaccuacgacuauccuaaauacucagaagaggccaaacuuaauagggaagagauugauggggugaagcuggagaguacacggaucuaucaaauuuuggcuauauacuccaccgucgcgagcucucucgugcuggucgugucauuaggagcaaucaguuuuuggaugugcagcaacgguucccugcagugccguauuuguaucuga

SEQ ID NO: 140989 - RNA, 1701 nt, Artificial Sequence; identical to SEQ ID NO: 134872
  derived and/or modified CDS sequence (opt3) from hemagglutinin__InfluenzaA__AJK00034

SEQ ID NO: 140990 - RNA, 1701 nt, Artificial Sequence; identical to SEQ ID NO: 135090
  derived and/or modified CDS sequence (opt3) from hemagglutinin__InfluenzaA__AJK00045

SEQ ID NO: 140991 - RNA, 1701 nt, Artificial Sequence; identical to SEQ ID NO: 135090
  derived and/or modified CDS sequence (opt3) from hemagglutinin__InfluenzaA__AJK00056

SEQ ID NO: 140992 - RNA, 1701 nt, Artificial Sequence; identical to SEQ ID NO: 130959
  derived and/or modified CDS sequence (opt3) from hemagglutinin__InfluenzaA__AJK00067

SEQ ID NO: 140993 - RNA, 1698 nt, Artificial Sequence
  derived and/or modified CDS sequence (opt3) from hemagglutinin__InfluenzaA__AJK00079
augaaggugaaacugcucguccuucugugcaccuucacagccacuuacgcugacacgaucuguauuggcuaucacgcaaacaauagcaccgauacaguugacacuguguuggagaagaacguaaccgugacacauuccgucaauuuacuggaaaacucucacaaugggaaacuaugccuccugaagggaauagcgccccuucagcuggguaacuguucaguggccggcuggaucuuggggaauccugagugcgaacuccugauuaguaaagagagcugguccuacaucguugaaaagccaaacccggagaauggaaccuguuaucccggccauuuugcugauuacgaggaacugagagagcaacucucuucggugagcagcuucgaaagguuugagauuuucccuaaggagaguuccuggccaaaccacacugucacaggugugucugccagcugcucccauaauggggaaaacucauuuuaucggaauuuacuguggcuuacccgcaaaaacggauuguaccccaaucugaguaagagcuaugcaaacaacaaagagaaggaagugcuaguucucuggggcgugcaccacccuccaaauaucgccgaccagaaaacgcuguaccauacugagaacgcuuacgucucugugguguccucacacuauagccgaaaguucacccccgaaauagcaaagcguccuaaagucagagaucaggagggcaggaucaauuacuauuggacacuucuggagccaggggacacuauuaucuuugaagccaacggaaauuugauugcuccgcgguacgccuucgcgcucagucgcgguuuuggcucugggaucauaaacuccaaugcacccauggauaagugugacgccaaaugccagaccccucaaggagcuauuaacagcucgcugccauuccagaauguucaucccgugacaaucggcgaguguccuaaguauguaagaucugccaaauuaaggauggugaccggucugcggaacauuccauccauccagucacgcgggcucuuuggagcaaucgcuggcuucauugaaggcggguggacgggaauggucgaugguugguacggcuaucaccaccagaaugagcaagggaguggauacgccgcggaccagaagucaacucagaacgccauaaauggcaucacaaacaaaguaaauuccguuauugaaaagaugaacacccaguuuacugcaguggguaaggaguucaacaaacuugagcgaagaauggaaaaucugaacaagaaagucgaugacggguucaucgauauauggacauacaaugcugaguugcuagugcugcucgaaaacgagaggacccuggacuuucaugacucuaauguaaagaaccuuuaugaaaaaguuaagagccaacugaagaauaacgccaaagagauuggcaauggaugcuucgaguuuuaccacaaguguaacgaugaaugcauggagucagugaaaaauggcacguaugacuaccccaaguauagugaagaguccaaauugaaccgggagaagaucgauggggucaagcucgaaagcaugggaguguaccagauccuggcuauuuauucuaccgucgccucaaguuuagugcugcuaguuagccucggugcaaucuccuucuggaugugcucuaauggcucgcugcagugucguauuugcauauga

SEQ ID NO: 140994 - RNA, 1698 nt, Artificial Sequence
  derived and/or modified CDS sequence (opt3) from hemagglutinin__InfluenzaA__AJK00091
augaaggugaaacugcucguccuucugugcaccuucacagccacuuacgcugacacgaucuguauuggcuaucacgcaaacaauagcaccgauacaguugacacuguguuggagaagaacguaaccgugacacauuccgucaauuuacuggaaaacucucacaaugggaaacuaugccuccugaagggaauagcgccccuucagcuggguaacuguucaguggccggcuggaucuuggggaauccugagugcgaacuccugauuaguaaagagagcugguccuacaucguugaaaagccaaacccggagaauggaaccuguuaucccggccauuuugcugauuacgaggaacugagagagcaacucucuucggugagcucauucgaaagguuugagauuuucccuaaggagaguuccuggccaaaccacacuaucacaggugucucugccagcugcucccauaauggggaaucaaguuuuuaucggaacuuacuguggcuuaccggcaaaaauggauuguaccccaaccugagcaagucuuaugcaaauaacaaagagaaggaagugcuaguacucuggggcguucaccacccuccaaacauaggggugcagaaagcccuguaccauacggagaaugcuuacgucuccguggugucaagccacuauagucgcaaguucacucccgaaaucgcaaagcgaccuaaaguccgugaccaggagggaagaauuaacuacuauuggacccuucuggagccaggugauacaaucauuuuugaagccaauggcaacuugaucgcuccgagguacgccuucgcgcucucucggggguuuggauccggcauaauuaauagcaacgcacccauggacaagugugaugccaaaugccagacuccucaaggugcuaucaauucgucucugccauuccagaacguucaucccgugaccauuggggaguguccuaaguauguacgcuccgccaaauuaagaauggugacaggacugaggaauaucccaucaauccagagucggggccucuuuggcgcaauugcuggguucauagaaggagguuggaccggcauggucgacgggugguacggauaucaccaccagaacgagcaaggcagcgguuacgccgcggaucagaaguccacgcagaaugccaucaacgggauuacuaauaaagugaacucuguuaucgaaaagaugaauacacaguuuaccgcagugggcaaggaguucaacaaacuugagcgccgaauggaaaaccugaauaagaaagucgacgauggauucauagacauuuggacuuacaacgcugaguugcuagugcugcucgaaaaugagagaacacuggauuuucaugacagcaacguaaagaaucuuuaugaaaaaguuaagucacaacugaagaacaaugccaaagagaucggcaacgggugcuucgaguuuuaccacaaguguaaugacgaaugcauggagagugugaaaaacggaaccuaugauuaccccaaguauuccgaagagagcaaauugaauagggagaagaucgacggugucaagcucgaaucuaugggcguguaccagauucuggcuaucuauucaacggucgccaguagcuuagugcugcuaguuucccucggggcagugucuuucuggaugugcucgaacggaagccugcagugucggguaugcauuuga

SEQ ID NO: 140995 - RNA, 1698 nt, Artificial Sequence; identical to SEQ ID NO: 130536
  derived and/or modified CDS sequence (opt3) from hemagglutinin__InfluenzaA__AJK00103

SEQ ID NO: 140996 - RNA, 1701 nt, Artificial Sequence; identical to SEQ ID NO: 134968
  derived and/or modified CDS sequence (opt3) from hemagglutinin__InfluenzaA__AJK00114

SEQ ID NO: 140997 - RNA, 1701 nt, Artificial Sequence
  derived and/or modified CDS sequence (opt3) from hemagglutinin__InfluenzaA__AJK00125
augaaggccauccuggugguccuccuuuacaccuucgcuacagcaaacgccgacacucugugcauuggcuaucacgcgaauaacagcacggauaccguugacacaguguuggagaaaaauguaacugugacccauuccgucaacuuacuggaagauaagcacaaugggaaacuauguaagcucagagagguggcuccccugcaucuuggaaaaugcaacauagccgguuggauccugggcaauccugaaugugagucuuugucaacagcaaguagcugguccuacauuguugaaaccucuucgucagacaacgggacuugcuauccaggagauuuuaucgacuacgaggagcucagggaacagcugagcaguguguccucuuucgagcgguuugaaauuuucccgaagacaaauagcuggcccaaccacgauuccaauaagggcgucaccgccgcuuguccucaugccggugcaaaaucauuuuauaagaaccugaucuggcucgugaaaaaggggaauaguuacccaaaauuaagcaagucuuauauaaacgacaagggaaaagagguacugguucuuuggggcauccaccaccccuccacgucagcugaucaacagagcuuguaccagaaugccgacgcguacguguucgucggcaccagucgcuauucuaagaaauuuaagccugagauugcaauccgaccaaaagugcgugaucaggaagggagaaugaacuacuauuggacucugguggagcccggagacaagauuacauucgaagccacugguaaccuagucguuccuagguacgcuuuugccauggagcggaaugcaggcuccgggaucauaauuagcgauaccccaguguaugacugcaacacaaccugucaaacgccgaaaggagcuaucaauacuucgcuccccuuccagaacauucauccuaucacaaucggcaagugcccaaaguacguaaaaucuaccaagcugcgccuugccacuggucugagaaaugugcccuccauucagucaaggggguuguuuggagcgauagccggcuucaucgaaggcggguggacaggaauggucgacgguugguauggcuaccaccaucagaacgagcaagggaguggauacgcagcugaucucaaaagcacccagaaugccauugacgagaucacgaacaagguaaauuccguuauagaaaagaugaacacccaguuuacagcugugggcaaagaguucaaucaccuggaaaagcggauugagaacuuaaauaaaaaggucgaugacgguuuccuggauaucuggacuuauaacgccgaacuccuugugcuguuggagaaugagcgcacccuagacuaccacgauucuaacgugaaaaaccuguaugaaaagguucgaagccagcucaaaaauaacgcaaaggagaucgggaauggcuguuuugaguucuaccauaagugcgacaacacauguauggaaucagugaaaaauggaacuuaugauuacccuaaguauagugaagaggccaaacugaacagagagaagauugacggcgucaaacuugaauccaccaggaucuaccaaauucuggcuauauacagcacaguggcgucuucauugguccucgugguuagucugggggcaaucagcuuuuggaugugcuccaauggaucuuuacagugccggauuuguaucuga

SEQ ID NO: 140998 - RNA, 1701 nt, Artificial Sequence; identical to SEQ ID NO: 130717
  derived and/or modified CDS sequence (opt3) from hemagglutinin__InfluenzaA__AJK00136

SEQ ID NO: 140999 - RNA, 1704 nt, Artificial Sequence
  derived and/or modified CDS sequence (opt3) from hemagglutinin__InfluenzaA__AJK00166
auggagaagaucgugcugcuccuugccauugucagccugguuaaauccgaccagauaugcaucggcuaccacgcuaacaauucuaccgaacaaguggauacaauuauggagaagaacguaacugugacgcaugcacaggacaucuuggaaaagacccacaaugggaaguuaugugaucuggacggagucaaaccccuaauucucagagauugcucaguggccgguuggcugcuuggcaacccuaugugugacgaguucaucaauguuccagaauggaguuauauaguggagaaggcgaacccggcuaaugaucugugcuaccccgggaacuuuaaugacuaugaggaauugaagcaucuccugagcaggaucaaccacuucgagaaaauucagaucauuccuaaguccucuuggucggaucaugaagccucaagcggagucaguuccgcauguccauaccagggcaaacccagcuuuuuccggaaugugguauggcugaucaagaaaaacaauacauauccuacuauaaagcgcucuuacaacaauaccaaccaagaggaccucuuaauucugugggguauccaccacuccaacgaugccgcugagcagacaaaacuuuaucagaauccaaccacuuacauuucaguugggacaaguaccuugaaccagcgacuggugcccaaaaucgcaacgcguagcaaggucaauggacaaucuggcagaauggacuuuuucuggacuauccuaaaaccuaacgaugccauuaauuuugaauccaacggcaauuucauagcuccagaguacgccuauaagaucgugaaaaagggggacucagcgauuaugaaaagcgaaguggaguacggaaacugcaauaccaagugucagacaccgaucggugcaauaaacaguucuaugcccuuucauaauauucacccucucacuaucggcgaaugcccaaaguaugucaaauccaacaagcugguucuugccaccgggcugaggaauagccccuugcgggagcgcagaaggaaacggggacucuucggcgcuaucgccgguuuuauugaagggggauggcagggcaugguggacggcugguacggguaucaucacucgaacgaacagggaucugguuacgcagcugauaaggaguccacacaaaaagccaucgacggcguaaccaauaaggugaacucaauuauagauaagaugaacacgcaguucgaagcggucgggcgcgaguuuaauaaccuggaacgaagaaucgagaauuuaaacaaaaagauggaggacggauuccuggauguguggacuuauaaugccgaacuccuuguucugauggagaacgaaaggacauuggacuuccacgauaguaaugugaaaaaccuauacgacaagguccggcugcagcuccgugauaaugcaaaagagcugggcaacgguuguuuugaguucuaccauaagugcgacaaugaguguauggagagcgugcgcaacgggaccuaugauuacccucaauauuccgaagaggcuagacuuaagagggaagagauuucuggcguaaaacuggagagcaucggaacuuaccagaucuugucaauuuauaguacaguugccuccagccucgcucuggccauaaugguggcaggcuuaucucuguggaugugcucaaaugggagucuacagugccggaucuguauuuga

SEQ ID NO: 141000 - RNA, 1707 nt, Artificial Sequence
  derived and/or modified CDS sequence (opt3) from hemagglutinin__InfluenzaA__AJK00177
auggagaagaucgugcugcuccuugccgucguuagccuggugagauccgaccagauuugcauaggcuaccacgcuaacaauucuaccgaacaaguagauacaaucauggagaaaaacgugacugucacgcaugcacaggacauuuuggaaaagacccacaaugggaaauuaugugaucuggacggagugaagccccuaauccucagggauugcucaguugccgguuggcugcuuggcaacccuaugugugacgaguucauuaaugugccagaauggaguuauaucgucgagaaagcgaacccggcuaaugaucugugcuaccccgggaacuugaaugacuaugaggaacucaagcaucugcugagccggauaaaccacuuugagaagauccagauuaucccuaaauccucuuggucggaucaugaagccucacucggagugagcagugcauguccauaccagggcacacccuccuucuuucgcaauguaguuugguuaauuaagaaaaacaauacuuauccuaccaucaagcgaucuuacaacaauacaaaccaagaggaccugcuuauauugugggguauucaccacagcaacgaugaggccgaacagaucaaacuguaucagaauccaaccacuuacguguccgucgggacaucaacccuaaaccagcgucucgugcccaagauugcuacgagaaguaaggugaauggacaaagcggcaggauggacuucuuuuggacuauccugaaaccugaugacgcaaucaacuucgagucuaauggcaacuuuauugccccagaauacgcuuauaagauagucaaaaagggggacuccgccaucaugaaaucagagguugaauacggaaauugcaacaccaagugucagacaccgauuggugcgaucaauagcaguaugcccuuccauaacauacacccucuuacuauuggcgagugcccaaaauaugugaagucuaauaagcugguauuggcaaccgggcuccggaacagcccccugcgcgagaaaagaaggcggaagcgcggauuauuuggcgccaucgcugguuucaucgaagggggauggcagggcaugguggauggcugguacggguaucaucacuccaaugagcagggaucggguuacgccgcagacaaagaaucuacacaaaaggcuauugauggcgucaccaacaaaguuaauuccaucauugacaagaugaacacgcaguuugaggccguggggcgagaguucaacaaucuggaaagaaggauagagaaccucaauaagaaaauggaagauggauuucuugacguguggacuuauaacgcggagcuguugguccuaauggaaaaugagcggacacuggauuuccacgacucaaacgugaagaaucucuacgauaaaguacgucugcagcuucgcgacaacgccaaggaacugggcaaugguuguuucgaguuuuaccauaaaugcgauaacgaguguauggaaaguguuagaaaugggaccuaugacuacccucaauauagcgaggaagcaagguugaagcgggaggagaucuccggcgugaagcucgaaucuauuggaaucuaccagauccugagcauuuauucaacugucgcuaguuccuuagcccuggcuauaaugguggccggccuaagccucuggaugugcucuaacgggucacugcagugccgaaucuguauuuga

SEQ ID NO: 141001 - RNA, 1704 nt, Artificial Sequence
  derived and/or modified CDS sequence (opt3) from hemagglutinin__InfluenzaA__AJK00188
auggagaagaucgugcugcuccuugccgucguuagccuggugagauccgaccagauuugcauaggcuaccacgcuaacaauucuaccgaacaaguagauacaaucauggagaaaaacgugacugucacgcaugcacaggacauuuuggaaaagacccacaaugggaaauuaugugaucuggacggagugaagccccuaauccucagggauugcucaguugccgguuggcugcuuggcaacccuaugugugacgaguucauuaaugugccagaauggaguuauaucgucgagaaagcgaacccggcuaaugaucugugcuaccccgggaacuugaaugacuaugaggaacucaagcaucugcugagccggauaaaccacuuugagaagauccagauuaucccuaaauccucuuggucggaucaugaagccucacucggagugagcagugcauguccauaccagggcacacccuccuucuuucgcaauguaguuugguuaauuaagaaaaacaauacuuauccuaccaucaagcgaucuuacaacaauacaaaccaagaggaccugcuuauauugugggguauucaccacagcaacgaugaggccgaacagaucaaacuguaucagaauccaaccacuuacauuuccguggggacaucaacccuaaaccagcgucucguccccaagaucgcuacgagaaguaaggugaauggacaaagcggcaggauggacuucuuuuggacuauccugaaaccugaugacgcaauuaacuucgagucuaauggcaacuuuauagccccagaauacgcuuauaagaucgugaaaaagggggacuccgccauuaugaaaucagaggucgaauacggaaauugcaacaccaagugucagacaccgaucggugcgauaaauagcaguaugcccuuccauaacauucacccucuuacuaucggcgagugcccaaaauauguuaagucuaauaagcugguguuggcaaccgggcuccggaacagcccccugcgcgagaaaagaaggaagcggggauuauuuggcgccaucgcugguuucauugaagggggauggcagggcaugguagauggcugguacggguaucaucacuccaaugagcagggaucggguuacgccgcagacaaagaaucuacacaaaaggcuaucgauggcgugaccaacaaagucaauuccauuauagacaagaugaacacgcaguuugaggccguggggcgcgaguucaacaaucuggaacgaagaaucgagaaccucaauaagaaaauggaagauggauuucuugacguuuggacuuauaacgcggagcuguuggugcuaauggaaaaugagaggacacuggauuuccacgacucaaacgucaagaaucucuacgauaaagugcggcugcagcuucgugacaacgccaaggaacugggcaaugguuguuucgaguuuuaccauaaaugcgauaacgaguguauggaaaguguacgcaaugggaccuaugacuacccucaauauagcgaggaagcaagauugaagagggaggagauuuccggcguuaagcucgaaucuaucggaacuuaccagauccugagcauuuauucaacaguggcuaguuccuuagcccuggcuauaauggucgccggccuaagccucuggaugugcucuaacgggucacugcagugccggaucuguauuuga

SEQ ID NO: 141002 - RNA, 1704 nt, Artificial Sequence
  derived and/or modified CDS sequence (opt3) from hemagglutinin__InfluenzaA__AJK00207
auggagaagaucgugcugcuccuugccauugucagccugguuagauccgaccagauaugcaucggcuaccacgcuaacaauucuaccgaacaaguggauacaauuauggagaaaaacguaacugugacgcaugcacaggacaucuuggaaaagacccacaaugggaaauuaugugaucuggacggagucaagccccuaauucucagggauugcucaguggccgguuggcugcuuggcaacccuaugugugacgaguucaucaauguuccagaauggaguuauauaguggagaaagcgaacccggcuaaugaucugugcuaccccgggaacuuuaaugacuaugaggaauugaagcaucuccugagccggaucaaccacuucgagaagauucagaucauuccuaaauccucuuggucggaucaugaagccucaagcggagucaguuccgcauguccauaccagggcacacccagcuuuuuccgcaaugugguauggcugaucaagaaaaacaauacuuauccuaccauaaagcgaucuuacaacaauacaucccaagaggaccucuuaguucugugggguauucaccacucaaacgaugccaccgagcagaugaaacuuuaucagaacccaacuacauacgugagugucgggaccagcacguugaaucagcgucuggugcccaagaucgcuacuagaucuaaggugaacggacaauccggcaggauggacuuuuucuggaccauucuaaaaucaaaugaugcaaucaacuuugaaagcaauggcaacuucaucgccccugaguacgcuuauaagauugucaaaaagggggacagugccauaaugaaaucugaaguugaguacggaaauugcuccacaaagugucagacuccaaucggugcgauuaacagcucgaugccguuucauaauauccacccccucaccauaggcgaaugcccuaaauaugugaagucuaacaagcugguacuugcaacagggcugcgcaauuccccauugcgggagagaaggcggaaacgcggacucuucggcgccauugcugguuuuaucgaagggggauggcagggcaugguggacggcugguacggguaucaucacucaaacgaacagggaagugguuacgccgcagauaaggagagcacccaaaaagcuaucgacggcgucacgaauaaggugaacuccauuaucgauaaaaugaauacucaguucgaagccguugggcgagaguuuaacaaccuggaaagaaggauugagaauuuaaacaagaagauggaggacggauuccuggauguguggacauauaaugcggaacuccuuguccugauggagaacgaacggaccuuggacuuccacgauucuaaugugaaaaaccuauacgacaagguacgucugcagcuccgcgauaauacuaaagagcugggcaacgguuguuuugaguucuaccauaagugcgacaaugaguguauggagagcguuagaaacgggacauaugauuacccccaauauucagaagaggccaggcuuaaacgggaagagauaaguggcgugaagcuggaguccaucggaaccuaccagauuuugagcaucuauucuacggucgcaucaagucucgcucuggccaucaugguggcuggcuuaagccuguggaugugcuccaaugggucucuacagugccgaauuuguauauga

SEQ ID NO: 141003 - RNA, 1704 nt, Artificial Sequence
  derived and/or modified CDS sequence (opt3) from hemagglutinin__InfluenzaA__AJK00218
auggagaagaucgugcuguuccucgccauugucagccuuguuagauccgaccagauaugcaucggcuaccacgcuaacaauucuaccgaacaaguggauacaauuauggagaagaacguaacugugacgcaugcacaggacauccuggaaaagacccacaaugggaaauugugugauuuagacggagucaagccccugauucuaagggauugcucaguggccgguuggcuccugggcaacccuaugugugacgaguuuaucaauguuccagaauggaguuauauaguggagaaagcgaacccggcuaaugaucuuugcuaccccgggaacuucaaugacuaugaggaacugaagcauuugcucagccggaucaaccacuuugagaagauucgcaucauuccuaaauccucuuggccagaucaugaagccucgucaggagucagcagugcaugucccuaccagggcacaccuuccuucuuucgaaauaucguguggcugauaaagaaaaacaauacuuauccaaccauuaagcguucuuacaacaauacaagccaggaggaccugcucguauuaugggguauccaccacuccucagaugccaccgagcaaauuaaacuguaucagaaccccacuacauacguuaguguggggaccagcacgcuuaaccagagauuggucccuaagaucgcuacuaggucuaaggugaauggacaguccggccggauggacuucuuuuggaccauccugaaaucaaacgaugcaauuaauuucgaaagcaacggcaauuuuauagccccagaguacgcuuauaagaucgugaaaaagggggacagugccauuaugaaaucugaagucgaguacggaaacugcuccacaaagugucaaacuccgaucggugcgauaaauagcucgaugcccuuccauaacauucacccucuaaccaucggcgaaugcccaaaauauguuaagucuaauaagcucgugcuggcaacagggcuucgcaacucaccccugagagagaggcggcgcaaacgaggauuguuuggcgccaucgcugguuucauugaagggggauggcagggcaugguagacggcugguacggguaucaucacuccaaugagcagggaagugguuacgccgcagauaaggagagcacccagaaagcuaucgacggcgugacgaacaaggucaauuccauuauagauaaaaugaacacucaauuugaagccguggggagagaguucaauaaccucgaaaggcggaucgagaaccugaauaagaagauggaggacggauucuuagauguuuggacauauaacgcggaacugcucgugcuuauggagaaugaacguacccuggacuuucacgauucuaacgucaaaaauuuguacgacaaggugcgccuacagcugagagauaacgccaaagagcucggcaaugguuguuucgaauuuuaccauaagugcgacaacgaguguauggagagcguaaggaaugggacuuaugauuacccucaguauucagaagaggcacggcugaaacgagaagagauuaguggcguuaaacuugaguccaucggaacauaccaaauccugagcauuuauucuaccgcugccucaaguuuggcucucgccauaaugguggcaggccugagcuuauggaugugcuccaacgggucucugcagugccgcaucuguauuuga

SEQ ID NO: 141004 - RNA, 1704 nt, Artificial Sequence
  derived and/or modified CDS sequence (opt3) from hemagglutinin__InfluenzaA__AJK00239
auggagaagaucgugcugcuccuugccauugucagccugguuagauccgaccagauaugcaucggcuaccacgcuaacaauucuaccgaacaaguggauacaauuauggagaaaaacguaacugugacgcaugcacaggacaucuuggaaaagacccacaaugggaaauuaugugaucuggacggagucaagccccuaauucucagggauugcucaguggccgguuggcugcuuggcaacccuaugugugacgaguucaucaauguuccagaauggaguuauauaguggagaaagcgaacccggcuaaugaucugugcuaccccgggaacuuuaaugacuaugaggaauugaagcaucuccugagccggaucaaccacuucgagaagauucagaucauuccuaaauccucuuggucggaucaugaagccucaagcggagucaguuccgcauguccauaccagggcacacccagcuuuuuccgcaaugugguauggcugaucaagaaaaacaauacuuauccuaccauaaagcgaucuuacaacaauacaucccaagaggaccucuuaguucugugggguauucaccacucaaacgaugccaccgagcagaugaaacuuuaucagaacccaacuacauacgugagugucgggaccagcacguugaaucagcgucuggugcccaagaucgcuacuagaucuaaggugaacggacaauccggcaggauggacuuuuucuggaccauucuaaaaucaaaugaugcaaucaacuuugaaagcaauggcaacuucaucgccccugaguacgcuuauaagauugucaaaaagggggacagugccauaaugaaaucugaaguugaguacggaaauugcuccacaaagugucagacuccaaucggugcgauuaacagcucgaugccguuucauaauauccacccccucaccauaggcgaaugcccuaaauaugugaagucuaacaagcugguacuugcaacagggcugcgcaauuccccauugcgggagagaaggcggaaacgcggacucuucggcgccauugcugguuuuaucgaagggggauggcagggcaugguggacggcugguacggguaucaucacucaaacgaacagggaagugguuacgccgcagauaaggagagcacccaaaaagcuaucgacggcgucacgaauaaggugaacuccauuaucgauaaaaugaauacucaguucgaagccguugggcgagaguuuaacaaccuggaaagaaggauugagaauuuaaacaagaagauggaggacggauuccuggauguguggacauauaaugcggaacuccuuguccugauggagaacgaacggaccuuggacuuccacgauucuaaugugaaaaaccuauacgacaagguacgucugcagcuccgcgauaaugccaaagagcugggcaacgguuguuuugaguucuaccauaagugcgacaaugaguguauggagagcguuagaaacgggacuuaugauuacccccaauauucagaagaggcaaggcuuaaacgggaagagauaaguggcgugaagcuggaguccaucggaacauaccagauuuugagcaucuauucuaccgucgcuucaagucucgcccuggcuaucaugguggccggcuuaagccuguggaugugcuccaaugggucucuacagugccgaauuuguauauga

SEQ ID NO: 141005 - RNA, 1704 nt, Artificial Sequence
  derived and/or modified CDS sequence (opt3) from hemagglutinin__InfluenzaA__AJS18468
auggagaagaucgugcugcuccuugccgucguuagccuggugaaauccgaccagauuugcauaggcuaccacgcuaacaauucuaccgaacaaguagauacaaucauggagaagaacgugacugucacgcaugcacaggacauuuuggagaaaacccacaaugggagauuaugugaucugaacggagugaagccccuaauccucaaagacugcucaguugccgguuggcugcuuggcaauccuaugugugaugaguucauuagggugccagaauggaguuauaucgucgagcgggcgaacccggcuaaugaccugugcuaccccgggaacuugaaugauuaugaggaacucaagcaucugcugagccgcauaaaccacuuugagaagacacucaucauuccuaaauccucuuggccaaaucaugaaacuucguuaggagugucagccgcaugucccuaccagggcguaccuagcuucuuucgaaacguuguguggcugaccaagaaaaaugacgccuauccaacaaucaagaugaguuacaacaauaccaaccgugaggaucuuuugauucugugggguauccaccacuccaacaaugcugcagagcagacuaaccuauauaaaaaucccacaaccuacgucucuguggggacgagcacucucaaccaaagacuggugccuaagauagccaccaggucccaggucaauggacagcggggccgcauggacuucuuuuggacaauucuuaagccaaacgaugcuauccauuucgaaucaaauggcaacuuuauugccccggaguacgcguauaaaaucguuaagaaaggggacaguacuaucaugaaaagcgaaauggaguacggacacugcaauaccaagugucagacacccauuggugcaauaaacucuuccaugccuuuccauaauauccacccacugaccauuggcgaaugccccaaguaugugaaaucaaacaaguugguacucgccacggggcugagaaauagcccuuuaagggagcggcgccgaaagagaggacuguuuggcgcuaucgccgguuucauagaagggggauggcaaggcaugguggauggcugguacggguaucaccauaguaacgaacagggaucugguuacgcagcugacagggaguccacucagaaagccauugacggcgucacaaauaaggugaacagcaucaucgauaaaaugaacacccaguuugaagcgguugggcgggaguucaauaaccucgaacgucgcauugagaaucuuaacaagaaaauggaggacggauuucuggauguguggacuuauaaugccgaauugcuaguccugauggagaacgaaagaacacucgacuuccacgauucgaaugugaagaaccuguacgacaagguaaggcuucaacugcgggauaaugcaaaagaguugggcaacgguuguuucgaauuuuaccauaagugcgacaaugaguguauggagucuguucgaaacgggaccuaugauuacccacaguauuccgaagaggcucgccucaaaagagaagagaucucaggcgugaagcuggagaguauuggaacguaccagauauuaagcaucuauuccaccgucgccucuagccugacacuagcuauuaucguggccggccucucacuguggaugugcaguaaugggucccuucaaugcaggaucuguauuuga

SEQ ID NO: 141006 - RNA, 1704 nt, Artificial Sequence
  derived and/or modified CDS sequence (opt3) from hemagglutinin__InfluenzaA__AJS18479
auggagaagaucgugcugcuccuugccgucguuagccuggugaaauccgaccagauuugcauaggcuaccacgcuaacaauucuaccgaacaaguagauacaaucauggagaagaacgugacugucacgcaugcacaggacauuuuggagaaaacccacaaugggagauuaugugaucugaacggagugaagccccuaauccucaaagacugcucaguugccgguuggcugcuuggcaauccuaugugugaugaguucauuagggugccagaauggaguuauaucgucgagcgggcgaacccggcuaaugaccugugcuaccccgggaacuugaaugauuaugaggaacucaagcaucugcugagccgcauaaaccacuuugagaagacacucaucauuccuaaauccucuuggccaaaucaugaaacuucguuaggagugucagccgcaugucccuaccagggcaugccuagcuucuuucgaaacguaguuuggcugaccaagaaaaaugacacauauccaaccaucaagaugaguuacaacaauacuaaccgugaggaucuuuugauucugugggguauccaccacuccaacaaugccgcugagcagacaaaccuauauaaaaaucccaccacguacgugucugucgggacugcaacccucaaccaaagacuggugccuaagauagccacaaggagccaggugaauggacagcggggccgcauggacuucuuuuggacuauucuuaagccaaacgaugcuauccauuucgaauccaauggcaacuuuauugccccggaguacgcguauaaaaucgucaagaaaggggacucaaccaucaugaagagugaaauggaguacggacacugcaauacaaaaugucagacccccauuggugcaauaaacagcucuaugccuuuccauaauauccacccacugacgauuggcgaaugccccaaguauguuaaauccaacaaguuggugcucgccacugggcugagaaauucaccuuuaagggagcggcgccgaaagagaggacuguuuggcgcuaucgccgguuucauagaagggggauggcaaggcaugguagauggcugguacggguaucaccauagcaacgaacagggaagugguuacgcagcugacagggagucuacacagaaagccauugacggcgugaccaauaaggucaacuccaucaucgauaaaaugaacacucaguuugaagcgguggggcgggaguucaauaaccucgaacgucgcauugagaaucuuaacaagaaaauggaggacggauuucuggauguuuggacauauaaugccgaauugcuagugcugauggagaacgaaagaacccucgacuuccacgauagcaaugucaagaaccuguacgacaaggugaggcuucaacugcgggauaaugcaaaagaguugggcaacgguuguuucgaauuuuaccauaagugcgacaaugaguguauggagucgguacgaaacgggacguaugauuacccacaguauucugaagaggcucgccucaaaagagaagagaucuccggcguuaagcuggagucaauuggaaccuaccagauauuaaguaucuauagcacaguggccuccucucuggcucuagccauuaucgucgcaggccucagccuguggaugugcucaaaugggagucuucaaugcaggaucuguauuuga

SEQ ID NO: 141007 - RNA, 1704 nt, Artificial Sequence
  derived and/or modified CDS sequence (opt3) from hemagglutinin__InfluenzaA__AJY79339
auggagaagaucgugcugcuccuugccauugucagcauaguuaaauccgaccagaucugcauuggcuaccacgcuaacaauucuaccgaacaaguggauacaaucauggagaagaacguaacugugacgcaugcacaggacauucuggaaaagacccacaaugggaaauuguguaacuuagauggagucaaaccccugauccuaagagacugcucaguggccgguuggcuccugggcaauccuaugugugaugaguuccuuaacguuccagaauggaguuauauaguggagaagaucaauccggcgaacgaccugugcuaccccgggaauuugaacgauuaugaggaacucaagcaucugcugagcaggauuaaucacuuugagaaaauccagauuaucccuaaggacuccuggucugaucaugaggcuucgggagucucaagcgccuguccauaccagggccggaguuccuucuuucgcaacgugguauggcucacuaaaaagaaugacgcauaucccacaauuaaaaagucuuacaacaauaccaaccaagaagauuuacugguucuuugggguauacaccacccuaacgacgccgcugagcagacacgauuguaucagaauccaaccacuuacaucagcguggggacauccacccugaaccagcgucuaguccccaagauugcaacgagaucaaaagugaauggacaaaguggcaggauggaguucuuuuggacuauccucaagagcaacgaugccaucaauuucgaaucuaacggcaauuuuauugcuccugaaaacgccuacaaaauagugaagaaaggggacuccaccaucaugaagucagagcuggaauauagcaauugcaacacaaaaugucagacuccaauuggagcgaucaauaguucuaugccguuccauaacauacacccccuuaccauuggugagugcccuaaguacgucaaguccaaucggcugguuuuggcaacaggccuccgcaacagcccacagggggagaaaagaaggaagaaacggggacuguuuggcgccaucgcugguuucaucgaagggggauggcagggcaugguggacggcugguauggguaccaucacucgaaugagcaaggaucugguuaugccgcagauaaggaauccacccagcgcgcuauugacggcguaacgaacaaagugaacucaaucauugauaagaugaauacucaguuugaggccgucgggcgagaguucaacaauuuagaaagaaggauagagaaccugaauaagaaaauggaagacggauuucucgauguguggacauacaacgcggagcuucugguuuugauggaaaaugagcggacccuagacuuccacgauaguaacgugaagaaucuguaugacaaaguccgucuccaacugcgcgauaacgccaaggaacuuggcaaugguuguuucgaguuuuaccauagaugcgacaacgaguguauggaaagcgugaggaaugggacuuacgauuauccccaguacuccgaggaagcacggcugaaacgagaggagaucucuggcguaaaguuggaaagcauuggaacauaucagauccucucaaucuacaguaccguugcuuccagccuggccuuagcuauuaugguggccggccugucucuauggaugugcucaaacgggagucuccagugccgcauauguaucuga

SEQ ID NO: 141008 - RNA, 1704 nt, Artificial Sequence
  derived and/or modified CDS sequence (opt3) from hemagglutinin__InfluenzaA__AJY79341
auggagaagaucgugcugcuccuugccauugucagcauaguuaaauccgaccagaucugcauuggcuaccacgcuaacaauucuaccgaacaaguggauacaaucauggagaagaacguaacugugacgcaugcacaggacauucuggaaaagacccacaaugggaaauuguguaacuuagauggagucaaaccccugauccuaagagacugcucaguggccgguuggcuccugggcaauccuaugugugaugaguuccuuaacguuccagaauggaguuauauaguggagaagaucaauccggcgaacgaccugugcuaccccgggaauuuuaacgauuaugaggaauugaagcaucuccugagcaggauuaaucacuucgagaaaauccagauuaucccuaaggacuccuggucugaucaugaaacaucgggagucucaagcgcuuguccauaccagggccggaguuccuuuuuccgcaacgugguauggcugacuaaaaagaaugacgccuaucccaccauuaaaaagucuuacaacaauacaaaccaagaggaucucuuaguucugugggguauacaccacccuaacgacgcagccgagcagacccgacuuuaucagaauccaacuacauacaucagcguggggaccuccacguugaaccagcgucugguccccaagauugcuacuagaucaaaagugaauggacaaaacggcaggauggaauuuuucuggaccauccuaaagaguaaugaugcaaucaacuuugagagcaauggcaacuucauugccccugaaaaugcuuacaaaauagugaagaaaggggacucuacaaucaugcgguccgagcucgaauauucaaacugcaauacuaagugucagaccccaauuggagccaucaacagcaguaugccguuucauaauauacacccccugacaauuggugagugcccuaaauacgucaagucuaaccgccuuguucuggcgaccggcuugagaaauuccccacagggggagaagaggcggaaaaagcgcggacucuucggcgcaaucgccgguuuuaucgaagggggauggcagggcaugguggacggcugguauggguaccaucacagcaacgagcaaggaucggguuaugcugccgauaaagaaucuacgcagcgagcaauugacggcguaacuaacaaggucaauuccaucauugauaaaaugaacacacaguucgaggcuguggggagagaauuuaauaaccuggagaggcggauagagaauuuaaacaagaagauggaagacggauuccuggauguguggaccuacaaugccgagcuccuuguucugauggaaaacgagcguacuuuggacuuccacgauucaaaugugaaaaaccuauaugacaagguccgccugcaacucagagauaaugcgaaagaacugggcaacgguuguuuugaguucuaccauaggugcgacaaugaguguauggaaagugugcggaacgggacauacgauuauccccaguacagcgaggaagcccgacuuaagcgcgaggagaucuccggcguaaaacuggaaucuauuggaaccuaucagaucuugagcaucuacucaacgguugcaaguucccucgcucuggccauuaugguggcuggcuuaagccuguggaugugcucuaaugggucacuacagugcagaauauguaucuga

SEQ ID NO: 141009 - RNA, 1704 nt, Artificial Sequence
  derived and/or modified CDS sequence (opt3) from hemagglutinin__InfluenzaA__AJY79342
auggagaagaucgugcugcuccuugccauugucagcauaguuaaauccgaccagaucugcauuggcuaccacgcuaacaauucuaccgaacaaguggauacaaucauggagaagaacguaacugugacgcaugcacaggacauucuggaaaagacccacaaugggaaauuguguaacuuagauggagucaaaccccugauccuaagagacugcucaguggccgguuggcuccugggcaauccuaugugugaugaguuccuuaacguuccagaauggaguuauauaguggagaagaucaauccggcgaacgaccugugcuaccccgggaauuuuaacgauuaugaggaauugaagcaucuccugagcaggauuaaucacuucgagaaaauccagauuaucccuaaggacuccuggucugaucaugaggcuucgggagucucaagcgccuguccauaccagggccggaguuccuuuuuccgcaacgugguauggcugacuaaaaagaaugacgcauaucccacaauuaaaaagucuuacaacaauaccaaccaagaagaucucuuaguucugugggguauacaccacccuaacgacgccgcugagcagacacgacuuuaucagaauccaaccacuuacaucagcguggggacauccaccuugaaccagcgucugguccccaagauugcaacgagaucaaaagugaauggacaaaguggcaggauggaauuuuucuggacuauccuaaagagcaacgaugccaucaauuuugagucuaacggcaauuucauugcuccugaaaacgccuacaaaauagugaagaaaggggacuccaccaucaugaagucagagcucgaauauagcaauugcaacacaaaaugucagacuccaauuggagcgaucaauaguucuaugccguuucauaacauacacccccugaccauuggugagugcccuaaguacgucaaguccaaucggcuuguucuggcaacaggcuugcgcaacagcccacagggggagaaaagaaggaagaaacggggacucuucggcgccaucgcugguuuuaucgaagggggauggcagggcaugguggacggcugguauggguaccaucacucgaaugagcaaggaucugguuaugccgcagauaaggaauccacccagcgcgcuauugacggcguaacgaacaaagugaacucaaucauugauaagaugaauacucaguucgaggccgucgggcgagaauuuaacaaucuggagagaaggauagagaacuuaaauaagaaaauggaagacggauuccuggauguguggacauacaacgcggagcuccuuguucugauggaaaaugagcggaccuuggacuuccacgauaguaacgugaagaaucuauaugacaaaguccgucugcaacuccgcgauaacgccaaggaacugggcaaugguuguuuugaguucuaccauagaugcgacaacgaguguauggaaagcgugaggaaugggacuuacgauuauccccaguacuccgaggaagcacggcuuaaacgagaggagaucucuggcguaaagcuggaaagcauuggaacauaucagaucuugucaaucuacaguaccguugcuuccagccucgcccuggcuauuaugguggccggcuuaucucuguggaugugcucaaacgggagucuacagugccgcauauguaucuga

SEQ ID NO: 141010 - RNA, 1704 nt, Artificial Sequence
  derived and/or modified CDS sequence (opt3) from hemagglutinin__InfluenzaA__AJY79343
auggagaagaucgugcugcuccuugccauugucagcauaguuaaauccgaccagaucugcauuggcuaccacgcuaacaauucuaccgaacaaguggauacaaucauggagaagaacguaacugugacgcaugcacaggacauucuggaaaagacccacaaugggaaauuguguaacuuagauggagucaaaccccugauccuaagagacugcucaguggccgguuggcuccugggcaauccuaugugugaugaguuccuuaacguuccagaauggaguuauauaguggagaagaucaauccggcgaacgaccugugcuaccccgggaauuuuaacgauuaugaggaauugaagcaucuccugagcaggauuaaucacuucgagaaaauccagauuaucccuaaggacuccuggucugaucaugaggcuucgggagucucaagcgccuguccauaccagggccggaguuccuuuuuccgcaacgugguauggcugacuaaaaagaaugacgcauaucccacaauuaaaaagucuuacaacaauaccaaccaagaagaucucuuaguucugugggguauacaccacccuaacgacgccgcugagcagacacgacuuuaucagaauccaaccacuuacaucagcguggggacauccaccuugaaccagcgucugguccccaagauugcaacgagaucaaaagugaauggacaaaguggcaggauggaauuuuucuggacuauccuaaagagcaacgaugccaucaauuuugagucuaacggcaauuucauugcuccugaaaacgccuacaaaauagugaagaaaggggacuccaccaucaugaagucagagcucgaauauagcaauugcaacacaaaaugucagacuccaauuggagcgaucaauaguucuaugccguuucauaacauacacccccugaccauuggugagugcccuaaguacgucaaguccaaucggcuuguucuggcaacaggcuugcgcaacagcccacagggggagaaaagaaggaagaaacggggacucuucggcgccaucgcugguuuuaucgaagggggauggcagggcaugguggacggcugguauggguaccaucacucgaaugagcaaggaucugguuaugccgcagauaaggaauccacccagcgcgcuauugacggcguaacgaacaaagugaacucaaucauugauaagaugaauacucaguucgaggccgucgggcgagaauuuaacaaucuggagagaaggauagagaacuuaaauaagaaaauggaagacggauuccuggauguguggacauacaacgcggagcuccuuguucugauggaaaaugagcggaccuuggacuuccacgauaguaacgugaagaaucuauaugacaaaguccgucugcaacuccgcgauaacgccaaggaacugggcaaugguuguuuugaguucuaccauagaugcgacgaugaguguauggaaagcgugaggaacgggacuuacgacuauccccaguacuccgaggaagcacggcuuaaacgagaggagaucucuggcguaaagcuggaaagcauuggaacauaucagaucuugucaaucuacaguaccguugcuuccagccucgcccuggcuauuaugguggccggcuuaucucuguggaugugcucaaaugggagucuacagugccgcauauguaucuga

SEQ ID NO: 141011 - RNA, 1704 nt, Artificial Sequence
  derived and/or modified CDS sequence (opt3) from hemagglutinin__InfluenzaA__AJY79345
auggagaagaucgugcugcuccuugccauugucagcauaguuaaauccgaccagaucugcauuggcuaccacgcuaacaauucuaccgaacaaguggauacaaucauggagaagaacguaacugugacgagagcacaggacauucuggaaaagacccauaaugggaaauuguguaacuuagauggagucaaaccccugauccuaagggacugcucaguggccgguuggcuccugggcaauccuaugugugaugaguuccuuaacguuccagaauggaguuauauaguggagaagaucaauccggcgaacgaccugugcuaccccgggaauuuuaacgauuaugaggaauugaagcaccuccugagccggauuaaucauuucgagaaaauccagauuaucccuaaggacuccuggucugaucacgaggcuucgggagucucaagcgccuguccauaccagggccgcaguuccuuuuuccgaaacgugguauggcugacuaaaaagaaugacgcauaucccacaauuaaaaagucuuacaacaauaccaaccaagaagaucucuuaguucugugggguauacaucacccuaacgacgccgcugagcagacacgucuuuaucagaauccaaccacuuacaucagcguggggacauccaccuugaaccagagacugguccccaagauugcaacgaggucaaaagugaauggacaaaguggccggauggaauuuuucuggacuauccuaaagagcaacgaugccaucaauuuugagucuaacggcaauuucauugcuccugaaaacgccuacaaaauagugaagaaaggggacuccaccaucaugaagucagagcucgaauauagcaauugcaacacaaaaugucagacuccaauuggagcgaucaauaguucuaugccguuucacaacauacauccccugaccauuggugagugcccuaaguacgucaaguccaaucgccuuguucuggcaacaggcuugagaaacagcccacagggggagaaaaggcggaagaaacgcggacucuucggcgccaucgcugguuuuaucgaagggggauggcagggcaugguggacggcugguauggguaccaccauucgaaugagcaaggaucugguuaugccgcagauaaggaauccacccagcgagcuauugacggcguaacgaacaaagugaacucaaucauugauaagaugaauacucaguucgaggccgucgggagagaauuuaacaaucuggagaggcggauagagaacuuaaauaagaaaauggaagacggauuccuggauguguggacauacaacgcggagcuccuuguucugauggaaaaugagcguaccuuggacuuccacgauaguaacgugaagaaucuauaugacaaaguccgccugcaacucagagauaacgccaaggaacugggcaaugguuguuuugaguucuaccacaggugcgacaacgaguguauggaaagcgugcggaaugggacuuacgauuauccccaguacuccgaggaagcacgacuuaaacgcgaggagaucucuggcguaaagcuggaaagcauuggaacauaucagaucuugucaaucuacaguaccguugcuuccagccucgcccuggcuauuaugguggccggcuuaucucuguggaugugcucaaacgggagucuacagugcagaauauguaucuga

SEQ ID NO: 141012 - RNA, 1701 nt, Artificial Sequence; identical to SEQ ID NO: 140489
  derived and/or modified CDS sequence (opt3) from hemagglutinin__InfluenzaA__AKA54643

SEQ ID NO: 141013 - RNA, 1701 nt, Artificial Sequence
  derived and/or modified CDS sequence (opt3) from hemagglutinin__InfluenzaA__AKA54650
augaagaccaucauugcccugagcuacauacucugccuuguguucacacagaaaauccccggcaacgacaauuccacugcuacgcuguguuuggggcaccaugcagucccuaacggaaccauuguuaagacaaucacuaaugauagaauugaggugaccaacgccacagaauuaguacaaaauucuucaaucggugagauaugcgacaguccacaccagauccuggauggcgaaaacuguacccuaauugacgcgcuccugggggauccgcagugcgacggauuucagaauaaaaagugggaucuuuucguggagaggagcaaggcuuauuccaacuguuaccccuaugacgucccugauuacgccucucugcggucguugguggcaucaagcggcacucucgaauuuaauaacgagaguuucaauuggacagguguuacccaaaacgggacguccucugccugcauccgccgaagcuccucaaguuucuucagccgucugaauuggcugacucaucucaacuauaaauacccagcuuuaaaugugaccaugcccaacaacgagcaguuugacaagcuguauauuuggggaguccaccauccuggcacagauaaagaccagaucuuccuuuacgcacagucuuccggcagaauaacugugucaaccaagaggagccaacaggccguaauuccaaauaucgggagucggccccgcauuagagauaucccuucuaggaucuccauuuacuggacaauaguuaaaccaggagacaucuugcugauuaacagcaccgguaaucuaaucgcuccgcggggcuauuuuaagauacgcucggggaaaucuuccauuaugcgaucagacgcccccaucggaaaguguaagagugaaugcaucacgccuaacggcagcauuccaaaugauaaacccuuccagaacgugaauagaaucacuuacggugcguguccuagguaugucaagcacuccacacucaaacuggcaaccgggaugcggaacgugccagagaagcagacucguggaauuuuuggcgccauagcuggcuucaucgaaaaugggugggagggaaugguggacgguugguacggcuuucgccaccaaaacucugaggggagaggacaggccgcagaucuuaaaagcacacaggcugccauugaccaaaucaauggcaagcugaacagguugaucgguaaaaccaaugaaaaguuccaucagauugagaaggaauuuucagaggucgaagggcggauacaggaucucgagaaauauguugaggacacgaagaucgaucuguggaguuacaacgcggaauuacugguggcccucgagaaucagcacaccauugaccuuacagauuccgaaaugaacaaacuguuugagaagacuaaaaagcaauugcgagaaaacgcagaggacaugggcaauggaugcuucaagaucuaucauaaaugugauaacgcuugcauuggcagcauccgcaaugggaccuacgaccacaacguauacagagacgaggcccuaaauaacagguuucagauaaagggaguggaacugaaaucugguuauaaggauuggauccucuggauuucauucgcuaucaguugcuuucugcuuugugucgcccuguugggcuucauuaugugggcaugccagaaagggaauauccgguguaacauaugcauuuga

SEQ ID NO: 141014 - RNA, 1701 nt, Artificial Sequence
  derived and/or modified CDS sequence (opt3) from hemagglutinin__InfluenzaA__AKA54651
augaagaccaucauugccuucagcugcauacugugucagaucuccgcucaaaaacuccccggcucugacaacucaauggcaacacuuugccuggggcaccaugccgugccuaauggaacuuuggucaagacgauuaccgaugaccagaucgagguuacaaacgcgacugaauuagugcagaguaccagcaaaggugagauuuguuccucuccacaccagauccuggauggcaagaauugcacacuaauagacgcucuccugggggauccgcauugugacgauuuucaaaacaaaaagugggaccuuuucguagaaagaucgaccgccuacucaaauugcuaucccuacuaugugccugauuacgcaagccugaggaguuuggucgccuccucuggaacucucgaguuuacacaggagagcuucaacuggaccggcguggcucaggacggugcauccuauucaugucggcgcgaaagugagaauagcuuuuucucucgacugaacuggcuguacucccucaauuauaaguacccagccuuaaacguuacgaugcccaauaacgauaaauuugacaagcuguacaucuggggagugcaccauccugggacugauaaagaccagaccucacuuuauauucaagcuagcggccgugucacagugaguacuaaguggucucagcagaccguaaucccaaauauuggcuccagacccuggaucaggggaguuagcucgauaauuucuaucuacuggacaauugugaaaccuggggacaucuugcugaucaacuccaccgguaaucuaauugccccacggggcuauuucaagauacagucagggaagaguagcaucaugcgcuccgaugcgcacauuggaaacugcaacucugaauguaucacgccgaauggcagcauacccaacgacaaaccuuuucaaaaugucaacagaauuacuuacggugcaugcccaagguaugugaagcagaauacacucaaacuggccaccgggaugcggaacgugcccgagaagcagacucgcggaaucuucggcgcuaucgccggcuuuauugaaaaugggugggagggaauggucgaugguugguacggcuuccgacaccaaaacucagaggggacaggacaggcagcugaccuuaaaaguacccaggccgcgaucaaucagauuacgggcaagcugaacagaguuaucaaaaagaccaaugaaaaguuucaucaaauagagaaagaguucuccgaaguggaagguaggauucaggauuuggagcgguauguagaggacacaaagaucgaucucuggagcuacaacgccgaacuguuaguggcacuggagaaucagcacacuaucgaccucaccgauucugaaaugaacaaacuuuucgagcguacacgcaagcagcugagagaaaaugcugaggacauggggaacggcuguuuuaaaauuuaccauaagugcgauaacgccugcauaggaucaaucaggaauggcacuuaugaccacgacgucuaccgggaugaggcugugaacaaucgauuccaaauuaaggggguucaguugaaacuaggauauaaggacuggauccuguggauuaguuuugccaucagcuguuuccuccugugcgcagugcuucuggguuuuauaaugugggccugucagaaaggcaacauccgcugcaauauuuguaucuga

SEQ ID NO: 141015 - RNA, 1701 nt, Artificial Sequence
  derived and/or modified CDS sequence (opt3) from hemagglutinin__InfluenzaA__AKA59351
augaaggccauccuggugauucuccuuuacaccuucgcugcagccaacgcggacacaauaugcaucggcuaucacgcuaauaacagcacugauacggucgacaccguucuggagaaaaaugugacaguaacucauuccguggauuuguuagaagacaagcacaacgggagacuguguaaacuaaggggagucgcaccccuccaucuggguaagugcaauauugccggcuggauccuugggaacccugagugugaaucucugucaaccgccaguagcugguccuacauuguggagacaucuucgucagauaauggaaccugcuauccaggcgacuuuaucgauuacgaagaguugcgggagcagcucagcaguguuuccucuuucgaacgcuuugagauauucccgaaaacuagcuccuggcccaaccacgaaucaaauaagggugugacagcugcauguccucaagccggggcuaagaguuuuuauaaaaaccugaucuggcuggucaagaaagagaauagcuacccaaagcucucuaaauccuauauuaacgacaagggaaaggagguguuaguacuguggggcauccaucaccccucaaccagcgccgaucagcagagucuuuaccagaaugcggacgcauacguuuucgugggcacgucucgauauuccaaaaaguuuaaaccugaaauugccauccguccaaaggucagagaucaagaggggaggaugaacuacuauuggacuuugguggaacccggagacaaaauaaccuucgaggcuacagguaaucugguggucccucgguacgccuuugcaauggaacgcaacgcuggcagcgggauuaucauuucggauacuccaguucacgacugcaacaccacaugucagaccccgaagggagccaucaauacgucucuacccuuccagaacauccauccuauuacuauaggcaaaugcccaaaguaugugaaguccacaaaacucagacuggcgaccggucuuaggaauguacccucaauccagagucgggggcuguuuggagccauugcaggcuucaucgagggcggguggacuggaaugguggacgguugguacggcuaucaccaucaaaacgagcaggggagcggauacgcugccgauuugaaguccacacagaaugcuauagacgaaauuaccaacaaagucaauucugugaucgagaagaugaacacgcaguuuaccgccguuggcaaagaguucaaucaccucgaaaagcgcaucgaaaaccugaauaagaaaguggaugacgguuucuuagauauuuggacauacaacgcagagcugcucguccuucuggagaaugaacgaacuuuggacuaucacgauagcaacgugaagaaucuauacgagaaaguaagaucacaacugaagaacaacgccaaagaaaucgggaauggcuguuuugaguucuaucauaagugcgacaacaccuguauggaaaguguuaagaauggaacauacgauuauccuaaauacuccgaggaggcuaagcucaacagggaagagauugacggcgugaaacuggaaagcacucggauauaucagauccuugcgauuuacucuaccgucgcaucaagucugguguuggucgugagccucggggccaucuccuuuuggaugugcucuaauggaucgcugcagugccguaucuguauuuga

SEQ ID NO: 141016 - RNA, 1701 nt, Artificial Sequence
  derived and/or modified CDS sequence (opt3) from hemagglutinin__InfluenzaA__AKA59353
augaaggccauccuggugguccuccuuuacaccuucgcuacagcaaacgccgacacucugugcauuggcuaucacgcgaauaacagcacggauaccguugacacaguguuggagaaaaauguaacugugacccauuccgucaacuuacuggaagauaagcacaaugggaaacuauguaagcucagaggaguggcuccccugcaucuuggugagugcaacauagccggcuggauccuggggaauccugaaugugagucuuugucaacagcaaguagcugguccuacauuguugaaaccccaucuucgaacaauggaacuugcuauccgggcgacuuuaucgauuacgaggagcucagggaacagcugucaagcgugaguuccuucgagcgguuugaaauuuuccccaacacaucuagcuggccuaaucacgacuccucaaaaggugucaccgccgcuuguccacaugcaggggccaagaguuuuuauaagaaccugaucuggcucgugaaaaagggaaauagcuaccccaaauuaucuaaguccuauauaaacgauaaaggcaaggagguacugguucuuuggggcauccaccacccuucaacgagcgcugaccaacagaaguuguaccagaaugaggaugccuacguguucgucgggacuagccgcuauucuaaaaaguuuaaaccagaaauugcgauccgacccaaggugcgugaccaggagggaagaaugaacuacuauuggacccugguggaaccuggugauaaaauuacauucgaggcaacuggcaacaucgucguuccaagguacgccuuugcuauggaacggaaugccggguccggaauaauuaucagcgacaccccggugcauaacugcaauacaaccugucaaacgcccaagggcgcaauuaacacuucgcuaccuuuccagaauguacacccaaucacaaucgguaaaugccccaaguaugugaagucuaccaaacuccgccuggcuacugggcuuagaaacgucccuuccauucagucaaggggacuguuuggcgccauagcgggcuucaucgaagggggauggacagguaugguggauggcugguacggguaucaucaccagaaugagcaaggaaguggcuuugccgcagacuugaagaguacccagaacgcuauugacgguaucacgaauaaaguuaacuccgugauagagaagaugaauacccaguucacagccgucgggaaagaguucaaccaccucgaaaagcggauugagaaucugaaccgcaagaucgaugacggcuuuuuagauaucuggacuuacaaugcugaacugcucauucuucuggagaacgagcgaaccuuggacuaccaugauucuaacgugagaaaucuauaugaaaaaguaaggagccagcugaagaacaaugccaaagagaucggaaacggcuguuucgaauuuuaccacaagugcgacaauacauguauggagucaguuaaaaacgggacuuaugauuacccaaaguauagugaagaggcaaagcucaaucgggaggaaauugacggagugaaacuggaguccacccguauauaccaaauccuugccauuuauagcacagucgcuucuucacugguguugaucgucagucucggugcgaucagcuucuggaugugcuccaacggcucucugcagugccgcauuuguauauga

SEQ ID NO: 141017 - RNA, 1701 nt, Artificial Sequence
  derived and/or modified CDS sequence (opt3) from hemagglutinin__InfluenzaA__AKA59355
augaaggccauccuggugguccuccuuuacaccuucgcuacagcaaacgccgacacucugugcauuggcuaucacgcgaauaacagcacggauaccguugacacaguguuggagaaaaauguaacugugacccauuccgucaacuuacuggaagauaagcacaaugggaaacuauguaagcucagaggaguggcuccccugcaucuugguaaaugcaacauagccggcuggauccuggggaauccugagugugaaucuuugucaacagcaaguagcugguccuacauuguugagaccucuucgucagacaacggaacuugcuauccaggcgauuuuaucgacuacgaggagcucagggagcagcugagcaguguguccucuuucgaacgguuugagauuuucccgaagacaagcuccuggcccaaucacgauucaaacaagggugucaccgccgcuuguccucaugcaggggcccgcaguuuuuauaaaaaucugaucuggcucgugaagaaaggaaacagcuacccaaaguuaaaucaaucuuauauaaacgacaaaggcaaggaaguacugguucuuuggggcauccaccaucccccuacguccgcugaucagcagucauuguaccagaaugccgacgcguacguguucgucgggacuagccgauauaguaagaaauuuaagccagagauugcaauccgucccaaagugagagaucaagagggaaggaugaacuacuauuggacccugguggaaccuggugacaagauuacauucgaggccacuggcaaccuagucguuccacgguacgcuuuugccauggaacgcaaugcagggucuggaaucauaauuuccgauaccccggugcacgacugcaacacaaccugucagacgcccaaaggcgcuaucaauacuagccucccuuuccagaacauucacccaaucacaaucgguaagugccccaaauauguaaagucgaccaagcugagacuugccacugggcugaggaaugugccuucuauucagucccggggauuguuuggcgcgauagccggcuucaucgaagggggauggacagguauggucgacggcugguacggguaucaucaccaaaacgaacagggaucaggcuacgcagcugaucucaaaaguacccagaaugccauugacgagaucacgaacaaggugaaucugguuauagagaaaaugaacacccaguuuacagcuguggguaaggaguucagccacuuagaaaaacgcauugaaaaucugaacaagaaggucgaugacggguuccucgauaucuggacuuacaaugccgagcuucugguguugcuagaaaacgagcgaacccuggacuaucaugauuccaauguuaaaaaccucuacgagaagaucagaucucaacugaaaaacaaugcaaaggaaauuggcaacggauguuuugaguucuaucacaaaugcgacaauacauguauggaaagcguaaagaacggcacuuacgauuauccaaaguacucagaggaagccaaacuuaauagggaggagaucgacggggugaagcuggaaaguacccgggucuaucagauuuuggcuauauacuccacaguggcgagcucucucguccuggugguuucauuaggagcaaucaguuuuuggaugugcagcaacgguucccugcagugccguauuuguaucuga

SEQ ID NO: 141018 - RNA, 1701 nt, Artificial Sequence
  derived and/or modified CDS sequence (opt3) from hemagglutinin__InfluenzaA__AKE37137
augaaggccagacuggugguccuccuuuacaccuucgcuacagcaaacgccgacacucugugcaucggcuaucacgcgaauaacagcacggauaccguugacacaguguuggagaaaaauguaacugugacccauuccgucaacuuacuggaagauaagcacaaugggaaacuauguaagcucaggggaguggcuccccugcaucuugguaaaugcaacauugccggcuggauacuggggaauccugagugugaaucuuugucaacagcaaguagcugguccuacaucguugagaccucuucgucagacaacggaacuugcuauccaggcgauuuuauugacuacgaggagcuccgggagcagcugagcaguguguccucuuucgaacgcuuugagaucuucccgaagacaagcuccuggcccaaucacgauccuaacaagggugucaccgccgcuuguccacaugcaggggccaaaucauuuuauaagaaucugauuuggcucgugaaaaagggaaacaguuaccccaaauuaagcacgucuuauaucaaugacaagggcaaggaaguacugguucuuuggggcauacaccacccuuccacuucagcugaucaacagagcuuguaccagaacgccgacgcguacgcauucguggggaccagucgauauucuaaaaaguuuaaaccagagaucgccauucgucccaaggucagagauagggagggacggaugaauuacuauuggacacugguggaaccuggugacaaaaucacuuucgaggcuaccggcaaccuaguggucccacgcuacgccuuugcaauggaaagaaacgcuggguccggaauuaucauaagcgauacaucgguucaugacugcaauaccacgugucagacuccgaagggcgccauuaacacaucucuccccuuccaaaaugugcacccuaucaccauugguaaaugcccaaaguauguaaaguccacuaaacugaggcuugcgacagggcugcggaacgugcccucaauccagagucgcggauuguuuggcgccaucgcaggcuucauugaagggggauggaccgguauggucgacggcugguacggguaucaucaccagaaugaacagggaagcggcuacgcugccgaucucaaguccacgcaaaacgcuuuugacgagauaaccaauaaagugaacucuguuaucgagaagaugaauacacaguucacugccguggguaaagaguucaaccaccuggaaaagcgaauugaaaauuuaaacaagaaagucgaugacggguuucuggauaucuggaccuacaaugcagagcuccuugugcuguuggaaaacgagagaacacuagacuaucaugauagcaauguaaagaaccuguacgagaaaguuaggucacagcucaagaacaaugccaaagaaauaggcaacggauguuucgaguuuuaucacaagugcgacaauacuuguauggaaagugugaagaacggcaccuacgauuauccuaaauacuccgaggaagcuaagcugaaucgggaggagauugacggggucaaacuugaaagcacacguaucuaucagauccuggcgauuuacucuaccguggcaucaaguuugguccucgugguuagccugggagccaucuccuucuggaugugcucuaacgguucguuacaaugccgcauuuguauauga

SEQ ID NO: 141019 - RNA, 1701 nt, Artificial Sequence
  derived and/or modified CDS sequence (opt3) from hemagglutinin__InfluenzaA__AKS48035
auggagaagauggugcugcuccuugccgucguuagccuggugaaauccgaccagaucugcauuggcuaccacgcuaacaauucuaccgaacaaguagauacaauaauggagaagaacgugacugucacgcaugcacaggacaucuuggagaaaacccacaaugggagauuaugugaucugaacggagugaagccccuaauucucaaagacugcucaguugccgguuggcugcuuggcaauccuaugugugaugaguucaucagggugccagaauggaguuauauugucgagcgggcgaacccggcuaaugaccugugcuaccccgggaacuugaaugauuaugaggaacucaagcaucugcugagccgcaucaaccacuuugagaagacacucauaaucccuaaauccucuuggccaaaucauacuucgucaggagugagcgccgcaugucccuaccagggcaugccuaguuucuuucgaaacguaguuugguuaaccaagaaaaaugacgccuauccaacaauuaagauguccuacaacaauaccuaucgugaagaucugcuuaucuugugggguauucaccacucuaacaacgcugcagagcagacuaaucuguacaaaaaccccacaaccuacgugagcgucgggacguccacucuaaaucaaagacucgagccuaagaucgccaccaggucacaggugaacggacagcggggccgcauggacuucuuuuggacaauacugaagccaaaugaugcuauucauuucgaaaguaacggcaauuuuaucgccccggaguaugcguacaaaauugugaagaaaggggacagcacuaucaugaagucugaaauggaguauggacacugcaacaccaaaugucagacacccaucggugcaauuaauuccucaaugccuuuccauaacauacacccacuuaccaucggcgaaugccccaaguacgucaaaagcaauaagcugguuuuggccacggggcucagaaacaguccucugagggagcggcgccgaaagagaggauuauuuggcgcuauugccgguuucaucgaagggggauggcaaggcaugguggauggcugguauggguaccaccauucuaaugaacagggauccgguuaugcagcugacagggagagcacucagaaagccauagacggcguaacaaacaaggucaauucgauuaucgauaaaaugaacacccaguuugaagcgguggggcgggaguucaacaaucuggaacgucgcaucgagaaccucaauaagaaaauggaggacggauuucuugauguguggacuuacaacgccgaacuguugguucuaauggagaaugaaagaacacuggacuuccacgauucuaacgugaagaaucucuacgacaaggucaggcugcaacuucgggauaacgcaaaagagcugggcaaugguuguuucgaauuuuaucauaagugcgacaacgaguguauggaguccgugcgaaaugggaccuacgauuauccacaguacucagaagaggcucgcuugaaaagagaagagauuaguggcguaaagcucgagagcaucggaacguaucagauucuguccauauacucuaccguugccagcucauuagcucuggccaucauuguggcaggccuaagucucuggaugugcuccaacgggagccugcaaugcaggaucuguaucuga

SEQ ID NO: 141020 - RNA, 1701 nt, Artificial Sequence
  derived and/or modified CDS sequence (opt3) from hemagglutinin__InfluenzaA__ALA08472
augaagaccaucauugcccugagcuacauacucugccuuguguucgcucagaaaauccccggcaacgacaauuccacagcaacucuguguuuggggcaccaugccgucccuaacggaacgauuguuaagaccaucacaaaugauagaauugaggugacuaacgcgaccgaauuaguacaaaauucuucaaucggugagauaugcgacaguccacaccagauccuggauggcgaaaacuguacacuaauugacgcucuccugggggauccgcagugcgacggauuucagaauaaaaagugggaucuuuucguggagaggagcaaagccuauuccaacuguuaccccuaugacgucccugauuacgcaucucugcggucguugguggccucaagcggcacccucgaauuuaauaacgagaguuucaauuggacugguguuacacaaaacgggaccuccucugcuugcauccgccgaagcuccucaaguuucuucagccgucugaauuggcugacgcaucucaacuauacuuacccagcauuaaaugugaccaugcccaacaacgagcaguuugacaagcuguaugucuggggagugcaccauccuggcacagauaaggaccagauuuuccuuuacgcccagucuuccggcagaaucacuguaucaaccaaaaggagccaacaggcuguuauaccaaauauugggagucggccccgcaucagagauauuccuucuaggaucuccaucuacuggacaauugugaagccaggagacauauugcugaucaacagcaccgguaaucuaauugccccgcggggcuauuuuaaaauccgcucggggaagucuuccauaaugcgaucagacgcgcccauuggaaaauguaagagugaaugcaucacgccuaacggcagcaucccaaaugauaagcccuuccagaacgucaauagaauuacuuacggugcauguccuagguaugugaaacacuccacacucaagcuggccaccgggaugcggaacgugccagagaaacagacucguggaaucuuuggcgcuauugccggcuucauagaaaaugggugggagggaauggucgacgguugguacggcuuucgccaccaaaacucugaggggagaggacaggcagcugaucuuaagagcacacaggccgcgaucgaccaaauuaauggcaaacugaacagguugaucgguaagaccaaugaaaaauuccaucagaucgagaaggaauuuucagagguugaagggcggauucaggaucucgagaaguauguggaggacacgaaaauagaucuguggaguuacaacgccgaauuacugguagcacucgagaaucagcacaccaucgaccuuacagauuccgaaaugaacaagcuguuugagaaaacuaagaaacaauugcgagaaaacgcugaggacaugggcaauggaugcuucaagauuuaucauaagugugauaacgccugcaucggcagcauucgcaaugggaccuacgaccacaacguguacagagacgaggcucuaaauaacagguuucagaucaaaggagucgaacugaagucugguuauaaagauuggauacucuggaucucauucgccauuaguugcuuucugcuuuguguggcacuguugggcuucaucaugugggccugccagaaggggaauauucgguguaacaucugcauauga

SEQ ID NO: 141021 - RNA, 1701 nt, Artificial Sequence; identical to SEQ ID NO: 140489
  derived and/or modified CDS sequence (opt3) from hemagglutinin__InfluenzaA__ALA08475

SEQ ID NO: 141022 - RNA, 1701 nt, Artificial Sequence
  derived and/or modified CDS sequence (opt3) from hemagglutinin__InfluenzaA__ALA08478
augaagaccaucauugcccugagcuacauacucugccuuguguucgcucagaaacugcccggcaacgacaauuccacagcaacuuuguguuuagggcaccaugccgucccuaacggaacgaucguuaagaccauuacaaaugauagaaucgaggugacuaacgcgaccgaacugguacaaaauucuucaauuggugagaucugcgacaguccacaccagauacuagauggcaaaaacuguacacucaucgacgcucugcuuggggauccgcagugcgacggauuucagaauaagaggugggaucuguucguggaacggagcaaagccuauuccaacuguuaccccuaugacgucccugauuacgcaucuuugcgcucgcucguggccucaagcggcacccuggaguuuaaugacgaaaguuucaacugggcugguguuacucaaaaugggacauccucugcaugcauucgaggaagcaacuccucauuuuucagucgucugaauuggcucacccauagcaacuuuaaguauccagccuuaaaugugacgaugcccaacaacgagcaguucgauaagcuguacaucuggggcguccaccauccuggcacugacaaagaucagauuuuucuuuaugcucagucuuccgggagaaucaccgugucaacaaagaggagccaacaggccguaauaccaaauauuggaagucggccccgcaucagaaacauuccuucuaggaucuccaucuacuggacuauuguuaaaccaggugacauauugcugaucaauagcaccggcaaccuaauugcgccgcggggguacuucaagauccagucgggaaaaucuuccauaaugcgcucagacgcacccauuggcaaguguaagagugagugcaucacaccuaaugguagcaucccaaacgauaaacccuuucagaaugugaaccgaauuaccuauggggccuguccuagauacgucaagcaauccacgcucaaacuggcuacuggaaugaggaaugugccagaaaagcagacacggggcaucuucggcgccauugcaggguuuauagagaacggaugggaagguaugaaagacggcugguauggguuccgucaccaaaauucugagggacgcggccaggcugccgaucuuaagagcacccaggcggccaucgaccagauuaacgguaaacugaauagauugaucgggaagacuaacgagaaguuccaccagaucgaaaaagaguuuucagaaguggagggcaggauucaagaucucgaaaaguacgucgaggacacaaaaauagaucuguggaguuauaaugcagaguuacugguugcucucgaaaaccagcauaccaucgaccuuacggauuccgagaugaacaagcuguucgagaaaaccaagaagcaguugcgggaaaaugccgaagacaugggaaacggcugcuuuaaaauuuaccacaagugugauaaugcuugcaucgggagcauucgaaacggaacauaugaccaugacguguaccgcgaugaggcccuaaauaacagauuccagaucaaagguguagagcugaagucuggcuacaaagacuggauacucuggaucucauuugcaauuaguugcuuccugcuuuguguggcccuguugggguuuaucaugugggcuugccaaaagggaaauauuagguguaacaucugcauauga

SEQ ID NO: 141023 - RNA, 1701 nt, Artificial Sequence; identical to SEQ ID NO: 138042
  derived and/or modified CDS sequence (opt3) from hemagglutinin__InfluenzaA__ALA08479

SEQ ID NO: 141024 - RNA, 1701 nt, Artificial Sequence
  derived and/or modified CDS sequence (opt3) from hemagglutinin__InfluenzaA__ALA08481
augaagaccaucauugcccugagcuacauacucugccuuguguucgcucagaaacugcccggcaacgacaauuccacagcaacuuuguguuuagggcaccaugccgucccuaacggaacgaucguuaagaccauuacaaaugauagaaucgaggugacuaacgcgaccgaacugguacaaaauucuucaauuggugagaucugcgacaguccacaccagauacuagauggcgaaaacuguacacucaucgacgcucugcuuggggauccgcagugcgacggauuucagaauaaaaagugggaucuguucguggagaggagcaaagcccauuccaacuguuaucccuacgacgucccugauuaugcaucuuugcggucgcucguggccucaagcggcacccuggaauuuaauaacgagaguuucaauugggcugguguuacucaaaacgggacauccucuagcugcauucgcggauccaauucaaguuucuucagccgacugaacuggcucacccacuuaaauucuaaguacccagcacugaacgugacgaugcccaacaaugagcaguuugacaaacuuuauaucuggggcguccaucacccuggcacugauaaggaccagauuuucuuguacgcccaguccucagggcguaucaccgugagcacaaagagaagucaacaggcuguaauaccaaacauuggaucuaggccccggauccgcgauauuccuuccagaaucagcaucuauuggacuauuguuaaaccaggugacauacugcuaaucaauucgaccggcaaccucauugccccgaggggguacuuuaagauccggucuggaaaauccucaauaaugcgcagugacgcgcccauuggcaaguguaagagcgaaugcaucacaccuaaugguuccaucccaaacgauaaacccuuccagaaugugaaccgaauuaccuacggggcauguccuagauaugucaagcagucuacgcugaaacuugccacuggaaugaggaaugugccagagcggcaaacacguggcaucuuuggcgcuauugccggguucauagaaaacggaugggaggguaugguggacggcugguacggguuucgccaccagaauagcgagggaagaggccaggcagcugaucugaagucaacccaagccgcgaucgaccagauuaacgguaaauugaauaggcucaucgggaagacuaacgaaaaauuccaucagaucgagaaggaauuuagugaggucgaaggccggauucaggaucuggagaaguauguugaggacacaaaaauagauuuaugguccuacaaugccgaacugcucguggcacuugagaaccaacacaccaucgaccugacggauagcgaaaugaacaaguuguuugagaaaaccaagaaacagcuacgagaaaaugcugaggacaugggaaacggcugcuucaagauuuaucauaagugugauaaugccugcaucgggucuauucgcaacggaacauacgaccacgacguauauagagaugaggcucugaauaacagguuucagaucaaagguguggaacucaagucaggcuacaaagacuggauacuguggaucaguuucgccauuagcugcuuucuucugugugucgcauugcucggguucaucaugugggccugccagaagggaaauauucgguguaacaucugcauauga

SEQ ID NO: 141025 - RNA, 1701 nt, Artificial Sequence; identical to SEQ ID NO: 141024
  derived and/or modified CDS sequence (opt3) from hemagglutinin__InfluenzaA__ALA08482

SEQ ID NO: 141026 - RNA, 1701 nt, Artificial Sequence
  derived and/or modified CDS sequence (opt3) from hemagglutinin__InfluenzaA__ALA08483
augaagaccaucauuggccugagcuacauacucugccuuguguucgcccagaaacugcccgggaacgacaauuccacagcuacuuuguguuuaggacaccaugcagucccuaacgguacgaucguuaagaccauuacaaaugauagaaucgaggugacuaacgccaccgaacugguacaaaauucuucaauuggcgagaucugcgacaguccacaccagauacuagauggggaaaacuguacacucaucgacgcgcugcuuggagauccgcagugcgacggcuuucagaauaaaaagugggaucuguucguggagaggagcaaggcuuauuccaacuguuaccccuaugacgucccugauuacgccucuuugcggucgcucguggcaucaagcgguacccuggaauuuaauaacgagaguuucaauugggccgggguuacucaaaacggaacauccucuagcugcauucgcggcuccaauucaaguuucuucagccgacugaacuggcucacccauuuaaauucuaaguauccagcucugaacgugacgaugcccaacaaugagcaguuugacaaacuuuacaucuggggcguccaccauccugggacugauaaagaccagauuuucuuguaugcacaguccucaggacguaucaccgugagcacaaagagaagucaacaggccguaauaccaaacauugguucuaggccccggauccgcgauauuccuuccagaaucagcaucuacuggacuauuguuaaaccaggcgacauacugcuaaucaauucgaccgggaaccucauugcuccgaggggauacuuuaagauccggucuggcaaauccucaauaaugcgcagugacgcccccauugguaaguguaagagcgaaugcaucacaccuaauggguccaucccaaacgauaaacccuuccagaaugugaaccgaauuaccuauggagcguguccuagauacgucaagcagucuacgcugaaacuugcaacuggcaugaggaaugugccagagcggcaaacacguggcaucuuuggggccauugcuggauucauagaaaacgguugggagggcaugguggacgggugguauggauuucgccaccagaauagcgagggcagaggucaggccgcagaucugaagucaacccaagcugccaucgaccagauuaacgggaaauugaauaggcucaucggcaagacuaacgaaaaauuccaccagaucgagaaggaauuuagugaggucgaaggacggauucaggaucuggagaaguacguugaggacacaaaaauagauuuaugguccuauaaugcggaacugcucguggcccuugagaaccaacauaccaucgaccugacggauagcgaaaugaacaaguuguuugagaaaaccaagaaacagcuacgagaaaaugcagaggacaugggcaacgggugcuucaagauuuaccacaagugugauaaugcuugcaucggaucuauucgcaacgguacauaugaccaugacguauacagagaugaggcccugaauaacagguuucagaucaaaggcguggaacucaagucaggguacaaagacuggauacuguggaucaguuucgcuauuagcugcuuucuucugugugucgccuugcucggauucaucaugugggcaugccagaagggcaauauucgguguaacaucugcauauga

SEQ ID NO: 141027 - RNA, 1701 nt, Artificial Sequence
  derived and/or modified CDS sequence (opt3) from hemagglutinin__InfluenzaA__ALA08484
augaagaccaucauugcccugagcuacauacucugccuuguguucgcucagaaaauccccggcaacgacaauuccacagcaacucuguguuuggggcaccaugccgucccuaacggaacgauuguuaagaccaucacaaaugauagaauugaggugacuaacgcgaccgaauuaguacaaaauucuucaaucggugagauaugcgacaguccacaccagauccuggauggcgaaaacuguacacuaauugacgcucuccugggggauccgcagugcgacggauuucagaauaaaaagugggaucuuuucguggagaggagcaaagccuauuccaacuguuaccccuaugacgucccugauuacgcaucucugcggucguugguggccucaagcggcacccucgaauuuaauaacgagaguuucaauuggacugguguuacacaaaacgggaccuccucugcuugcauccgccgaagcuccucaaguuucuucagccgucugaauuggcugacgcaucucaacuauacuuacccagcauuaaaugugaccaugcccaacaacgagcaguuugacaagcuguauauuuggggaguccaccauccuggcacagauaaggaccagaucuuccuuuacgcccagucuuccggcagaauaacuauuucaaccaaaaggagccaacaggcugugaucccaaauauugggagucggccccgcaucagagauaucccuucuaggauuuccauauacuggacaaucguaaagccaggagacauuuugcugaucaacagcaccgguaaucuaauagccccgcggggcuauuuuaaaauucgcucggggaagucuuccaucaugcgaucagacgcgcccaucggaaaauguaagagugaaugcauuacgccuaacggcagcaucccaaaugauaagcccuuccagaacguuaauagaauuacuuacggugcauguccuagguaugugaaacacuccacacucaagcuggccaccgggaugcggaacgucccagagaaacagacucguggaauauuuggcgcuaucgccggcuucauugaaaaugggugggagggaaugguggacgguugguacggcuuucgccaccaaaacucugaggggagaggacaggcagcugaucuuaagagcacacaggccgcgaucgaccaaaucaauggcaaacugaacagguugauugguaagaccaaugaaaaauuccaucagauagagaaggaauuuucagagguggaagggcggauccaggaucucgagaaguaugucgaggacacgaaaauugaucuguggaguuacaacgccgaauuacugguugcacucgagaaucagcacaccaucgaccuuacagauuccgaaaugaacaagcuguuugagaaaacuaagaaacaauugcgagaaaacgcugaggacaugggcaauggaugcuucaagauuuaucauaagugugauaacgccugcaucggcagcauacgcaaugggaccuacgaccacaacguguacagagacgaggcucuaaauaacagguuucagaucaaaggaguagaacugaagucugguuauaaagauuggauucucuggaucucauucgccauuaguugcuuucugcuuuguguggcacuguugggcuucaucaugugggccugccagaaggggaauauacgguguaacauuugcaucuga

SEQ ID NO: 141028 - RNA, 1701 nt, Artificial Sequence
  derived and/or modified CDS sequence (opt3) from hemagglutinin__InfluenzaA__ALA08488
augaagaccaucauugcccugagcuacauacucugccuuguguucgcucagaaaauccccggcaacgggaauaguacagcaacucuguguuugggacaccaugccgucccuaacgguacgauuguuaagaccaucacaaaugacagaauugaggugacuaacgcgaccgaauuaguacaaaauucuucaaucggcgagauaugcgauaguccacaccagauccuggacggggaaaacuguacacuaauugaugcucuccugggagacccgcagugcgauggcuuucagaauaaaaagugggaccuuuucguggagaggagcaaagccuauuccaacuguuaccccuaugaugucccugacuacgcaucucugcggucguugguggccucaagcgguacccucgaauuuaauaacgagaguuucaauuggacugggguuacacaaaacggaaccuccucugcuugcauccgccgaagcuccucauccuuuuucagccgucugaauuggcugacgcaucucaacuauacuuacccagcauuaaaugugaccaugcccaacaacgagcaguuugauaagcuguauauuuggggcguccaccauccuggcacagacaaggaucagaucuuccuuuacgcccagucuuccgggagaauaacugugucaaccaaaaggagccaacaggcuguaauuccaaauaucggaagucggccccgcauuagagacaucccuucuaggaucuccauuuacuggacaauaguuaagccaggugauaucuugcugauuaacagcaccggcaaucuaaucgccccgcggggguauuuuaaaauacgcucgggaaagucuuccauuaugcgaucagacgcgcccaucggcaaauguaagagugaaugcaucacgccuaacgguagcauuccaaaugacaagcccuuccagaacgugaauagaaucacuuacggggcauguccuagguaugucaaacacuccacacucaagcuggccaccggaaugcggaacgugccagagaaacagacucguggcauuuuuggcgcuauagccggguucaucgaaaauggaugggaggguaugguggauggcugguacggguuucgccaccaaaacucugagggaagaggccaggcagcugaccuuaagagcacacaggccgcgauugaucaaaucaaugguaaacugaacagguugaucgggaagaccaaugaaaaauuccaucagauugagaaggaguucucagaagucgaaggccggauacaggaccucgagaaguauguugaggauacgaaaaucgaccuguggaguuacaacgccgaauuacugguggcacucgagaaucagcacaccauugaucuuacagacuccgaaaugaacaagcuguuugagaaaacuaagaaacaauugcgagaaaacgcugaggauaugggaaauggcugcuucaagaucuaucauaagugugacaacgccugcauugggagcauccgcaauggaaccuacgaucacaacguauacagagacgaggcucuaaauaacagguuucagauaaaagguguggaacugaagucuggcuauaaagacuggauccucuggauuucauucgccaucaguugcuuucugcuuugugucgcacuguugggguucauuaugugggccugccagaagggaaauauccgguguaacauaugcauuuga

SEQ ID NO: 141029 - RNA, 1701 nt, Artificial Sequence
  derived and/or modified CDS sequence (opt3) from hemagglutinin__InfluenzaA__ALA08490
augaagaccaucauugcccugagcuacauacucugccuuguguucgcucagaaaauccccggcaacgacaauuccacagcaacucuguguuuggggcaccaugccgucccuaacggaacgauuguuaagaccaucacaaaugauagaauugaggugacuaacgcgaccgaauuaguacaaaauucuucaaucggugagauaugcgacaguccacaccagauccuggauggcgaaaacuguacacuaauugacgcucuccugggggauccgcagugcgacggauuucagaauaaaaagugggaucuuuucguggagaggagcaaagccuauuccaacuguuaccccuaugacgucccugauuacgcaucucugcggucguugguggccucaagcggcacccucgaauuuaauaacgagaguuucaauuggacugguguuacacaaaacgggaccuccucugcuugcauccgccgaagcuccucaaguuucuucagccgucugaauuggcugacgcaucucaacuauacuuacccagcauuaaaugugaccaugcccaacaacgagcaguuugacaagcuguauauuuggggaguccaccauccuggcacagauaaggaccagaucuuccuuuacgcccagucuuccggcagaauaacugugucaaccaaaaggagccaacaggcuguaauuccaaauaucgggagucggccccgcauuagagauaucccuucuaggaucuccauuuacuggacaauaguuaagccaggagacaucuugcugauuaacagcaccgguaaucuaaucgccccgcggggcuauuuuaaaauacgcucggggaagucuuccauuaugcgaucagacgcgcccaucggaaaauguaagagugaaugcaucacgccuaacggcagcauuccaaaugauaagcccuuccagaacgugaauagaaucacuuacggugcauguccuagguaugucaaacacuccacacucaagcuggccaccgggaugcggaacgugccagagaaacagacucguggaauuuuuggcgcuauagccggcuucaucgaaaaugggugggagggaaugguggacgguugguacggcuuucgccaccaaaacucugaggggagaggacaggcagcugaucuuaagagcacacaggccgcgauugaccaaaucaauggcaaacugaacagguugaucgguaagaccaaugaaaaauuccaucagauugagaaggaauuuucagaggucgaagggcggauacaggaucucgagaaguauguugaggacacgaaaaucgaucuguggaguuacaacgccgaauuacugguggcacucgagaaucagcacaccauugaccuuacagauuccgaaaugaacaagcuguuugagaaaacuaagaaacaauugcgagaaaacgcugaggacaugggcaauggaugcuucaagaucuaucauaagugugauaacgccugcauuggcagcauccgcaaugggaccuacgaccacaacguauacagagacgaggcucuaaauaacagguuucagauaaaaggaaucgaacugaagucugguuauaaagauuggauucucuggaucucauucgccauuaguugcuuucugcuuuguguggcacuguugggcuucaucaugugggccugccagaaggggaauauacgguguaacauuugcaucuga

SEQ ID NO: 141030 - RNA, 1701 nt, Artificial Sequence
  derived and/or modified CDS sequence (opt3) from hemagglutinin__InfluenzaA__ALA08491
augaagaccaucauugcccugagcuacauacucugccuuguguucgcucagaaacugcccggcaacgacaauuccacagcaacuuuguguuuagggcaccaugccgucccuaacggaacgaucguuaagaccauuacaaaugauagaaucgaggugacuaacgcgaccgaacugguacaaaauucuucaauuggugagaucugcgacaguccacaccagauacuagauggcgaaaacuguacacucaucgacgcucugcuuggggauccgcagugcgacggauuucagaauaaaaagugggaucuguucguggagaggagcaaagccuauuccaacuguuaccccuaugacgucccugauuacgcaucuuugcggucgcucguggccucaagcggcacccuggaauuuaauaacgagaguuucaauugggcugguguuacucaaaacgggacauccucugcaugcauucgcggaagcaauuccucauuuuucagucgacugaacuggcucacccauuuaaauuuuaaguauccagcccugaacaugacgaugcccaacaaugagcaguucgacaaguuguacaucuggggcgugcaccauccuggcacugauaaagaccagauuuuucuuuaugcucagagcucugggcguaucaccgucuccacaaagagaucacaacaggccgugauaccaaacauuggaagcaggccccggauccgcaauauuccuaguagaaucucuaucuacuggacuauuguaaaaccaggugauauacugcuaaucaacuccaccggcaaucucauugcgccgaggggguacuucaagauccggagcggaaaaucgucuauaaugcgcuccgacgcacccauuggcaaguguaagucagaaugcaucacaccuaacgguaguaucccaaaugacaaacccuuucagaacguuaaucgaauuaccuauggggccuguccuagauacgugaagcagagcacgcugaaacuugcuacuggaaugaggaacgucccagagaagcaaacacggggcaucuucggcgccauugcaggguuuauagaaaauggaugggaggguaugaaagauggcugguauggguuccgucaccagaacuccgagggacgcggccaggcugccgaccugaagucuacccaagcggccaucgaucagauuaaugguaaauugaacagacucaucgggaagacuaaugaaaaguuccaccagaucgagaaagaauuuagcgagguggaaggcaggauucaggaccuggagaaguacguggaggauacaaaaauagacuuauggucauauaacgcagaacugcucgucgcucuugagaaccaacauaccaucgaucugacggacagugaaaugaauaaguuguucgagaaaaccaagaagcagcuacgggaaaacgccgaggauaugggaaauggcugcuuuaaaauuuaccacaagugugacaacgcuugcaucggguccauucgaaauggaacauaugaucaugacguuuaccgcgacgaggcccugaacaauagauuccagaucaaagguguggaacucaagagcggcuacaaagauuggauacuguggaucucuuuugcaauuucaugcuuccuucuguguguagccuugcucggguuuaucaugugggcuugccagaagggaaacauuagguguaauaucugcauauga

SEQ ID NO: 141031 - RNA, 1701 nt, Artificial Sequence; identical to SEQ ID NO: 141029
  derived and/or modified CDS sequence (opt3) from hemagglutinin__InfluenzaA__ALA08492

SEQ ID NO: 141032 - RNA, 1701 nt, Artificial Sequence
  derived and/or modified CDS sequence (opt3) from hemagglutinin__InfluenzaA__ALA08493
augaagaccaucauugcccugagcuacauacucugccuuguguucgcucagaaaauccccggcaacgacaauuccacagcaacucuguguuuggggcaccaugccgucccuaacggaacgauuguuaagaccaucacaaaugauagaauugaggugacuaacgcgaccgaauuaguacaaaauucuucaaucggugagauaugcgacaguccacaccagauccuggauggcgaaaacuguacacuaauugacgcucuccugggggauccgcagugcgacggauuucagaauaaaaagugggaucuuuucguggagaggagcaaagccuauuccaacuguuaccccuaugacgucccugauuacgcaucucugcggucguugguggccucaagcggcacccucgaauuuaauaacgagaguuucaauuggacugguguuacacaaaacgggaccuccucugcuugcauccgccgaagcuccucaaguuucuucagccgucugaauuggcugacgcaucucaacuauacuuacccagcauuaaaugugaccaugcccaacaacgagcaguuugacaagcuguauauuuggggaguccaccauccuggcacagauaaggaccagaucuuccuuuacgcccagucuuccggcagaauaacugugucaaccaaaaggagccaacaggcuguaauuccaaauaucgggagucggccccgcauuagagauaucccuucuaggaucuccauuuacuggacaauaguuaagccaggagacaucuugcugauuaacagcaccgguaaucuaaucgccccgcggggcuauuuuaaaauacgcucggggaagucuuccauuaugcgaucagacgcgcccaucggaaaauguagaagugaaugcaucacgccuaacggcagcauuccaaaugauaagcccuuccagaacgugaauaggaucacuuacggugcauguccucgguaugucaagcacuccacacucaaacuggccaccgggaugcguaacgugccagagaagcagacucgcggaauuuuuggcgcuauagccggcuucaucgaaaaugggugggagggaaugguggacgguugguacggcuuuagacaccaaaacucugaggggaggggacaggcagcugaucuuaaaagcacacaggccgcgauugaccaaaucaauggcaagcugaaccgguugaucgguaaaaccaaugaaaaguuccaucagauugagaaagaauuuucagaggucgaagggcgaauacaggaucucgagaaguauguugaggacacgaagaucgaucuguggaguuacaacgccgaauuacugguggcacucgagaaucagcacaccauugaccuuacagauuccgaaaugaacaaacuguuugagaagacuaaaaagcaauugcgcgaaaacgcugaggacaugggcaauggaugcuucaaaaucuaucauaagugugauaacgccugcauuggcagcaucagaaaugggaccuacgaccacaacguauacagggacgaggcucuaaauaaccgguuucagauaaagggaaucgaacugaaaucugguuauaaggauuggauucucuggaucucauucgccauuaguugcuuucugcuuuguguggcacuguugggcuucaucaugugggccugccagaaagggaauauacgcuguaacauuugcaucuga

SEQ ID NO: 141033 - RNA, 1701 nt, Artificial Sequence
  derived and/or modified CDS sequence (opt3) from hemagglutinin__InfluenzaA__ALA08494
augaagaccaucauugcccugagcuacauacucugccuuguguucgcucagaaaauccccggcaacgacaauuccacagcaacucuguguuuggggcaccaugccgucccuaacggaacgauuguuaagaccaucacaaaugauagaauugaggugacuaacgcgaccgaauuaguacaaaauucuucaaucggugagauaugcgacaguccacaccagauccuggauggcgaaaacuguacacuaauugacgcucuccugggggauccgcagugcgacggauuucagaauaaaaagugggaucuuuucguggagaggagcaaagccuauuccaacuguuaccccuaugacgucccugauuacgcaucucugcggucguugguggccucaagcggcacccucgaauuuaauaacgagaguuucaauuggacugguguuacacaaaacgggaccuccucugcuugcauccgccgaagcuccucaaguuucuucagccgucugaauuggcugacgcaucucaacuauacuuacccagcauuaaaugugaccaugcccaacaacgagcaguuugacaagcuguauauuuggggaguccaccauccuggcacagauaaggaccagaucuuccuuuacgcccagucuuccggcagaauaacugugucaaccaaagggagccaacaggcuguaauuccaaauaucggaaguaggccccggauucgcgauaucccuucuagaaucuccauuuacuggacaauaguuaagccaggugacaucuugcugauuaacagcaccggcaaucuaaucgccccgaggggguauuuuaaaauacggucgggaaagucuuccauuaugcgcucagacgcgcccaucggcaaauguaagagugaaugcaucacgccuaacgguagcauuccaaaugauaagcccuuccagaacgugaaucgaaucacuuacggggcauguccuagauaugucaaacacuccacacucaagcuggccaccggaaugaggaacgugccagagaaacagacucggggcauuuuuggcgcuauagccggguucaucgaaaauggaugggaggguaugguggacggcugguacggguuucgucaccaaaacucugagggacgcggccaggcagcugaucuuaagagcacacaggccgcgauugaccaaaucaaugguaaacugaacagauugaucgggaagaccaaugaaaaauuccaucagauugagaaggaauuuucagaggucgaaggcaggauacaggaucucgagaaguauguugaggacacgaaaaucgaucuguggaguuacaacgccgaauuacugguggcacucgagaaucagcacaccauugaccuuacagauuccgaaaugaacaagcuguuugagaaaacuaagaaacaauugcgggaaaacgcugaggacaugggaaauggcugcuucaagaucuaucauaagugugauaacgccugcauugggagcauccgaaauggaaccuacgaccacaacguauaccgcgacgaggcucuaaauaacagauuucagauaaaagguguggaacugaagucuggcuauaaagauuggauccucuggauuucauucgccaucaguugcuuucugcuuugugucgcacuguugggguucauuaugugggccugccagaagggaaauaucagguguaacauaugcauuuga

SEQ ID NO: 141034 - RNA, 1701 nt, Artificial Sequence; identical to SEQ ID NO: 141033
  derived and/or modified CDS sequence (opt3) from hemagglutinin__InfluenzaA__ALA08495

SEQ ID NO: 141035 - RNA, 1701 nt, Artificial Sequence; identical to SEQ ID NO: 141033
  derived and/or modified CDS sequence (opt3) from hemagglutinin__InfluenzaA__ALA08496

SEQ ID NO: 141036 - RNA, 1701 nt, Artificial Sequence; identical to SEQ ID NO: 140489
  derived and/or modified CDS sequence (opt3) from hemagglutinin__InfluenzaA__ALA08497

SEQ ID NO: 141037 - RNA, 1701 nt, Artificial Sequence; identical to SEQ ID NO: 140489
  derived and/or modified CDS sequence (opt3) from hemagglutinin__InfluenzaA__ALA08498

SEQ ID NO: 141038 - RNA, 1701 nt, Artificial Sequence
  derived and/or modified CDS sequence (opt3) from hemagglutinin__InfluenzaA__ALA08499
augaagaccaucauugcccugagcuacauacucugccuuguguucgcucagaaacugcccgagaacgacaauuccacagcaacuuuguguuuaggccaccaugccgucccuaacgggacgaucguuaagaccauuacaucugauagaaucgaagugacuaaugcgaccgagcugguacaaaacucaaguauuggagaaaucugcgacagcccacaccagauacuagaugguaaaaauuguacacucaucgacgcucugcuuggcgauccgcagugcgacggguuucagaacaagaaaugggaucuguucguggagagguccaaggccuauucuaauuguuaccccuaugacgucccugauuacgcaucguugcggucacucguggccagcaguggaacccuggaauuuaacgacgaguccuucaauugggcuggcguuacucaaaacgguacaucuagcgcaugcauucgcggguccaauucaaguuucuuuagccgacugaacuggcucacccauucuaauuuuaaguauccagccuuaaacgugacgaugcccaauaacgagcaguucgauaaacuguacaucuggggaguccaccauccuggcacugacaaggaucagauuuuucuuuaugcucaguccucaggccguaucaccgugagcacaaaaagaagucaacaggccguaauaccaaacauugggucuaggccccggauccgcgacauuccuuccagaaucagcaucuacuggacuauuguuaagccaggagacauauugcugaucaauucgaccgguaaccuaauugcgccgaggggcuacuucaaaauccggucugggaaguccucaauaaugcgcagugaugcacccauuggaaaguguaaaagcgaaugcaucacaccuaauggcuccaucccaaacgacaagcccuuucagaaugugaaccgaauuaccuauggugccuguccuagauacgucaaacagucuacgcucaagcuggcuacugggaugaggaaugugccagagaaacaaacacggggaaucuucggcgccauugcaggcuuuauagaaaacgggugggagggaaugaaggaugguugguauggcuuccgucaccagaauagcgaggggcgcggacaggcugccgaccuuaaaucaacccaagcggccaucgaucagauuaacggcaagcugaauagauugaucgguaagacuaacgaaaaauuccaccagaucgagaaggaauuuagugagguggaagggaggauucaggaccucgagaaauacgucgaggauacaaagguugaccugugguccuauaaugcagaauuacugguggcucucgagaaccaacauaccauagaucuuacggacagcgaaaugaauaaacuguucgagaagaccaagaaacaguugcgggaaaacgccgaggauaugggcaacggaugcuuuaagaucuaccacaaaugugacaaugcuugcauuggcucuauccgaaacgggacauaugaccaugauguauaccgcgacgaggcccuaaauaacagauuccagauuaagggaguggaacugaaaucagguuacaaggauuggauccucuggauaaguuuugcaaucagcugcuuccugcuuugugucgcccuguugggcuuuauuaugugggcuugccagaaggggaauaucagguguaacauuugcaucuga

SEQ ID NO: 141039 - RNA, 1701 nt, Artificial Sequence; identical to SEQ ID NO: 141022
  derived and/or modified CDS sequence (opt3) from hemagglutinin__InfluenzaA__ALA08501

SEQ ID NO: 141040 - RNA, 1701 nt, Artificial Sequence
  derived and/or modified CDS sequence (opt3) from hemagglutinin__InfluenzaA__ALA08502
augaagaccaucauugcccugagcuacauacucugccuuguguucgcucagaaacugcccgagaacgacaauuccacagcaacuuuguguuuaggccaccaugccgucccuaacgggacgaucguuaagaccauuacaucugauagaaucgaagugacuaaugcgaccgagcugguacaaaacucaaguauuggagaaaucugcgacagcccacaccagauacuagaugguaaaaauuguacacucaucgacgcucugcuuggcgauccgcagugcgacggguuucagaacaagaaaugggaucuguucguggagagguccaaggccuauucuaauuguuaccccuaugacgucccugauuacgcaucguugcggucacucguggccagcaguggaacccuggaauuuaacgacgaguccuucaauugggcuggcguuacucaaaacgguacaucuagcgcaugcauucgcggguccaauucaaguuucuuuagccgacugaacuggcucacccauucuaauuuuaaguauccagccuuaaacgugacgaugcccaauaacgagcaguucgauaaacuguacaucuggggaguccaccauccuggcacugacaaggaucagauuuuucuuuaugcucaguccucaggccguaucaccgugagcacaaaaagaagucaacaggccguaauaccaaacauugggucuaggccccggauccgcaauauuccuuccagaaucagcaucuacuggacuauuguuaagccaggagacauauugcugaucaacucgaccgguaaucuaauugcgccgaggggcuacuucaaaauccggucugggaaguccucaauaaugcgcagugacgcacccauuggaaaguguaaaagcgaaugcaucacaccuaacggcuccaucccaaaugauaagcccuuucagaacgugaaucgaauuaccuauggugccuguccuagauacgucaaacagucuacgcucaagcuggcuacugggaugaggaacgugccagagaaacaaacacggggaaucuucggcgccauugcaggcuuuauagaaaaugggugggagggaaugaaggacgguugguauggcuuccgucaccagaacagcgaggggcgcggacaggcugccgaucuuaaaucaacccaagcggccaucgaccagauuaauggcaagcugaacagauugaucgguaagacuaaugaaaaauuccaccagaucgagaaggaauuuagugagguggaagggaggauucaggaucucgagaaauacgucgaggacacaaagguugaucugugguccuauaacgcagaauuacugguggcucucgagaaucaacauaccauagaccuuacggauagcgaaaugaacaaacuguucgagaagaccaagaaacaguugcgggaaaacgccgaggacaugggcaauggaugcuuuaagaucuaccacaaaugugauaacgcuugcauuggcucuauccgaaaugggacauaugaccaugacguauaccgcgaugaggcccuaaacaauagauuccagauuaagggaguggaacugaaaucagguuacaaggacuggauccucuggauaaguuuugcaaucagcugcuuccugcuuugugucgcccuguugggcuuuauuaugugggcuugccagaaggggaacaucagguguaauauuugcaucuga

SEQ ID NO: 141041 - RNA, 1701 nt, Artificial Sequence; identical to SEQ ID NO: 141040
  derived and/or modified CDS sequence (opt3) from hemagglutinin__InfluenzaA__ALA08503

SEQ ID NO: 141042 - RNA, 1701 nt, Artificial Sequence; identical to SEQ ID NO: 140489
  derived and/or modified CDS sequence (opt3) from hemagglutinin__InfluenzaA__ALA08504

SEQ ID NO: 141043 - RNA, 1701 nt, Artificial Sequence; identical to SEQ ID NO: 140489
  derived and/or modified CDS sequence (opt3) from hemagglutinin__InfluenzaA__ALA08505

SEQ ID NO: 141044 - RNA, 1701 nt, Artificial Sequence; identical to SEQ ID NO: 140489
  derived and/or modified CDS sequence (opt3) from hemagglutinin__InfluenzaA__ALA08506

SEQ ID NO: 141045 - RNA, 1701 nt, Artificial Sequence; identical to SEQ ID NO: 140489
  derived and/or modified CDS sequence (opt3) from hemagglutinin__InfluenzaA__ALA08507

SEQ ID NO: 141046 - RNA, 1701 nt, Artificial Sequence
  derived and/or modified CDS sequence (opt3) from hemagglutinin__InfluenzaA__ALA08508
augaagaccaucauugcccugagcuacauacucugccuuguguucgcucagaaacugcccgagaacgacaauuccacagcaacuuuguguuuaggccaccaugccgucccuaacgggacgaucguuaagaccauuacaucugauagaaucgaagugacuaaugcgaccgagcugguacaaaacucaaguauuggagaaaucugcgacagcccacaccagauacuagaugguaaaaauuguacacucaucgacgcucugcuuggcgauccgcagugcgacggguuucagaacaagaaaugggaucuguucguggagagguccaaggccuauucuaauuguuaccccuaugacgucccugauuacgcaucguugcggucacucguggccagcaguggaacccuggaauuuaacgacgaguccuucaauugggcuggcguuacucaaaacgguacaucuagcgcaugcauucgcggguccaauucaaguuucuuuagccgacugaacuggcucacccauucuaauuuuaaguauccagccuuaaacgugacgaugcccaauaacgagcaguucgauaaacuguacaucuggggaguccaccauccuggcacugacaaggaucagauuuuucuuuaugcucaguccucaggccguaucaccgugagcacaaaaagaagucaacaggccguaauaccaaacauugggucuaggccccggauccgcaauauuccuuccagaaucagcaucuacuggacuauuguuaagccaggagacauauugcugaucaacucgaccgguaaucuaauugcgccgaggggcuacuucaaaauccggucugggaaguccucaauaaugcgcagugacgcacccauuggaaaguguaaaagcgaaugcaucacaccuaacggcuccaucccaaaugauaagcccuuucagaacgugaaucgaauuaccuauggugccuguccuagauacgucaaacagucuacgcucaagcuggcuacugggaugaggaacgugccagagaaacaaacacggggaaucuucggcgccauugcaggcuuuauagaaaaugggugggagggaaugaaggacgguugguauggcuuccgucaccagaacagcgaggggcgcggacaggcugccgaucuuaaaucaacccaagcggccaucgaccagauuaauggcaagcugaacagauugaucgguaagacuaaugaaaaauuccaccagaucgagaaggaauuuagugagguggaagggaggauucaggaucucgagaaauacgucgaggacacaaagauagaucugugguccuauaacgcagaauuacugguugcucucgagaaucaacauaccaucgaccuuacggauagcgaaaugaacaaacuguucgagaagaccaagaaacaguugcgggaaaacgccgaggacaugggcaauggaugcuuuaagauuuaccacaaaugugauaacgcuugcaucggcucuauucgaaaugggacauaugaccaugacguguaccgcgaugaggcccuaaacaauagauuccagaucaagggaguagaacugaaaucagguuacaaggacuggauacucuggaucaguuuugcaauuagcugcuuccugcuuuguguggcccuguugggcuuuaucaugugggcuugccagaaggggaacauuagguguaauaucugcauauga

SEQ ID NO: 141047 - RNA, 1701 nt, Artificial Sequence; identical to SEQ ID NO: 140489
  derived and/or modified CDS sequence (opt3) from hemagglutinin__InfluenzaA__ALA08509

SEQ ID NO: 141048 - RNA, 1701 nt, Artificial Sequence; identical to SEQ ID NO: 140489
  derived and/or modified CDS sequence (opt3) from hemagglutinin__InfluenzaA__ALA08510

SEQ ID NO: 141049 - RNA, 1701 nt, Artificial Sequence
  derived and/or modified CDS sequence (opt3) from hemagglutinin__InfluenzaA__ALA08511
augaagaccaucauugcccugagcuacauacucugccuuguguucgcucagaaaauccccggcaacgacaauuccacagcaacucuguguuuggggcaccaugccgucccuaacggaacgauuguuaagaccaucacaaaugauagaauugaggugacuaacgcgaccgaauuaguacaaaauucuucaaucggugagauaugcgacaguccacaccagauccuggauggcgaaaacuguacacuaauugacgcucuccugggggauccgcagugcgacggauuucagaauaaaaagugggaucuuuucguggagaggagcaaagccuauuccaacuguuaccccuaugacgucccugauuacgcaucucugcggucguugguggccucaagcggcacccucgaauuuaauaacgagaguuucaauuggacugguguuacacaaaacgggaccuccucuagcugcauccgccgauccucaaguagcuuuuucucucgucugaauuggcugacgcaucucaacuauacuuacccagcuuuaaaugugaccaugcccaacaacgagcaguuugacaagcuguauauuuggggaguccaccauccuuccacagauaaggaccagaucuuccuuuacgcacagucaagcggcagaauaacugugaguaccaaaaggucucaacaggccguaauuccaaauaucggcucccggccccgcauuagagauaucccuagcaggaucucgauuuacuggacaauaguuaagccaggggacaucuugcugauuaacucuaccggaaaucuaaucgcuccgcgggguuauuuuaaaauacgcuccggcaagucaaguauuaugcgaagcgacgcccccaucgggaaauguaaguccgaaugcaucacgccuaacggaucuauuccaaaugauaagcccuuccagaacgugaauagaaucacuuacggcgcguguccuagguaugucaaacacagcacacucaagcuggcaaccgguaugcggaacgugccagagaaacagacucgugggauuuuuggagccauagcuggcuucaucgaaaauggcugggaggggaugguggacggaugguacgguuuucgccaccaaaacucagagggcagagggcaggccgcagaucuuaagaguacacaggcugccauugaccaaaucaauggaaaacugaacagguugaucggcaagaccaaugaaaaauuccaucagauugagaaggaguucuccgaagucgaaggucggauacaggaucucgagaaguauguugaggacacgaaaaucgaucuguggagcuacaacgcggaauuacugguggcccucgagaaucagcacaccauugaccuuacagauucugaaaugaacaagcuguuugagaaaacuaagaaacaauugcgagaaaacgcagaggacauggggaauggcugcuucaagaucuaucauaagugugauaacgcuugcauuggaucaauccgcaauggcaccuacgaccacaacguauacagagacgaggcccuaaauaacagguuucagauaaaagggguggaacugaagaguggauauaaagauuggauccucuggauuagcuucgcuaucuccugcuuucugcuuugugucgcccuguuggguuucauuaugugggcaugccagaagggcaauauccgguguaacauaugcauuuga

SEQ ID NO: 141050 - RNA, 1701 nt, Artificial Sequence; identical to SEQ ID NO: 140489
  derived and/or modified CDS sequence (opt3) from hemagglutinin__InfluenzaA__ALA08512

SEQ ID NO: 141051 - RNA, 1701 nt, Artificial Sequence; identical to SEQ ID NO: 140489
  derived and/or modified CDS sequence (opt3) from hemagglutinin__InfluenzaA__ALA08514

SEQ ID NO: 141052 - RNA, 1701 nt, Artificial Sequence; identical to SEQ ID NO: 140489
  derived and/or modified CDS sequence (opt3) from hemagglutinin__InfluenzaA__ALA08515

SEQ ID NO: 141053 - RNA, 1701 nt, Artificial Sequence; identical to SEQ ID NO: 140489
  derived and/or modified CDS sequence (opt3) from hemagglutinin__InfluenzaA__ALA08516

SEQ ID NO: 141054 - RNA, 1701 nt, Artificial Sequence; identical to SEQ ID NO: 141046
  derived and/or modified CDS sequence (opt3) from hemagglutinin__InfluenzaA__ALA08517

SEQ ID NO: 141055 - RNA, 1701 nt, Artificial Sequence; identical to SEQ ID NO: 140489
  derived and/or modified CDS sequence (opt3) from hemagglutinin__InfluenzaA__ALA08519

SEQ ID NO: 141056 - RNA, 1701 nt, Artificial Sequence
  derived and/or modified CDS sequence (opt3) from hemagglutinin__InfluenzaA__ALA08520
augaagaccaucauugcccugagcuacauacucugccuuguguucgcucagaaaauccccggcaacgacaauuccacagcaacucuguguuuggggcaccaugccgucccuaacggaacgauuguuaagaccaucacaaaugauagaauugaggugacuaacgcgaccgaauuaguacaaaauucuucaaucggugagauaugcgacaguccacaccagauccuggauggcgaaaacuguacacuaauugacgcucuccugggggauccgcagugcgacggauuucagaauaaaaagugggaucuuuucguggagaggagcaaagccuauuccaacuguuaccccuaugacgucccugauuacgcaucucugcggucguugguggccucaagcggcacccucgaauuuaauaacgagaguuucaauuggacugguguuacacaaaacgggaccuccucugcuugcauccgccgaagcuccucaaguuucuucagccgucugaauuggcugacgcaucucaacuauacuuacccagcauuaaaugugaccaugcccaacaacgagcaguuugacaagcuguauauuuggggaguccaccauccuggcacagauaaggaccagaucuuccuuuacgcccagccaucuggcagaauaacuguguccaccaaaaggucacaacaggcuguaauucccaauaucgggagccggccucgcauuagagauaucccaaguaggaucucuauuuacuggacaauaguuaagccgggagacaucuugcugauuaacuccaccgguaaucuaaucgcgccccggggcuauuuuaaaauacgcaacggaaagagcucgauuaugcgaucugacgccccuaucgggaaauguaaguccgaaugcaucacgccaaauggcucaauucccaacgauaagccuuuccagaaugugaacagaaucacuuacggugcauguccaagguaugucaaacacaguacacucaagcuggccaccgggaugcggaaugugcccgagaaacagacucguggaauuuuuggcgcuauagccggcuucaucgaaaacgggugggagggaaugguggacgguugguacggcuuucgccaccaaaauagcgaggggagaggacaggcagcugaucuuaaguccacacaggccgcgauugaccaaaucaacggcaaacugaauagguugaucgguaagaccaacgaaaaauuccaucagauugagaaggaauuuucugaggucgaagggcggauacaggaucucgagaaguauguugaggacacgaaaaucgaucuguggagcuacaaugccgaauuacugguggcacucgagaaccagcacaccauugaccuuacagauucagaaaugaacaagcuguuugagaaaacuaagaaacaauugcgagaaaaugcugaggacaugggcaacggaugcuucaagaucuaucauaagugugauaaugccugcauuggcaguauccgcaacgggaccuacgaccacaauguauacagagacgaggcucuaaacaauagguuucagauaaaaggaguggaacugaaguccgguuauaaagauuggauccucuggauuagcuucgccaucucuugcuuucugcuuugugucgcacuguugggcuucauuaugugggccugccagaaggggaacauccgguguaauauaugcauuuga

SEQ ID NO: 141057 - RNA, 1701 nt, Artificial Sequence; identical to SEQ ID NO: 138186
  derived and/or modified CDS sequence (opt3) from hemagglutinin__InfluenzaA__ALA08522

SEQ ID NO: 141058 - RNA, 1701 nt, Artificial Sequence
  derived and/or modified CDS sequence (opt3) from hemagglutinin__InfluenzaA__ALA08523
augaagaccaucauugcccugagcuacauacucugccuuguguucgcucagaaaauccccggcaacgacaauuccacagcaacucuguguuuggggcaccaugccgucccuaacggaacgauuguuaagaccaucacaaaugauagaauugaggugacuaacgcgaccgaauuaguacaaaauucuucaaucggugagauaugcgacaguccacaccagauccuggauggcgaaaacuguacacuaauugacgcucuccugggggauccgcagugcgacggauuucagaauaaaaagugggaucuuuucguggagaggagcaaagccuauuccaacuguuaccccuaugacgucccugauuacgcaucucugcggucguugguggccucaagcggcacccucgaauuuaauaacgagaguuucaauuggacugguguuacacaaaacgggaccuccucugcuugcauccgccgaagcuccucaaguuucuucagccgucugaauuggcugacgcaucucaacuauacuuacccagcauuaaaugugaccaugcccaacaacgagcaguuugacaagcuguauauuuggggaguccaccauccuggcacagauaaggaccagaucuuccuuuacgcccagucuuccggcagaauaacugugucaaccaaaaggagccaacaggcuguaauuccaaauaucgggagucggccccgcauuagagauaucccuucuaggaucuccauuuacuggacaauaguuaagccaggagacaucuugcugauuaacagcaucgguaaucuaauagccccgcggggcuauuuuaaaauucgcucggggaagucuuccaucaugcgaucagacgcgcccaucggaaaauguaagagugaaugcauuaccccuaacggcagcaucccaaaugauaagcccuuccagaacgugaauagaauuacguacggugcauguccuagguaugucaaacacuccacucucaagcuggccacagggaugcggaacgugccagagaaacagacccguggaauauuuggcgcuaucgccggcuucauugaaaaugggugggagggaaugguggacgguugguacggcuuucgccaccaaaacucugaggggagaggacaggcagcugaucuuaagagcacucaggccgcgaucgaccaaaucaauggcaaacugaacagguugauugguaagacaaaugaaaaauuccaucagauagagaaggaauuuucagaggucgaagggcggauccaggaucucgagaaguauguugaggacaccaaaauugaucuguggaguuacaacgccgaauuacugguggcacucgagaaucagcacacgaucgaccuuaccgauuccgaaaugaacaagcuguuugagaaaacaaagaaacaauugcgagaaaacgcugaggacaugggcaauggaugcuucaagauuuaucauaagugugauaacgccugcaucggcagcauacgcaaugggacuuacgaccacaacguauacagagacgaggcucuaaauaacagguuucagaucaaaggaguggaacugaagucugguuauaaagauuggauucucuggaucucauucgccauuaguugcuuucugcuuugugucgcacuguugggcuucaucaugugggccugccagaaggggaauauacgguguaacauuugcaucuga

SEQ ID NO: 141059 - RNA, 1701 nt, Artificial Sequence
  derived and/or modified CDS sequence (opt3) from hemagglutinin__InfluenzaA__ALA08524
augaagaccaucauugcccugagcuacauacucugcaugguguucgcucagaaaauccccggcaacgacaauuccacagcaacucuuugucuggggcaccaugccgucccuaacggaacgauuguuaagaccaucacaaaugauagaauugaggugacuaacgcgaccgaauugguacaaaauucuucaaucggugagauaugcgacaguccacaccagaucuuagauggcgaaaacuguacacugauugacgcucuacucggggauccgcagugcgacggauuucagaauaaaaagugggaucuguucguggagaggagcaaagccuauuccaacuguuaccccuaugacgucccugauuacgcaucucuucggucgcugguggccucaagcggcaccuuggaauuuaauaacgagaguuucaauuggacugguguuacacaaaacgggaccuccucugcuugcauccgccgaagcuccucaaguuucuucagccgucucaauuggcugacgcaucugaacuauacuuacccagcacucaaugugaccaugcccaacaacgagcaguuugacaaguuauauauuuggggaguccaccauccuggcacagauaaggaccagaucuuccuguacgcccagucuuccggcagaauaacugugucaaccaaaaggagccaacaggcuguaauuccaaauaucgggagucggcuucgcauuagagauauccccucuaggaucuccauuuacuggacaauaguuaagccuggagacaucuugcugauuaacagcaccgguaaucuaaucgccccacggggcuauuuuaaaauacgcucggggaagucuuccauuaugcgaucagacgcgccgaucggaaaauguaagagugaaugcaucacgcccaacggcagcauuccuaaugauaagccauuccagaacgugaauagaaucacuuacggugcaugucccagguaugucaaacacuccacacucaagcuggccaccgggaugcggaacgugccugagaaacagacucguggaauuuuuggcgcuauagccggcuucaucgaaaaugggugggagggaaugguggacgguugguacggcuuucgccaccaaaacucugaggggagaggacaggcagcugaucuuaagagcacacaggccgcgauugaccaaaucaauggcaaacugaacagguugaucgguaagaccaaugaaaaauuccaucagauugagaaggaauuuucagaggucgaagggcggauacaggaucucgagaaguauguugaggacacgaaaaucgaucuguggaguuacaacgccgaauuacugguggcacucgagaaucagcacaccauugaccuuacagauuccgaaaugaacaagcuguuugagaaaacuaagaaacaauugcgagaaaacgcugaggacaugggcaauggaugcuucaagaucuaucauaagugugauaacgccugcauuggcagcauccgcaaugggaccuacgaccacaacguauacagagacgaggcucuaaauaacagguuucagauaaaaggaguggaacugaagucugguuauaaagauuggauccucuggauuucauucgccaucaguugcuuucugcuuugugucgcacuguugggcuucauuaugugggccugccagaaggggaauauccgguguaacauaugcauuuga

SEQ ID NO: 141060 - RNA, 1701 nt, Artificial Sequence; identical to SEQ ID NO: 140489
  derived and/or modified CDS sequence (opt3) from hemagglutinin__InfluenzaA__ALA08525

SEQ ID NO: 141061 - RNA, 1701 nt, Artificial Sequence; identical to SEQ ID NO: 140489
  derived and/or modified CDS sequence (opt3) from hemagglutinin__InfluenzaA__ALA08526

SEQ ID NO: 141062 - RNA, 1701 nt, Artificial Sequence; identical to SEQ ID NO: 141046
  derived and/or modified CDS sequence (opt3) from hemagglutinin__InfluenzaA__ALA08527

SEQ ID NO: 141063 - RNA, 1701 nt, Artificial Sequence
  derived and/or modified CDS sequence (opt3) from hemagglutinin__InfluenzaA__ALA08528
augaagaccaucauugcccugagcuacauacucugccuuguguucgcucagaaacugcccgagaacgacaauuccacagcaacuuuguguuuaggccaccaugccgucccuaacgggacgaucguuaagaccauuacaucugauagaaucgaagugacuaaugcgaccgagcugguacaaaacucaaguauuggagaaaucugcgacagcccacaccagauacuagaugguaaaaauuguacacucaucgacgcucugcuuggcgauccgcagugcgacggguuucagaacaagaaaugggaucuguucguggagagguccaaggccuauucuaauuguuaccccuaugacgucccugauuacgcaucguugcggucacucguggccagcaguggaacccuggaauuuaacgacgaguccuucaauugggcuggcguuacucaaaacgguacaucuagcgcaugcauucgcggguccaauucaaguuucuucagccgacugaacuggcucacccauucuaauuuuaaguauccagccuuaaacgugacgaugcccaauaacgagcaguucgauaaacuguacaucuggggaguccaccauccuggcacugacaaggaucagauuuaucuuuacgcucaguccucaggccguaucaccgugagcacaaaaagaagucaacaggccguaauaccaaacauugggucuaggccccggauccgcaauauuccuuccagaaucagcaucuacuggacuauuguuaagccaggagacauauugcugaucaacucgaccgguaaucuaauugcgccgaggggcuauuuuaaaauccggucugggaaguccucaauaaugcgcagugacgcacccauuggaaaguguaaaagcgaaugcaucacaccuaacggcuccaucccaaaugauaagcccuuccagaacgugaaucgaauuaccuacggugccuguccuagauaugucaaacagucuacgcucaagcuggcuacugggaugaggaacgugccagagaaacaaacacggggaaucuuuggcgccauugcaggcuucauagaaaaugggugggagggaaugaaggacgguugguacggcuuucgucaccagaacagcgaggggcgcggacaggcugccgaucuuaaaucaacccaagcggccaucgaccagauuaauggcaagcugaacagauugaucgguaagacuaaugaaaaauuccaccagaucgagaaggaauuuagugagguggaagggaggauucaggaucucgagaaauaugucgaggacacaaagauagaucugugguccuacaacgcagaauuacugguugcucucgagaaucaacauaccaucgaccuuacggauagcgaaaugaacaaacuguuugagaagaccaagaaacagaugcgggaaaacgccgaggacaugggcaauggaugcuucaagauuuaucacaaaugugauaacgcuugcaucggcucuauucgaaaugggacauacgaccaugacguguaccgcgaugaggccuugaacaauagauuucagaucaagggaguagaacuaaaaucagguuauaaggacuggauacuguggaucaguuucgcaauuagcugcuuucuccuguguguggcccuucugggcuucaucaugugggcuugccagaaggggaacauuagguguaauaucugcauauga

SEQ ID NO: 141064 - RNA, 1701 nt, Artificial Sequence; identical to SEQ ID NO: 140489
  derived and/or modified CDS sequence (opt3) from hemagglutinin__InfluenzaA__ALA08529

SEQ ID NO: 141065 - RNA, 1701 nt, Artificial Sequence; identical to SEQ ID NO: 140489
  derived and/or modified CDS sequence (opt3) from hemagglutinin__InfluenzaA__ALA08530

SEQ ID NO: 141066 - RNA, 1701 nt, Artificial Sequence
  derived and/or modified CDS sequence (opt3) from hemagglutinin__InfluenzaA__ALA08531
augaagaccaucauugcccugagcuacauacucugccuuguguucgcucagaaacugcccgagaacgacaauuccacagcaacuuuguguuuaggccaccaugccgucccuaacgggacgaucguuaagaccauuacaucugauagaaucgaagugacuaaugcgaccgagcugguacaaaacucaaguauuggagaaaucugcgacagcccacaccagauacuagaugguaaaaauuguacacucaucgacgcucugcuuggcgauccgcagugcgacggguuucagaacaagaaaugggaucuguucguggagagguccaaggccuauucuaauuguuaccccuaugacgucccugauuacgcaucguugcggucacucguggccagcaguggaacccuggaauuuaacgacgaguccuucaauugggcuggcguuacucaaaacgguacaucuagcgcaugcauucgcggguccaauucaaguuucuuuagccgacugaacuggcucacccauucuaauuuuaaguauccagccuuaaacgugacgaugcccaauaacgagcaguucgauaaacuguacaucuggggaguccaccauccuggcacugacaaggaucagauuuuucuuuaugcucaguccucaggccguaucaccgugagcacaaaaagaagucaacaggccguaauaccaaacauugggucuaggccccggauccgcaauauuccuuccagaaucagcaucuacuggacuauuguuaagccaggagacauauugcugaucaacucgaccgguaaucuaauugcgccgaggggcuacuucaaaauccggucugggaaguccucaauaaugcgcagugacgcacccauuggaaaguguaaaagcgaaugcaucacaccuaacggcuccaucccaaaugauaagcccuuucagaacgugaaucgaauuaccuauggugccuguccuagauacgucaaacagucuacgcucaagcuggcuacugggaugaggaacgugccagagaaacaaacacggggaaucuucggcgccauugcaggcuuuauagaaaaugggugggagggaaugaaggacgguugguauggcuuccgucaccagaacagcgaggggcgcggacaggcugccgaucuuaaaucaacccaagcggccaucgaccagauuaauggcaagcugaacagauugaucgguaagacuaaugaaaaauuccaccagaucgagaaggaauuuagugagguggaagggaggauucaggaucucgagaaauacgucgaggacacaaagauagaucugugguccuauaacgcagaauuacugguugcucucgagaaucaacauaccaucgaccuuacggauagcgaaaugaacaaacuguucgagaagaccaagaaacaguugcgggaaaacgccgaggacaugggcaauggaugcuuuaagauuuaccacaaaugugauaacgcuugcaucggcucuauucgaaaugggacauauaaccaugacguguaccgcgacgaggcccuaaauaacagauuccagaucaagggaguagaacugaaaucagguuacaaggauuggauacucuggaucaguuuugcaauuagcugcuuccugcuuuguguggcccuguugggcuuuaucaugugggcuugccagaaggggaauauuagguguaacaucugcauauga

SEQ ID NO: 141067 - RNA, 1701 nt, Artificial Sequence; identical to SEQ ID NO: 140489
  derived and/or modified CDS sequence (opt3) from hemagglutinin__InfluenzaA__ALA08532

SEQ ID NO: 141068 - RNA, 1701 nt, Artificial Sequence; identical to SEQ ID NO: 140489
  derived and/or modified CDS sequence (opt3) from hemagglutinin__InfluenzaA__ALA08533

SEQ ID NO: 141069 - RNA, 1701 nt, Artificial Sequence; identical to SEQ ID NO: 140489
  derived and/or modified CDS sequence (opt3) from hemagglutinin__InfluenzaA__ALA08534

SEQ ID NO: 141070 - RNA, 1701 nt, Artificial Sequence; identical to SEQ ID NO: 140489
  derived and/or modified CDS sequence (opt3) from hemagglutinin__InfluenzaA__ALA08535

SEQ ID NO: 141071 - RNA, 1701 nt, Artificial Sequence; identical to SEQ ID NO: 141046
  derived and/or modified CDS sequence (opt3) from hemagglutinin__InfluenzaA__ALA08536

SEQ ID NO: 141072 - RNA, 1701 nt, Artificial Sequence; identical to SEQ ID NO: 141046
  derived and/or modified CDS sequence (opt3) from hemagglutinin__InfluenzaA__ALA08537

SEQ ID NO: 141073 - RNA, 1701 nt, Artificial Sequence; identical to SEQ ID NO: 141046
  derived and/or modified CDS sequence (opt3) from hemagglutinin__InfluenzaA__ALA08538

SEQ ID NO: 141074 - RNA, 1701 nt, Artificial Sequence; identical to SEQ ID NO: 140489
  derived and/or modified CDS sequence (opt3) from hemagglutinin__InfluenzaA__ALA08539

SEQ ID NO: 141075 - RNA, 1701 nt, Artificial Sequence; identical to SEQ ID NO: 141046
  derived and/or modified CDS sequence (opt3) from hemagglutinin__InfluenzaA__ALA08540

SEQ ID NO: 141076 - RNA, 1701 nt, Artificial Sequence; identical to SEQ ID NO: 141046
  derived and/or modified CDS sequence (opt3) from hemagglutinin__InfluenzaA__ALA08541

SEQ ID NO: 141077 - RNA, 1701 nt, Artificial Sequence; identical to SEQ ID NO: 141046
  derived and/or modified CDS sequence (opt3) from hemagglutinin__InfluenzaA__ALA08542

SEQ ID NO: 141078 - RNA, 1701 nt, Artificial Sequence
  derived and/or modified CDS sequence (opt3) from hemagglutinin__InfluenzaA__ALA08543
augaagaccaucauugcccugagcuacauacucugccuuguguucgcucagaaaauccccggcaacgacaauuccacagcaacucuguguuuggggcaccaugccgucccuaacggaacgauuguuaagaccaucacaaaugauagaauugaggugacuaacgcgaccgaauuaguacaaaauucuucaaucggugagauaugcgacaguccacaccagauccuggauggcgaaaacuguacacuaauugacgcucuccugggggauccgcagugcgacggauuucagaauaaaaagugggaucuuuucguggagaggagcaaagccuauuccaacuguuaccccuaugacgucccugauuacgcaucucugcggucguugguggccucaagcggcacccucgaauuuaauaacgagaguuucaauuggacugguguuacacaaaacgggaccuccucugcuugcauccgccgaagcuccucaaguuucuucagccgucugaauuggcugacgcaucucaacuauacuuacccagcauuaaaugugaccaugcccaacaacgagcaguuugacaagcuguauauuuggggaguccaccauccuggcacagauaaggaccagaucuuccuuuacgcccagucuuccggcagaauaacugugucaaccaaaaggagccaacaggcugccauuccaaauaucgggagucggccccgcauuagagauaucccuucuaggaucuccauuuacuggacaauaguaaagccaggagacaucuugcugauuaacagcaccgguaaucuaaucgcgccgcggggcuauuuuaaaauacgcucggggaagucuuccauuaugcgaucagacgcacccaucggaaaauguaagagugaaugcaucacgccuaacggcagcauuccaaaugauaagcccuuccagaacguuaauagaaucacuuacggugccuguccuagguaugugaaacacuccacacucaagcuggcuaccgggaugcggaacgucccagagaaacagacucguggaauuuuuggcgccauagcaggcuucaucgaaaaugggugggagggaaugguggacgguugguacggcuuucgccaccaaaacucugaggggagaggacaggcugccgaucuuaagagcacacaggcggccauugaccaaaucaauggcaaacugaacagguugaucgguaagaccaaugaaaaauuccaucagauugagaaggaauuuucagagguggaagggcggauacaggaucucgagaaguaugucgaggacacgaaaaucgaucuguggaguuacaacgcagaauuacugguugcucucgagaaucagcacaccauugaccuuacagauuccgaaaugaacaagcuguuugagaaaacuaagaaacaauugcgagaaaacgccgaggacaugggcaauggaugcuucaagaucuaucauaagugugauaacgcuugcauuggcagcauccgcaaugggaccuacgaccacaacguguacagagacgaggcccuaaauaacagguuucagauaaaaggaguagaacugaagucugguuauaaagauuggauccucuggauuucauucgcaaucaguugcuuucugcuuuguguggcccuguugggcuucauuaugugggcuugccagaaggggaauauccgguguaacauaugcauuuga

SEQ ID NO: 141079 - RNA, 1701 nt, Artificial Sequence; identical to SEQ ID NO: 140489
  derived and/or modified CDS sequence (opt3) from hemagglutinin__InfluenzaA__ALA08545

SEQ ID NO: 141080 - RNA, 1701 nt, Artificial Sequence; identical to SEQ ID NO: 140489
  derived and/or modified CDS sequence (opt3) from hemagglutinin__InfluenzaA__ALA08546

SEQ ID NO: 141081 - RNA, 1701 nt, Artificial Sequence
  derived and/or modified CDS sequence (opt3) from hemagglutinin__InfluenzaA__ALA08548
augaagaccaucauugcccugagcuacauacucugccuuguguucgcucagaaacugcccgagaacgacaauuccacagcaacuuuguguuuaggccaccaugccgucccuaacgggacgaucguuaagaccauuacaucugauagaaucgaagugacuaaugcgaccgagcugguacaaaacucaaguauuggagaaaucugcgacagcccacaccagauacuagaugguaaaaauuguacacucaucgacgcucugcuuggcgauccgcagugcgacggguuucagaacaagaaaugggaucuguucguggagagguccaaggccuauucuaauuguuaccccuaugacgucccugauuacgcaucguugcggucacucguggccagcaguggaacccuggaauuuaacgacgaguccuucaauugggcuggcguugcacaaaacgguacuucuagcgccugcauucgcggguccaauucaaguuucuuuagccgacugaacuggcucacacauucuaauuuuaaguauccagcuuuaaacgugaccaugcccaauaacgagcaguucgauaaacuguacaucuggggaguccaccauccuggcacggacaaggaucagauuuuucuuuaugcccaguccucaggccguaucacugugagcaccaaaagaagucaacaggcgguaauaccaaacauugggucuaggccccggauccgcaauauuccuuccagaaucagcaucuacuggacaauuguuaagccaggagacauauugcugaucaacucgacugguaaucuaauugcaccgaggggcuacuucaaaauccggucugggaaguccucaauaaugcgcagugacgcccccauuggaaaguguaaaagcgaaugcaucaccccuaacggcuccaucccaaaugauaagcccuuucagaacgugaaucgaauuacauauggugcuuguccuagauacgucaaacagucuacccucaagcuggccacggggaugaggaacgugccagagaaacaaacucggggaaucuucggcgcaauugcuggcuuuauagaaaaugggugggagggaaugaaggacgguugguauggcuuccgucaccagaacagcgaggggcgcggacaggccgcggaucuuaaaucaacacaagccgcaaucgaccagauuaauggcaagcugaacagauugaucgguaagaccaaugaaaaauuccaccagaucgagaaggaauuuagugagguggaagggaggauucaggaucucgagaaauacgucgaggacacuaagauagaucugugguccuauaacgcugaauuacugguugcccucgagaaucaacauacaaucgaccuuaccgauagcgaaaugaacaaacuguucgagaagacgaagaaacaguugcgggaaaacgcugaggacaugggcaauggaugcuuuaagauuuaccacaaaugugauaacgccugcaucggcucuauucgaaaugggaccuaugaccaugacguguaccgcgaugaggcacuaaacaauagauuccagaucaagggaguagaacugaaaucagguuacaaggacuggauacucuggaucaguuuugccauuagcugcuuccugcuuuguguggcucuguugggcuuuaucaugugggcgugccagaaggggaacauuagguguaauaucugcauauga

SEQ ID NO: 141082 - RNA, 1701 nt, Artificial Sequence
  derived and/or modified CDS sequence (opt3) from hemagglutinin__InfluenzaA__ALA08549
augaagaccaucauugcccugagcuacauacucugccuuguguucgcucagaaaauccccggcaacgacaauuccacagcaacucuguguuuggggcaccaugccgucccuaacggaacgauuguuaagaccaucacaaaugauagaauugaggugacuaacgcgaccgaauuaguacaaaauucuucaacaggugugaucugcgacaguccacaccagauacuggauggcgagaacuguacccuaaucgacgcucuccugggggauccgcagugcgacggauuucagaauaaaaagugggaucuuuucgucgaaaggagcaaagccuauuccaacuguuaccccuaugacgugccugauuacgcaucucugcggucguugguugccucaagcggcacucucgaguuuaauaacgaaaguuucaauuggacaggugugacccaaaacgggacguccucugcuugcauucgccgaagcuccucaaguuucuuuagccgucugaauuggcugacucaucucaacuauaccuacccagcauuaaaugucacaaugcccaacaacgagcaguuugacaagcuguauaucuggggagugcaccauccuggcacugauaaggaccagauuuuccuuuacgcccagucuuccggcagaaucaccguaucaacaaaagggagccaacaggcuguuauaccaaauauuggaaguaggccccggauccgcgauauuccuucuagaaucuccaucuacuggaccauugugaagccaggugacauauugcugaucaacagcacgggcaaucuaauugccccgaggggguauuuuaaaauccggucgggaaagucuuccauaaugcgcucagacgcgcccauuggcaaauguaagagugagugcaucacuccuaacgguagcaucccaaaugauaagcccuuccagaacgucaaucgaauuacauacggggcauguccuagauaugugaaacacuccacccucaagcuggccacuggaaugaggaacgugccagaaaaacagacacggggcaucuuuggcgcuauugccggguucauagagaauggaugggaagguauggucgacggcugguacggguuucgucaccaaaacucugagggacgcggccaggcagcugaucuuaagagcacccaggccgcgaucgaccaaauuaaugguaaacugaacagauugaucgggaagacgaaugagaaauuccaucagaucgaaaaggaguucucagaaguugagggcaggauucaggaucucgaaaaguauguggaggacaccaaaauagaucuguggaguuacaacgccgaguuacugguagcacucgaaaaucagcacacaaucgaccuuacugauuccgagaugaacaagcuguuugagaaaacccggaagcaauugcgagaaaacgcugaagacaugggaaauggcugcuucaaaauuuaucauaagugugauaacgccugcaucgggagcauucgcaauggaacauacgaccacaacguguacagagacgaggcucuaaauaacagguuucagaucaagggugucgagcugaaaucuggcuauaaggauuggauacucuggaucucauucgccauuaguugcuuucugcuuuguguggcacuguugggguucaucaugugggccugccagaaaggaaauauucgguguaacaucugcauauga

SEQ ID NO: 141083 - RNA, 1701 nt, Artificial Sequence; identical to SEQ ID NO: 141046
  derived and/or modified CDS sequence (opt3) from hemagglutinin__InfluenzaA__ALA08550

SEQ ID NO: 141084 - RNA, 1701 nt, Artificial Sequence
  derived and/or modified CDS sequence (opt3) from hemagglutinin__InfluenzaA__ALA08551
augaagaccaucauugcccugagcuacauacucugccuuguguucgcucagaaacuguuggagaacgacaauuccacagcaacuuuaugucugggccaccaugccguccccaacgggacgaucguuaagaccauuacaucugauagaaucgaagugacuaaugcgaccgagcuaguacaaaacucaaguauuggagaaaucugcgacagcccucaccagauacucgaugguaaaaauuguacacugaucgacgcccuucugggcgauccacagugcgacggguuucagaacaagaaaugggauuuguucguggagagguccaaggcuuauucuaauuguuacccguaugacguccccgauuacgcaucgcuccggucacugguggccagcaguggaacccuggaauuuaacgacgaguccuucaauugggcuggcguuacucaaaacgguacaucuagcgcaugcauucgcggguccaauucaaguuucuuuagccgacucaacugguuaacccauucuaauuuuaaguauccugcccugaacgugacgaugccaaauaacgagcaguucgauaaacuuuacaucuggggaguccaccaucccggcacugacaaggaucagauuuuucuuuaugcucaguccucaggccguaucaccgugagcacaaaaagaagucaacaggccguaauaccuaacauugggucuaggccacggauccgcaauauucccuccagaaucagcaucuacuggacuauuguuaagccuggagacauacugcuaaucaacucgaccgguaaucucauugcgccaaggggcuacuucaaaauccggucugggaaguccucaauaaugcgcagugacgcaccgauuggaaaguguaaaagcgaaugcaucacacccaacggcuccaucccuaaugauaagccauuucagaacgugaaucgaauuaccuauggugccugucccagauacgucaaacagucuacgcugaaguuggcuacugggaugaggaacgugccugagaaacaaacacggggaaucuucggcgccauugcaggcuuuauagaaaaugggugggagggaaugaaggacgguugguauggcuuccgucaccagaacagcgaggggcgcggacaggcugccgaucugaaaucaacccaagcggccaucgaccagauuaauggcaaguugaacagacucaucgguaagacuaaugaaaaauuccaccagaucgagaaggaauuuagugagguggaagggaggauucaggaucuggagaaauacgucgaggacacaaagauagauuuaugguccuauaacgcagaacugcucguugcucuugagaaucaacauaccaucgaccugacggauagcgaaaugaacaaauuguucgagaagaccaagaaacagcuacgggaaaacgccgaggacaugggcaauggaugcuuuaagauuuaccacaaaugugauaacgcuugcaucggcucuauucgaaaugggacauaugaccauaacguguaccgcgacgaggcccugaauaacagauuccagaucaagggaguagaacucaaaucagguuacaaggauuggauacuguggaucaguuuugcaauuagcugcuuccuucuguguguggccuugcucggcuuuaucaugugggcuugccagaaggggaauauuagguguaacaucugcauauga

SEQ ID NO: 141085 - RNA, 1701 nt, Artificial Sequence; identical to SEQ ID NO: 141046
  derived and/or modified CDS sequence (opt3) from hemagglutinin__InfluenzaA__ALA08552

SEQ ID NO: 141086 - RNA, 1701 nt, Artificial Sequence; identical to SEQ ID NO: 141046
  derived and/or modified CDS sequence (opt3) from hemagglutinin__InfluenzaA__ALA08553

SEQ ID NO: 141087 - RNA, 1701 nt, Artificial Sequence
  derived and/or modified CDS sequence (opt3) from hemagglutinin__InfluenzaA__ALA08554
augaagaccaucauugcccugagcuacauacucugccuuguguucgcucagaaaauccccggcaacgacaauuccacagcaacucuguguuuggggcaccaugccgucccuaacggaacgauuguuaagaccaucacaaaugauagaauugaggugacuaacgcgaccgaauuaguacaaaauucuucaaucggugagauaugcgacaguccacaccagauccuggauggcgaaaacuguacacuaauugacgcucuccugggggauccgcagugcgacggauuucagaauaaaaagugggaucuuuucguggagaggagcaaagccuauuccaacuguuaccccuaugacgucccugauuacgcaucucugcggucguugguggccucaagcggcacccucgaauuuaauaacgagaguuucaauuggacugguguuacacaaaacgggaccuccucugcuugcauccgccgaagcuccucaaguuucuucagccgucugaauuggcugacgcaucucaacuauacuuacccagcauuaaaugugaccaugcccaacaacgagcaguuugacaagcuguauauuuggggaguccaccauccuggcacagauaaggaccagaucuuccuuuacgcccagucuuccggcagaauaacugugucaaccaaaaggagccaacaggcuguaauuccaaauaucgggagucggccccgcauuagagauaucccuucuaggaucuccauuuacuggacaauaguuaagccaggagacaucuugcugauuaacagcaccgguaaucuaaucgccccgcggggcuauuuuaaaauacgcucggggaagucuuccauuaugcgaucagacgcgcccaucggaaaauguaagagugaaugcaucacgccuaacggcagcauuccaaaugauaagcccuuccagaacgugaauagaaucacuuacggugcauguccuagguaugucaaacacuccacacucaagcuggccaccgggaugcggaacgugccagagaaacagacucguggaauuuuuggcgcuauagccggcuucaucgaaaaugggugggagggaaugguggacgguugguacggcuuucgccaccaaaacucugaggggagaggacaggcagcugaucuuaagagcacacaggccgcgauugaccaaaucaauggcaaacugaacagguugaucgguaagaccaaugaaaaauuccaucagauugagaaggaauuuucagaggucgaagggcggauacaggaucucgagaaguauguugaggacacgaaaaucgaucuguggaguuacaacgccgaauuacugguggcacucgagaaucagcacaccauugaccuuacagauuccgaaaugaacaagcuguuugagaaaacuaagaaacaauugcgagaaaacgcugaggacaugggcaauggaugcuucaagaucuaucauaagugugauaacgccugcauuggcagcauccgcaaugggaccuacgaccacaacguauacagagacgaggcucuaaauaacagguuucagauaaaaggaguggaacugaugucugguuauaaggauuggauccucuggauuucauucgccaucaguugcuuucugcuuugugucgcacuguugggcuucauuaugugggccugccagaaagggaauauccgguguaacauaugcauuuga

SEQ ID NO: 141088 - RNA, 1701 nt, Artificial Sequence
  derived and/or modified CDS sequence (opt3) from hemagglutinin__InfluenzaA__ALA08555
augaagaccaucauugcccugagcuacauacucugccuuguguucgcucagaaacugcccgagaacgacaauuccacagcaacuuuguguuuaggccaccaugccgucccuaacgggacgaucguuaagaccauuacaucugaucaaaucgaagugacuaaugcgaccgagcugguacagaacucaaguauuggagaaaucugcgacagcccacaccagauacuagaugguaaaaauuguacacucaucgacgcucugcuuggcgauccgcagugcgacggguuucaaaacaagaaaugggaucuguucguggagagauccaaggccuauucuaauuguuaccccuaugacgucccugauuacgcaucguugaggucacucguggccagcaguggaacccuggaauuuaacgacgaguccuucaauugggcuggcguuacucagaacgguacaucuagcgcaugcauucggggguccaauucaucauuuuucagccgccugaacuggcucacccauucuaauuuuaaguauccagccuuaaacgugacgaugcccaauaacgagcaguucgauaaacuguacaucuggggaguccaccauccuggcacugacaaggaucagauuuuucuuuaugcucaauccucaggccgaaucaccgugagcacaaaacguagucagcaggccguaauaccaucuauuggguccagacccaggauccggaacauuccuagccgcaucucgaucuacuggacuauuguuaagccaggagacauauugcugaucaauucuaccgguaaccuaauugcgccgagaggcuacuucaaaaucagguccgggaagucaaguauaaugcggagcgacgcacccauuggaaaguguaaauccgaaugcaucacaccuaauggcucuaucccaaacgauaagcccuuucagaaugugaaccgcauuaccuauggugccuguccucgauacgucaaacaaagcacgcucaagcuggcuacugggaugagaaaugugccagagaaacagacaaggggaaucuucggcgccauugcaggcuuuauagaaaacgggugggagggaaugaaggacgguugguauggcuuccggcaccagaauagugaggggcguggacaagcugccgaucuuaaaaguacccaggcggccaucgaccagauuaacggcaagcugaaucgcuugaucgguaagacuaacgaaaaauuccaccagaucgagaaggaauuuuccgagguggaagggaggauucaagaucucgagaaauacgucgaggacacaaagauagaucuguggagcuauaaugcagaauuacugguugcucucgagaaccagcauaccaucgaccuuacggauucugaaaugaauaaacuguucgagaagaccaagaaacaguugagagaaaacgccgaggacaugggcaacggaugcuuuaagauuuaccacaaaugugauaaugcuugcaucggcucaauucggaacgggacauaugaccauaauguguaccgagacgaggcccuaaacaaucgcuuccagaucaagggaguagaacugaaaagugguuacaaggauuggauacucuggaucagcuuugcaauuuccugcuuccugcuuuguguggcccuguugggcuuuaucaugugggcuugccaaaaggggaacauuagauguaauaucugcauauga

SEQ ID NO: 141089 - RNA, 1701 nt, Artificial Sequence
  derived and/or modified CDS sequence (opt3) from hemagglutinin__InfluenzaA__ALA08556
augaagaccaucauugcccugagcuacauacucugccuuguguucgcucagaaaauccccggcaacgacaauuccacagcaacucuguguuuggggcaccaugccgucccuaacggaacgauuguuaagaccaucacaaaugauagaauugaggugacuaacgcgaccgaauuaguacaaaauucuucaaucggugagauaugcgacaguccacaccagauccuggauggcgaaaacuguacacuaauugacgcucuccugggggauccgcagugcgacggauuucagaauaaaaagugggaucuuuucguggagaggagcaaagccuauuccaacuguuaccccuaugacgucccugauuacgcaucucugcggucguugguggccucaagcggcacccucgaauuuaauaacgagaguuucaauuggacugguaucacacaaaacgggaccuccucugcuugcauucgccgaagcuccucaaguuucuucagccgucugaauuggcugacgcaucucaacuauacuuacccagcauuaaauguuaccaugcccaacaacgagcaguuugacaagcuguauaucuggggagugcaccauccuggcacagauaaggaccagauauuccuuuacgcccagucuuccggcagaauuacugucucaaccaaaaggagccaacaggcugugaucccaaauauugggagucggccccgcaucagagauaucccuucuaggauuuccauauacuggacaaucguaaagccaggagacauuuugcugaucaacagcaccgguaaucuaauagccccgcggggcuauuuuaaaauucgcucggggaagucuuccaucaugcgaucagacgcgcccaucggaaaauguaagagugaaugcauuacgccuaacggcagcaucccaaaugauaagcccuuccagaacguuaauagaauuacuuacggugcauguccuagguaugugaaacacuccacacucaagcuggccaccgggaugcggaacgucccagagaaacagacucguggaauauuuggcgcuaucgccggcuucauugaaaaugggugggagggaaugguggacgguugguacggcuuucgccaccaaaacucugaggggagaggacaggcagcugaucuuaagagcacacaggccgcgaucgaccaaaucaauggcaaacugaacagguugauugguaagaccaaugaaaaauuccaucagauagagaaggaauuuucagagguggaagggcggauccaggaucucgagaaguaugucgaggacacgaaaauugaucuguggaguuacaacgccgaauuacugguugcacucgagaaucagcacaccaucgaccuuacagauuccgaaaugaacaagcuguuugagaaaacuaagaaacaauugcgagaaaacgcugaggacaugggcaauggaugcuucaagauuuaucauaagugugauaacgccugcaucggcagcauacgcaaugggaccuacgaccacaacguguacagagacgaggcucuaaauaacagguuucagaucaaaggaguagaacugaagucugguuauaaagauuggauucucuggaucucauucgccauuaguugcuuucugcuuuguguggcacuguugggcuucaucaugugggccugccagaaggggaauauacgguguaacauuugcaucuga

SEQ ID NO: 141090 - RNA, 1701 nt, Artificial Sequence; identical to SEQ ID NO: 141046
  derived and/or modified CDS sequence (opt3) from hemagglutinin__InfluenzaA__ALA08557

SEQ ID NO: 141091 - RNA, 1701 nt, Artificial Sequence; identical to SEQ ID NO: 141046
  derived and/or modified CDS sequence (opt3) from hemagglutinin__InfluenzaA__ALA08558

SEQ ID NO: 141092 - RNA, 1701 nt, Artificial Sequence
  derived and/or modified CDS sequence (opt3) from hemagglutinin__InfluenzaA__ALA08559
augaagaccaucauugcccugagcuacauacucugccuuguguucgcucagaaaauccccggcaacgacaauuccacagcaacucuguguuuggggcaccaugccgucccuaacggaacgauuguuaagaccaucacaaaugauagaauugaggugacuaacgcgaccgaauuaguacaaaauucuucaaucggugagauaugcgacaguccacaccagauccuggauggcgaaaacuguacacuaauugacgcucuccugggggauccgcagugcgacggauuucagaauaaaaagugggaucuuuucguggagaggagcaaagccuauuccaacuguuaccccuaugacgucccugauuacgcaucucugcggucguugguggccucaagcggcacccucgaauuuaauaacgagaguuucaauuggacugguguuacacaaaacgggaccuccucugcuugcauccgccgaagcuccucaaguuucuucagccgucugaauuggcugacgcaucucaacuauacuuacccagcauuaaaugugaccaugcccaacaacgagcaguuugacaagcuguauauuuggggaguccaccauccuggcacagauaaggaccagaucuuccuuuacgccagaucuuccggcaggauaacugugucaaccaaagggagccagcaagcuguaauuccaaauaucggaagucggccccgcauuagagauaucccuucuaggaucuccauuuacuggacaauaguuaagccaggugacaucuugcugauuaacagcgccggcaaucuaaucgcgccgcggggguauuuuaaaauacgcucgggaaagucuuccauuaugcgaucagacgcacccaucggcaaauguaagagugaaugcaucaccccuaacgguagcauuccaaaugauaagcccuuccagaacgugaauagaaucacguacggggccuguccuagguaugucaaacacuccacucucaagcuggcuacaggaaugcggaacgugccagagaaacagacccguggcauuuuuggcgccauagcaggguucaucgaaaauggaugggaggguaugguggacggcugguacggguuucgccaccagaacucugagggaagaggccaagcugccgaucuuaagagcacucaggcggccauugaccagaucaaugguaaacugaacagguugaucgggaagacaaaugaaaaauuccaucaaauugagaaggaauuuucagaggucgaaggccggauacaggaucucgagaaguauguugaggacaccaaaaucgaucuguggaguuacaacgcagaauuacugguggcucucgagaaucagcacacgauugaccuuaccgauuccgaaaugaacaagcuguuugagaaaacaaagaaacaguugcgagaaaacgccgaggacaugggaaauggcugcuucaagaucuaucauaagugugauaacgcuugcauugggagcauccgcaauggaacuuacgaccacaacguauacagagacgaggcccuaaauaacagguuucaaauaaaagguguggaacugaagucuggcuauaaagauuggauccucuggauuucauucgcaaucaguugcuuucugcuuugugucgcccuguugggguucauuaugugggcuugccagaagggaaauauccgguguaacauaugcauuuga

SEQ ID NO: 141093 - RNA, 1701 nt, Artificial Sequence; identical to SEQ ID NO: 140489
  derived and/or modified CDS sequence (opt3) from hemagglutinin__InfluenzaA__ALA08560

SEQ ID NO: 141094 - RNA, 1701 nt, Artificial Sequence
  derived and/or modified CDS sequence (opt3) from hemagglutinin__InfluenzaA__ALA08561
augaagaccaucauugcccugagcuacauacucugccuuguguucgcucagaaaauccccggcaacgacaauuccacagcaacucuguguuuggggcaccaugccgucccuaacggaacgauuguuaagaccaucacaaaugauagaauugaggugacuaacgcgaccgaauuaguacaaaauucuucaaucggugagauaugcgacaguccacaccagauccuggauggcgaaaacuguacacuaauugacgcucuccugggggauccgcagugcgacggauuucagaauaaaaagugggaucuuuucguggagaggagcaaagccuauuccaacuguuaccccuaugacgucccugauuacgcaucucugcggucguugguggccucaagcggcacccucgaauuuaauaacgagaguuucaauuggacugguguuacacaaaacgggaccuccucugcuugcauccgccgaagcuccucaaguuucuucagccgucugaauuggcugacgcaucucaacuauaaguacccagcauuaaaugugacuaugcccaacaaggagcaguuugacaaacuguauauuuggggaguccaccauccuggcaccgauaaggaccagaucuuccuuuacgcccagucuuccggcagaauaacagugucaacuaaaaggagccaacaggcuguaauuccaaacaucgggagucggccccgcauuagagauaucccuucuaggaucuccauuuacuggaccauaguuaagccaggagacaucuugcugauuaauagcacagguaaccuaaucgccccgcggggcuauuuuaaaauacgcucggggaagucuuccauuaugcgaucagacgcgcccaucggaaaguguaaaagugaaugcaucaccccuaauggcagcauuccaaacgauaagcccuuccagaaugugaacagaaucacguacggugcauguccuagguaugucaaacacuccacucucaagcuggccacagggaugcggaaugugccagagaaacagacccguggaauuuuuggcgcuauagccggcuucaucgaaaacgggugggagggaaugguggacgguugguacggcuuucgccaccaaaauucugaggggagaggacaggcagcugaucuuaagagcacucaggccgcgauugaccaaaucaacggcaaacugaauagguugaucgguaagacaaacgaaaaguuccaucagauugagaaagaauuuucagaggucgaagggcggauacaggaucucgagaaguauguugaggacaccaaaaucgaucuguggaguuacaaugccgaauuacugguggcacucgagaaccagcacacgauugaccuuaccgauuccgaaaugaauaagcuguuugagaaaacaaagaagcaauugcgagaaaacgcugaggacaugggcaacggaugcuucaaaaucuaucauaagugugauaaugccugcauuggcagcauccgcaacgggacuuacgaccacaauguauacagagacgaggcucuaaacaauagguuucagauaaaaggaguggaacugaagucugguuauaaagauuggauccucuggauuucauucgccaucaguugcuuucugcuuugugucgcacuguugggcuucauuaugugggccugccagaaggggaacauccgguguaauauaugcauuuga

SEQ ID NO: 141095 - RNA, 1701 nt, Artificial Sequence
  derived and/or modified CDS sequence (opt3) from hemagglutinin__InfluenzaA__ALA08563
augaagaccaucauugcccugagcuacauacucugccuuguguucgcucagaaaauccccggcaacgacaauuccacagcaacucuguguuuggggcaccaugccgucccuaacggaacgauuguuaagaccaucacaaaugauagaauugaggugacuaacgcgaccgaauuaguacaaaauucuucaaucggugagauaugcgacaguccacaccagauccuggauggcgaaaacuguacacuaauugacgcucuccugggggauccgcagugcgacggauuucagaauaaaaagugggaucuuuucguggagaggagcaaagccuauuccaacuguuaccccuaugacgucccugauuacgcaucucugcggucguugguggccucaagcggcacccucgaauuuaauaacgagaguuucaauuggacugguguuacacaaaacgggaccuccucugcuugcauccgccgaagcuccucaaguuucuucagccgucugaauuggcugacgcaucucaacuauacuuacccagcauuaaaugugaccaugcccaacaacgagcaguuugacaagcuguauauuuggggaguccaccauccuggcacagauaaggaccagaucuuccuuuacgcccagucuuccggcagaauaacugugucaaccaaaaggagccaacaggcuguaauuccaaauaucgggagucggccccgcauuagagauaucccuucuaggaucuccauuuacuggacaauaguuaagccaggagacaucuugcugauuaacagcaccgguaaucuaaucgccccgcggggcuauuuuaaaauacucucggggaagucuuccauuaugcgcucagacgcgcccaucggaaaauguaagagugaaugcaucacgccuaacggcagcauuccaaaugauaagcccuuccagaacgugaaucgaaucacuuacggugcauguccuagauaugucaaacacuccacacugaagcuggccaccgggaugaggaacgugccagagaaacagacucggggaauuuuuggcgcuauagccggcuucaucgaaaaugggugggagggaaugguggacgguugguacggcuuucgucaccaaaacucugaggggcgcggacaggcagcugaucuuaagagcacacaggccgcgauugaccaaaucaauggcaaauugaacagacucaucgguaagaccaaugaaaaauuccaucagauugagaaggaauuuucagaggucgaagggaggauacaggaucuggagaaguauguugaggacacgaaaaucgauuuauggaguuacaacgccgaacugcucguggcacuugagaaucagcacaccauugaccugacagauuccgaaaugaacaaguuguuugagaaaacuaagaaacaacuacgggaaaacgcugaggacaugggcaauggaugcuucaagaucuaucauaagugugauaacgccugcauuggcagcauccgaaaugggaccuacgaccacaacguauaccgcgacgaggcucugaauaacagauuucagauaaaaggaguggaacucaagucugguuauaaagauuggauccuguggauuucauucgccaucaguugcuuucuucugugugucgcauugcucggcuucauuaugugggccugccagaaggggaauaucagguguaacauaugcauuuga

SEQ ID NO: 141096 - RNA, 1701 nt, Artificial Sequence
  derived and/or modified CDS sequence (opt3) from hemagglutinin__InfluenzaA__ALA08571
augaagaccaucauugcccugagcuacauacucugccuuguguucgcucagaaaauccccggcaacgacaauuccacagcaacucuguguuuggggcaccaugccgucccuaacggaacgauuguuaagaccaucacaaaugauagaauugaggugacuaacgcgaccgaauuaguacaaaauucuucaaucggugagauaugcgacaguccacaccagauccuggauggcgaaaacuguacacuaauugacgcucuccugggggauccgcagugcgacggauuucagaauaaaaagugggaucuuuucguggagaggagcaaagccuauuccaacuguuaccccuaugacgucccugauuacgcaucucugcggucguugguggccucaagcggcacccucgaauuuaauaacgagaguuucaauuggacugguguuacacaaaacgggaccuccucugcuugcauccgccgaagcuccucaaguuucuucagccgucugaauuggcugacgcaucucaacuauacuuacccagcauuaaaugugaccaugcccaacaacgagcaguuugacaagcuguauauuuggggaguccaccauccuggcacagauaaggaccagaucuuccuuuacgcccagucuuccggcagaauaacugugucaaccaaaaggagccaacaggcuguaauuccaaauaucgggagucggccccgcauuagagauaucccuucuaggaucuccauuuacuggacaauaguuaagccaggagacaucuugcugauuaacagcaccgguaaucuaaucgccccgcggggcuauuuuaaaauacgcucggggaagucuuccauuaugcgaucagacgcgcccaucggaaaauguaagagugaaugcaucacgccuaacggcagcauuccaaaugauaagcccuuccagaacgugaauagaaucacuuacggugcauguccuagguaugucaaacacuccacacucaagcuggccaccgggaugcggaacgugccagagaaacagacucguggaauuuuuggcgcuauagccggcuucaucgaaaaugggugggagggaaugguggacgguugguacggcuuucgccaccaaaacucugaggggagaggacaggcagcugaucuuaagagcacacaggccgcgauugaccaaaucaauggcaaacugaacagguugaucgguaagaccaaugaaaaauuccaucagauugagaaggaauuuucagaggucgaagggcggauacaggaucucgagaaguauguugaggacacgaaaaucgaucuguggaguuacaacgccgaauuacugguggcacucgagaaucagcacaccauugaccuuacagauuccgaaaugaacaagcuguuugagaaaacuaagaaacaauugcgagaaaacgcugaggacaugggcaauggaugcuucaagaucuaucauaagugugauaacgccugcauuggcagcauccgcaaugggaccuacgaccacaacguauacagagacgaggcucuaaauaacagguuucagauaaaaggaguggaacugaagucugguuauaaagauuggauccucuggauuucauucgccacaaguugcuuucugcuuugugucgcacuguugggcuucaucaugugggccugccagaaggggaauauucgguguaacaucugcauauga

SEQ ID NO: 141097 - RNA, 1701 nt, Artificial Sequence; identical to SEQ ID NO: 141032
  derived and/or modified CDS sequence (opt3) from hemagglutinin__InfluenzaA__ALA08572

SEQ ID NO: 141098 - RNA, 1701 nt, Artificial Sequence; identical to SEQ ID NO: 141029
  derived and/or modified CDS sequence (opt3) from hemagglutinin__InfluenzaA__ALA08573

SEQ ID NO: 141099 - RNA, 1701 nt, Artificial Sequence
  derived and/or modified CDS sequence (opt3) from hemagglutinin__InfluenzaA__ALA08574
augaagaccaucauugcccugagcuacauacucugccuuguguucgcucagaaaauccccggcaacgacaauuccacagcaacucuguguuuggggcaccaugccgucccuaacggaacgauuguuaagaccaucacaaaugauagaauugaggugacuaacgcgaccgaauuaguacaaaauucuucaaucggugagauaugcgacaguccacaccagauccuggauggcgaaaacuguacacuaauugacgcucuccugggggauccgcagugcgacggauuucagaauaaaaagugggaucuuuucguggagaggagcaaagccuauuccaacuguuaccccuaugacgucccugauuacgcaucucugcggucguugguggccucaagcggcacccucgaauuuaauaacgagaguuucaauuggacugguguuacacaaaacgggaccuccucugcuugcauccgccgaagcuccucaaguuucuucagccgucugaauuggcugacgcaucucaacuauacuuacccagcauuaaaugugaccaugcccaacaacgagcaguuugacaagcuguauauuuggggaguccaccauccuggcacagauaaggaccagaucuuccuuuacgcccagucuuccggcagaauaacugugucaaccaaaaggagccaacaggcuguaauuccaaauaucgggagucggccccgcauuagagauaucccuucuaggaucuccauuuacuggacaauaguuaagccaggagacaucuugcugauuaacagcaccgguaaucuaaucgccccgcggggcuauuuuaaaauacgcucggggaagucuuccauuaugcgaucagacgcgcccaucggaaaauguaagagugaaugcaucacgccuaacggcagcauuccaaaugauaagcccuuccagaacgugaauagaaucacuuacggugcauguccuagguaugucaaacacuccacacucaagcuggccaccgggaugcggaacgugccagagaaacagacucguggaauuuuuggcgcuauagccggcuucaucgaaaaugggugggagggaaugguggacgguugguacggcuuucgccaccaaaacucugaggggagaggacaggcagcugaucuuaagagcacacaggccgcgauugaccaaaucucaggcaaacugaauagguugaucgguaagaccaacgaaaaauuccaucagauugagaaggaauuuagugaggucgaagggcggauacaggaucucgagaaguauguugaggacacgaaaaucgaucugugguccuacaaugccgaauuacugguggcacucgagaaccagcacaccauugaccuuacagauagcgaaaugaauaagcuguuugagaaaacuaagaaacaauugcgagaaaacgcugaggacaugggcaacggaugcuucaagaucuaucauaagugugauaaugccugcauuggcucuauccgcaacgggaccuacgaccacaauguauacagagacgaggcucuaaacaauagguuucagauaaaaggaguggaacugaagucagguuauaaagauuggauccucuggauuaguuucgccaucagcugcuuucugcuuugugucgcacuguugggcuucauuaugugggccugccagaaggggaacauccgguguaauauaugcauuuga

SEQ ID NO: 141100 - RNA, 1701 nt, Artificial Sequence
  derived and/or modified CDS sequence (opt3) from hemagglutinin__InfluenzaA__ALA08575
augaagaccaucauugcccugagcuacauacucugccuuguguucgcucagaaaauccccggcaacgacaauuccacagcaacucuguguuuggggcaccaugccgucccuaacggaacgauuguuaagaccaucacaaaugauagaauugaggugacuaacgcgaccgaauuaguacaaaauucuucaaucggugagauaugcgacaguccacaccagauccuggauggcgaaaacuguacacuaauugacgcucuccugggggauccgcagugcgacggauuucagaauaaaaagugggaucuuuucguggagaggagcaaagccuauuccaacuguuaccccuaugacgucccugauuacgcaucucugcggucguugguggccucaagcggcacccucgaauuuaauaacgagaguuucaauuggacugguguuacacaaaacgggaccuccucugcuugcauccgccgaagcuccucaaguuucuucagccgucugaauuggcugacgcaucucaacuauacuuacccagcauuaaaugugaccaugcccaacaacgagcaguuugacaagcuguauauuuggggaguccaccauccuggcacagauaaggaccagaucuuccuuuacgcccagucuuccggcagaauaacugugucaaccaaaaggagccaacaggcuguaauuccaaauaucgggagucggccccgcauuagagauaucccuucuaggaucuccauuuacuggacaauaguuaagccaggagacaucuugcugauuaacagcaccgguaaucuaaucgccccgcggggcuauuuuaaaauacgcucggggaagucuuccauuaugcgaucagacgcgcccaucggaaaauguaagagugaaugcaucacgccuaacggcagcauuccaaaugauaagcccuuccagaacgugaauagaaucacuuacggugcauguccuagguaugucaaacaguccacacucaagcuggccaccgggaugcggaacgugccagagaaacaaacucguggaauuuuuggcgcuauagccggcuucaucgaaaaugggugggagggaaugguggacgguugguacggcuuucgccaccagaacucugaggggagaggacaggcagcugaucuuaagagcacacaagccgcgauugaccagaucaauggcaaacugaacagguugaucgguaagaccaaugaaaaauuccaccagauugagaaggaauuuucagaggucgaagggcggauacaggaucucgagaaguauguugaggacacgaaaaucgaucuguggaguuacaacgccgaauuacugguggcacucgagaaucaacauaccauugaccuuacagauuccgaaaugaacaagcuguuugagaaaacuaagaaacaguugcgagaaaacgcugaggacaugggcaauggaugcuucaagaucuaucacaagugugauaacgccugcauuggcagcauccgcaaugggaccuacgaccauaacguauacagagacgaggcucuaaauaacagguuucagauaaaaggaguggaacugaagucugguuauaaagauuggauccucuggauuucauucgccaucaguugcuuucugcuuugugucgcacuguugggcuucauuaugugggccugccagaaggggaauauccgguguaacauaugcauuuga

SEQ ID NO: 141101 - RNA, 1701 nt, Artificial Sequence; identical to SEQ ID NO: 140489
  derived and/or modified CDS sequence (opt3) from hemagglutinin__InfluenzaA__ALA08576

SEQ ID NO: 141102 - RNA, 1701 nt, Artificial Sequence; identical to SEQ ID NO: 140489
  derived and/or modified CDS sequence (opt3) from hemagglutinin__InfluenzaA__ALA08577

SEQ ID NO: 141103 - RNA, 1701 nt, Artificial Sequence
  derived and/or modified CDS sequence (opt3) from hemagglutinin__InfluenzaA__ALA08579
augaagaccaucauugcccugagcuacauacucugccuuaucuucgcucagaaaauucccggcaacgacaauuccacagcaacucuguguuuggggcaccaugccgugccuaacggaacgaucgucaagaccauuacaaaugauagaaucgagguuacuaacgcgaccgaauuagugcaaaauucuucaauaggugagaucugcgacaguccacaccagauucuggauggcgaaaacuguacacuaaucgacgcucuccugggggauccgcagugcgacggauuucagaauaaaaagugggaucuuuucguagagaggagcaaagccuauuccaacuguuaccccuaugacgugccugauuacgcaucucugcggucguuggucgccucaagcggcacccucgaauuuaauaacgagaguuucaauuggacuggugugacacaaaacgggaccuccucugcuugcauucgcaagagcuccucaaguuucuucagccgacugaauuggcugacgcaucucaacuauacuuacccagcauuaaauguuaccaugcccaacaacgagcaguuugacaagcuguauaucuggggagugcaccauccuggcacagauaaagaccagauauuccuuuacgcccguucuuccggcagaauuacugucucaaccaagaggagccagcaagcugugaucccaaauauugggagucggccccgcaucagagauaucccuucuaggauuuccauauacuggacaaucguaaaaccaggagacauuuugcugaucaacagcaccgguaaucuaauagccccgcggggcuauuuuaagauucgcucggggaaaucuuccaucaugcgaucagacgcgcccaucggaaaguguaagagugaaugcauuacgccuaacggcagcaucccaaaugauaaacccuuccagaacguuaauagaauuacuuacggugcauguccuagguaugugaagcacuccacacucaaacuggccaccgggaugcggaacgucccagagaagcagacucguggaauauuuggcgcuaucgccggcuucauugaaaaugggugggagggaaugguggacgguugguacggcuuucgccaccagaacucugaggggagaggacaagcagcugaucuuaaaagcacacaggccgcgaucgaccagaucaauggcaagcugaacagguugauugguaaaaccaaugaaaaguuccaucaaauagagaaggaauuuucagagguggaagggcggauccaggaucucgagaaauaugucgaggacacgaagauugaucuguggaguuacaacgccgaauuacugguugcacucgagaaucagcacaccaucgaccuuacagauuccgaaaugaacaaacuguuugagaagacuaaaaagcaguugcgagaaaacgcugaggacaugggcaauggaugcuucaagauuuaucauaaaugugauaacgccugcaucggcagcauacgcaaugggaccuacgaccacaacguguacagagacgaggcucuaaauaacagguuucaaaucaagggaguagaacugaaaucugguuauaaggauuggauucucuggaucucauucgccauuaguugcuuucugcuuuguguggcacuguugggcuucaucaugugggccugccagaaagggaauauacgguguaacauuugcaucuga

SEQ ID NO: 141104 - RNA, 1701 nt, Artificial Sequence
  derived and/or modified CDS sequence (opt3) from hemagglutinin__InfluenzaA__ALA08580
augaagaccaucauugcccugagcuacauacucugccuuguguucgcucagaaaauccccggcaacgacaauuccacagcaacucuguguuuggggcaccaugccgucccuaacggaacgauuguuaagaccaucacaaaugauagaauugaggugacuaacgcgaccgaauuaguacaaaauucuucaaucggugagauaugcgacaguccacaccagauccuggauggcgaaaacuguacacuaauugacgcucuccugggggauccgcagugcgacggauuucagaauaaaaagugggaucuuuucguggagaggagcaaagccuauuccaacuguuaccccuaugacgucccugauuacgcaucucugcggucguugguggccucaagcggcacccucgaauuuaauaacgagaguuucaauuggacugguguuacacaaaacgggaccuccucugcuugcauccgccgaagcuccucaaguuucuucagccgucugaauuggcugacgcaucucaacuauacuuacccagcauuaaaugugaccaugcccaacaacgagcaguuugacaagcuguauauuuggggaguccaccauccuggcacagauaaggaccagaucuuccuuuacgccagaucuuccggcaggauaacugugucaaccaaagggagccagcaagcuguaauuccaaauaucggaagucggccccgcauuagagauaucccuucuaggaucuccauuuacuggacaauaguuaagccaggugacaucuugcugauuaacagcaccggcaaucuaaucgccccgcggggguauuuuaaaauacgcucgggaaagucuuccauuaugcgaucagacgcgcccaucggcaaauguaagagugaaugcaucacgccuaacgguagcauuccaaaugauaagcccuuccagaacgugaauagaaucacuuacggggcauguccuagguaugucaaacacuccacacucaagcuggccaccggaaugcggaacgugccagagaaacagacucguggcauuuuuggcgcuauagccggguucaucgaaaauggaugggaggguaugguggacggcugguacggguuucgccaccagaacucugagggaagaggccaagcagcugaucuuaagagcacacaggccgcgauugaccagaucaaugguaaacugaacagguugaucgggaagaccaaugaaaaauuccaucaaauugagaaggaauuuucagaggucgaaggccggauacaggaucucgagaaguauguugaggacacgaaaaucgaucuguggaguuacaacgccgaauuacugguggcacucgagaaucagcacaccauugaccuuacagauuccgaaaugaacaagcuguuugagaaaacuaagaaacaguugcgagaaaacgcugaggacaugggaaauggcugcuucaagaucuaucauaagugugauaacgccugcauugggagcauccgcaauggaaccuacgaccacaacguauacagagacgaggcucuaaauaacagguuucaaauaaaagguguggaacugaagucuggcuauaaagauuggauccucuggauuucauucgccaucaguugcuuucugcuuugugucgcacuguugggguucauuaugugggccugccagaagggaaauauccgguguaacauaugcauuuga

SEQ ID NO: 141105 - RNA, 1701 nt, Artificial Sequence
  derived and/or modified CDS sequence (opt3) from hemagglutinin__InfluenzaA__ALA08582
augaagaccaucauugcccugagcuacauacucugccuuguguucgcucagaaacugcccgagaacgacaauuccacagcaacuuuguguuuaggccaccaugccgucccuaacgggacgaucguuaagaccauuacaaaugauagaaucgaagugacuaacgcgaccgagcugguacaaaauucuucaauuggagaaaucugcgacaguccacaccagauacuagaugguaaaaacuguacacucaucgacgcucugcuuggcgauccgcagugcgacggguuucagaauaagaaaugggaucuguucguggagaggagcaaggccuauuccaacuguuaccccuaugacgucccugauuacgcaucuuugcggucgcucguggccucaagcggaacccuggaauuuaaugacgagaguuucaacugggcuggcguuacucaaaaugguacauccucugcaugcauucgcgggagcaacuccucauuuuucagucgacugaauuggcucacccauagcaacuuuaaguauccagccuuaaaugugacgaugcccaacaacgagcaguucgauaaacuguacaucuggggaguccaccauccuggcacugacaaggaucagauuuuucuuuaugcucagucuuccggccguaucaccgugucaacaaaaagaagccaacaggccguaauaccaaauauugggaguaggccccggauccgcaacauuccuucuagaaucuccaucuacuggacuauuguuaagccaggagacauauugcugaucaauagcaccgguaaccuaauugcgccgaggggcuacuucaaaauccggucggggaagucuuccauaaugcgcucagacgcacccauuggaaaguguaaaagugaaugcaucacaccuaauggcagcaucccaaacgauaagcccuuucagaaugugaaccgaauuaccuauggugccuguccuagauacgucaaacaguccacgcucaagcuggcuacugggaugaggaaugugccagagaaacaaacacggggaaucuucggcgccauugcaggcuuuauagaaaacgggugggagggaaugaaggacgguugguauggcuuccgucaccaaaauucugaggggcgcggacaggcugccgaucuuaaaagcacccaggcggccaucgaccagauuaacggcaagcugaauagauugaucgguaagacuaacgaaaaauuccaccagaucgagaaggaauuuucagagguggaagggaggauucaggaucucgagaaauacgucgaggacacaaagauagaucuguggaguuauaaugcagaauuacugguugcucucgagaaccaacauaccaucgaccuuacggauuccgaaaugaacaaacuguucgagaagaccaagaaacaguugcgggaaaaugccgaggacaugggcaacggaugcuuuaagauuuaccacaaaugugauaaugcuugcaucggcagcauucgaaacgggacauaugaccaugacguguaccgcgaugaggcccuaaauaacagauuccagaucaagggaguagaacugaaaucugguuacaaggacuggauacucuggaucucauuugcaauuaguugcuuccugcuuuguguggcccuguugggcuuuaucaugugggcuugccagaaggggaauauuagguguaacaucugcauauga

SEQ ID NO: 141106 - RNA, 1701 nt, Artificial Sequence; identical to SEQ ID NO: 141105
  derived and/or modified CDS sequence (opt3) from hemagglutinin__InfluenzaA__ALA08583

SEQ ID NO: 141107 - RNA, 1701 nt, Artificial Sequence; identical to SEQ ID NO: 141105
  derived and/or modified CDS sequence (opt3) from hemagglutinin__InfluenzaA__ALA08584

SEQ ID NO: 141108 - RNA, 1701 nt, Artificial Sequence; identical to SEQ ID NO: 141105
  derived and/or modified CDS sequence (opt3) from hemagglutinin__InfluenzaA__ALA08585

SEQ ID NO: 141109 - RNA, 1701 nt, Artificial Sequence; identical to SEQ ID NO: 140489
  derived and/or modified CDS sequence (opt3) from hemagglutinin__InfluenzaA__ALA08586

SEQ ID NO: 141110 - RNA, 1701 nt, Artificial Sequence; identical to SEQ ID NO: 141105
  derived and/or modified CDS sequence (opt3) from hemagglutinin__InfluenzaA__ALA08587

SEQ ID NO: 141111 - RNA, 1701 nt, Artificial Sequence; identical to SEQ ID NO: 140489
  derived and/or modified CDS sequence (opt3) from hemagglutinin__InfluenzaA__ALA08588

SEQ ID NO: 141112 - RNA, 1701 nt, Artificial Sequence; identical to SEQ ID NO: 140489
  derived and/or modified CDS sequence (opt3) from hemagglutinin__InfluenzaA__ALA08589

SEQ ID NO: 141113 - RNA, 1701 nt, Artificial Sequence; identical to SEQ ID NO: 141105
  derived and/or modified CDS sequence (opt3) from hemagglutinin__InfluenzaA__ALA08590

SEQ ID NO: 141114 - RNA, 1701 nt, Artificial Sequence; identical to SEQ ID NO: 140489
  derived and/or modified CDS sequence (opt3) from hemagglutinin__InfluenzaA__ALA08591

SEQ ID NO: 141115 - RNA, 1701 nt, Artificial Sequence; identical to SEQ ID NO: 141046
  derived and/or modified CDS sequence (opt3) from hemagglutinin__InfluenzaA__ALA08592

SEQ ID NO: 141116 - RNA, 1701 nt, Artificial Sequence
  derived and/or modified CDS sequence (opt3) from hemagglutinin__InfluenzaA__ALA08594
augaagaccaucauugcccugagcuacauacucugccuuguguucgcucagaaacugcccgagaacgacaauuccacagcaacuuuguguuuaggccaccaugccgucccuaacgggacgaucguuaagaccauuacaucugauagaaucgaagugacuaaugcgaccgagcugguacaaaacucaaguauuggagaaaucugcgacagcccacaccagauacuagaugguaaaaauuguacacucaucgacgcucugcuuggcgauccgcagugcgacggguuucagaacaagaaaugggaucuguucguggagagguccaaggccuauucuaauuguuaccccuaugacgucccugauuacgcaucguugcggucacucguggccagcaguggaacccuggaauuuaacgacgaguccuucaauugggcuggcguuacucaaaacgguacaucuagcgcaugcauucgcggguccaauucaaguuucuuuagccgacugaacuggcucacccauucuaauuuuaaguauccagccuuaaacgugacgaugcccaauaacgagcaguucgauaaacuguacaucuggggaguccaccauccuggcacugacaaggaucagauuuuucuuuaugcucaguccucaggccguaucaccgugagcacaaaaagaagucaacaggccguaauaccaaacauugggucuaggccccggauccgcaauauuccuuccagaaucagcaucuacuggacuauuguuaagccaggagacauauugcugaucaacucgaccgguaaucuaauugcgccgaggggcuacuucaaaauccggucugggaaguccucaauaaugcgcagugacgcacccauuggaaaguguaaaagcgaaugcaucacaccuaacggcuccaucccaaaugauaagcccuuucagaacgugaaucgaauuaccuauggugccuguccuagauacgucaaacagucuacgcucaagcuggcuacugggaugaggaacgugccagagaaacaaacacggggaaucuucggcgccauugcaggcuuuauagaaaaugggugggagggaaugaaggacgguugguauggcuuccgucaccagaacagcgaggggcgcggacaggcugccgaucuuaaaucaacccaagcggccaucgaccagauuaauggcaagcugaacagauugaucgguaagacuaaugaaaaauuccaccagaucgagaaggaauuuagugagguggaagggaggauucaggaucucgagaaauacgucgaggacacaaagauagaucugugguccuauaacgcagaauuacugguugcucucgagaaucaacauaccaucgaccuuacggauagcgaaaugaacaaacuguucgagaagaccaagaaacaguugcgggaaaacgccgaggacaugggcaauggaugcuuuaagauuuaccacaaaugugauaacgcuugcaucggcucuauucgaaaugggacauaugaccaugacguguaccgcgaugaggcccuaaacaauagauuccagaucaagggaguagaacugaaaucagguuacaaggacuggauacucuggaucaguuuugcaaugagcugcuuccugcuuuguguggcccuguugggcuuuauuaugugggcuugccagaaggggaacaucagguguaauauuugcaucuga

SEQ ID NO: 141117 - RNA, 1701 nt, Artificial Sequence; identical to SEQ ID NO: 140489
  derived and/or modified CDS sequence (opt3) from hemagglutinin__InfluenzaA__ALA08595

SEQ ID NO: 141118 - RNA, 1701 nt, Artificial Sequence; identical to SEQ ID NO: 140489
  derived and/or modified CDS sequence (opt3) from hemagglutinin__InfluenzaA__ALA08596

SEQ ID NO: 141119 - RNA, 1701 nt, Artificial Sequence
  derived and/or modified CDS sequence (opt3) from hemagglutinin__InfluenzaA__ALA08597
augaagaccaucauugcccugagcuacauacucugccuuguguucgcucagaaaauccccggcaacgacaauuccacagcaacucuguguuuggggcaccaugccgucccuaacggaacgauuguuaagaccaucacaaaugauagaauugaggugacuaacgcgaccgaauuaguacaaaauucuucaaucggugagauaugcgacaguccacaccagauccuggauggcgaaaacuguacacuaauugacgcucuccugggggauccgcagugcgacggauuucagaauaaaaagugggaucuuuucguggagaggagcaaagccuauuccaacuguuaccccuaugacgucccugauuacgcaucucugcggucguugguggccucaagcggcacccucgaauuuaauaacgagaguuucaauuggacugguguuacacaaaacgggaccuccucugcuugcauccgccgaagcuccucaaguuucuucagccgucugaauuggcugacgcaucucaacuauacuuacccagcauuaaaugugaccaugcccaacaacgagcaguuugacaagcuguauauuuggggaguccaccauccuggcacagauaaggaccagaucuuccuuuacgcccagucuuccggcagaauaacugugucaaccaaaaggagccaacaggcuguaauuccaaauaucgggagucggccccgcauuagagauaucccuucuaggaucuccauuuacuggacaauaguuaagccaggagacaucuugcugauuaacagcaccgguaaucuaaucgccccgcggggcuauuuuaaaauacgcucggggaagucuuccauuaugcgaucagacgcgcccaucggaaaauguaagagugaaugcaucacgccuaacggcagcauuccaaaugauaagcccuuccagaacgugaauagaaucacuuacggugcauguccuagguaugucaaacacuccacacucaagcuggccaccgggaugcggaacgugccagagaaacagacucguggaauuuuuggcgcuauagccggcuucaucgaaaaugggugggagggaaugguggacgguugguacggcuuucgccaccaaaacucugaggggagaggacaggcagcugaucuuaagagcacacaggccgcgauugaccaaaucaauggcaaacugaacagguugaucgguaagaccaaugaaaaauuccaucagauugagaaggaauuuucagaggucgaagggcggauacaggaucucgagaaguauguugaggacacgaaaaucgaucuguggaguuacaacgccgaauuacugguggcacucgagaaucagcacaccauugaccuuacagauuccgaaaugaacaagcuguuugagaaaacuaagaaacaauugcgagaaaacgcugaggacaugggcaauggaugcuucaagaucuaucauaagugugauaacgccugcauuggcagcauccgcaaugggaccuacgaccacaacguauacagagacgaggcucuaaauaacagguuucagauaaaaggaguggaacugaagucugguuauaaagauuggauccucuggauuucauucgccaucaguugcuuucugcuuugugucgcacuguugggcuucauuaugugggccugccagaaugggaacauccgguguaauauaugcauuuga

SEQ ID NO: 141120 - RNA, 1701 nt, Artificial Sequence
  derived and/or modified CDS sequence (opt3) from hemagglutinin__InfluenzaA__ALA08598
augaagaccaucauugccagcuccuacauacugugccucguguucgcucagaaaauccccggcaacgacaauucuacagcaacucuuugucuggggcaccaugccgucccuaacggaacgauuguuaagaccaucacaaaugauagaauugaggugacuaacgcgaccgaauugguacaaaauucaaguaucggugagauaugcgacagcccacaccagaucuuagauggcgaaaacuguacacugauugacgcucuacucggggauccgcagugcgacggauuucagaauaaaaagugggaucuguucguggagagguccaaagccuauucuaacuguuaccccuaugacgucccugauuacgcaucgcuucggucacugguggccagcaguggcaccuuggaauuuaauaacgaguccuucaauuggacugguguuacacaaaacgggaccucuagcgcuugcauccgccgauccucaaguagcuuuuucucucgucucaauuggcugacgcaucugaacuauacuuacccagcacucaaugugaccaugcccaacaacgagcaguuugacaaguuauauauuuggggaguccaccauccuggcacagauaaggaccagaucuuccuguacgcccaguccucaggcagaauaacugugagcaccaaaaggagucaacaggcuguaauuccaaauaucgggucucggccccgcauuagagauaucccuuccaggaucagcauuuacuggacaauaguuaagccaggagacauccuuuugauuaacucgaccgguaaucugaucgccccgcggggcuauuuuaaaauacgcucugggaaguccucaauuaugcgaagugacgcgcccaucggaaaauguaagagcgaaugcaucacgccuaacggcuccauuccaaaugauaagcccuuccagaacgugaauagaaucacuuacggugcauguccuagguaugucaaacacucuacacuaaagcucgccaccgggaugcggaacgugccagagaaacagacucguggaauuuuuggcgcuauagccggcuucaucgaaaaugggugggagggaaugguggacgguugguacggcuuucgccaccaaaacagcgaggggagaggacaggcagcugaucugaagucaacacaggccgcgauugaccaaaucaauggcaaacuuaacaggcugaucgguaagaccaaugaaaaauuccaucagauugagaaggaguucagugaagucgaagggcggauacaggauuuggagaaguauguugaggacacgaaaaucgaucucugguccuacaacgccgaacuguuaguggcacuggagaaucagcacaccauugaccucacagauagcgaaaugaacaaacuuuuugagaagacuaagaaacaacugcgagaaaacgcugaggacaugggcaauggaugcuucaagaucuaucauaagugugauaacgccugcauuggcucuauccgcaaugggaccuacgaccacaacguauacagagacgaggcuuugaauaacagguuucagauaaaaggaguggaacuaaagucagguuauaaagauuggauccuguggauuaguuucgccaucagcugcuuucuccugugugucgcacuucugggcuucauuaugugggccugccagaaggggaauauccgguguaacauaugcauuuga

SEQ ID NO: 141121 - RNA, 1701 nt, Artificial Sequence; identical to SEQ ID NO: 140489
  derived and/or modified CDS sequence (opt3) from hemagglutinin__InfluenzaA__ALA08599

SEQ ID NO: 141122 - RNA, 1701 nt, Artificial Sequence
  derived and/or modified CDS sequence (opt3) from hemagglutinin__InfluenzaA__ALA08600
augaagaccaucauugcccugagcuacauacucugccuuguguucgcucagaaaauccccggcaacgacaauuccacagcaacucuguguuuggggcaccaugccgucccuaacggaacgauuguuaagaccaucacaaaugauagaauugaggugacuaacgcgaccgaauuaguacaaaauucuucaaucggugagauaugcgacaguccacaccagauccuggauggcgaaaacuguacacuaauugacgcucuccugggggauccgcagugcgacggauuucagaauaaaaagugggaucuuuucguggagaggagcaaagccuauuccaacuguuaccccuaugacgucccugauuacgcaucucugcggucguugguggccucaagcggcacccucgaauuuaauaacgagaguuucaauuggacugguguuacacaaaacgggaccuccucugcuugcauccgccgaagcuccucaaguuucuucagccgucugaauuggcugacgcaucucaacuauagauacccagcauuaaaugugacuaugcccaacaacgagcaguuugacaagcuguauauuuggggaguccaccauccuggcaccgauaaggaccagaucucucuuuacgcccaguccucaggcaggauaacagugagcacuaaacggagucaacaggcuguaauuccaaauaucgggucucgccccagaauuagggauaucccuucccggaucagcauuuacuggaccauaguuaagccaggagacaucuugcugauuaacucgacagguaaucuaaucgccccgcgcggcuauuucaaaauacgaucugggaaguccucaauuaugagaagugacgcgcccaucggaaaauguaagagcgaaugcaucaccccuaacggcuccauuccaaaugauaagcccuuucagaacgugaauaggaucacguacggugcauguccucgguaugucaaacacucuacucucaagcuggccacagggaugcguaacgugccagagaaacagacccgcggaauuuucggcgcuauagccggcuuuaucgaaaaugggugggagggaaugguggacgguugguacggcuucagacaccaaaacagcgaggggaggggacaggcagcugaucuuaagucaacucaggccgcgauugaccaaaucaauggcaaacugaaccgguugaucgguaagacaaaugaaaaauuucaucagauugagaaggaauuuagugaggucgaagggcgaauacaggaucucgagaaguauguugaggacaccaaaaucgaucugugguccuacaacgccgaauuacugguggcacucgagaaucagcacacgauugaccuuaccgauagcgaaaugaacaagcuguucgagaaaacaaagaaacaauugcgcgaaaacgcugaggacaugggcaauggaugcuuuaagaucuaucauaagugugauaacgccugcauuggcucuaucagaaaugggacuuacgaccacaacguauacagggacgaggcucuaaauaaccgguuccagauaaaaggaguggaacugaagucagguuauaaagauuggauccucuggauuaguuuugccaucagcugcuuccugcuuugugucgcacuguugggcuuuauuaugugggccugccagaaggggaauauccgcuguaacauaugcauuuga

SEQ ID NO: 141123 - RNA, 1701 nt, Artificial Sequence; identical to SEQ ID NO: 140489
  derived and/or modified CDS sequence (opt3) from hemagglutinin__InfluenzaA__ALA08601

SEQ ID NO: 141124 - RNA, 1701 nt, Artificial Sequence
  derived and/or modified CDS sequence (opt3) from hemagglutinin__InfluenzaA__ALA08602
augaagaccaucauugcccugagcuacauacucugccuuguguucgcucagaaaauccccggcaacgacaauuccacagcaacucuguguuuggggcaccaugccgucccuaacggaacgauuguuaagaccaucacaaaugauagaauugaggugacuaacgcgaccgaauuaguacaaaauucuucaaucggugagauaugcgacaguccacaccagauccuggauggcgaaaacuguacacuaauugacgcucuccugggggauccgcagugcgacgauuuucagaauaaaaagugggaccuuuucguggagaggagcaaagccuauuccaacuguuaccccuaugaugucccugacuacgcaucucugcggucguugguggccucaagcggaacccucgaauuuaauaacgagaguuucaauuggacuggcguuacacaaaacgguaccuccucugcuugcauccgccgaagcuccucaaguuucuucagccgucugaauuggcugacgcaucucaacuauacuuacccagcauuaaaugugaccaugcccaacaacgagcaguuugauaagcuguauauuuggggaguccaccauccugggacagacaaggaucagaucucucuuuacgcccaguccucaggcagaauaacugugagcaccaaaaggagucaacaggcuguaauuccaaauaucggcucucggccccgcauuagagacaucccuuccaggaucagcauuuacuggacaauaguuaagccaggggacaucuugcugauuaacucgaccggaaaucuaaucgccccgcgggguuauuucaaaauacgcucuggcaaguccucaauuaugcgaagugaugcgcccaucgggaaauguaagagcgaaugcaucacgccuaacggauccauuccaaaugacaagcccuuucagaacgugaauagaaucacuuacggcgcauguccuagguaugucaaacacucuacacucaagcuggccaccgguaugcggaacgugccagagaaacagacucgugggauuuucggagcuauagccggcuuuaucgaaaauggcugggaggggaugguggauggaugguacgguuuccgccaccaaaacagcgagggcagagggcaggcagcugaccuuaagucaacacaggccgcgauugaucaaaucaauggaaaacugaacagguugaucggcaagaccaaugaaaaauuucaucagauugagaaggaauuuagugaggucgaaggucggauacaggaccucgagaaguauguugaggauacgaaaaucgaccugugguccuacaacgccgaauuacugguggcacucgagaaucagcacaccauugaucuuacagacagcgaaaugaacaagcuguucgagaaaacuaagaaacaauugcgagaaaacgcugaggauauggggaauggcugcuuuaagaucuaucauaagugugacaacgccugcauuggaucuauccgcaauggcaccuacgaccacaacguauacagagaugaggcucuaaauaacagguuccagauaaaagggguggaacugaagucaggauauaaagacuggauccucuggauuaguuuugccaucagcugcuuccugcuuugugucgcacuguuggguuuuauuaugugggccugccagaagggcaauauccgguguaacauaugcauuuga

SEQ ID NO: 141125 - RNA, 1701 nt, Artificial Sequence
  derived and/or modified CDS sequence (opt3) from hemagglutinin__InfluenzaA__ALA08603
augaagaccaucauugcccugagcuacauacucugccuuguguucgcucagaaaauccccggcaacgacaauuccacagcaacucuguguuuggggcaccaugccgucccuaacggaacgauuguuaagaccaucacaaaugauagaauugaggugacuaacgcgaccgaauuaguacaaaauucuucaaucggugagauaugcgacaguccacaccagauccuggauggcgaaaacuguacacuaauugacgcucuccugggggauccgcagugcgacggauuucagaauaaaaagugggaucuuuucguggagaggagcaaagccuauuccaacuguuaccccuaugacgucccugauuacgcaucucugcggucguugguggccucaagcggcacccucgaauuuaauaacgagaguuucaauuggacugguguuacacaaaacgggaccuccucugcuugcauccgccgaagcuccucaaguuucuucagccgucugaauuggcugacgcaucucaacuauauuuacccagcauuaaaugugacuaugcccaacaacgagcaguuugacaagcuguauaucuggggaguccaccauccuggcaccgauaaggaccagauauuccuuuacgcccagucuuccggcagaauuacagugucaacuaaaaggagccaacaggcuguaaucccaaauauugggagucggccccgcaucagagauaucccuucuaggauuuccauauacuggaccaucguuaagccaggagacauuuugcugaucaacagcacagguaaucuaauagccccgcggggcuauuuuaaaauucgcucggggaagucuuccaucaugcgaucagacgcgcccaucggaaaauguaagagugaaugcauuaccccuaacggcagcaucccaaaugauaagcccuuccagaacgugaauagaauuacguacggugcauguccuagguaugucaaacacuccacucucaagcuggccacagggaugcggaacgugccagagaaacagacccguggaauauuuggcgcuaucgccggcuucauugaaaaugggugggagggaaugguggacgguugguacggcuuucgccaccaaaacucugaggggagaggacaggcagcugaucuuaagagcacucaggccgcgaucgaccaaaucaauggcaaacugaacagguugauugguaagacaaaugaaaaauuccaucagauagagaaggaauuuucagaggucgaagggcggauccaggaucucgagaaguauguugaggacaccaaaauugaucuguggaguuacaacgccgaauuacugguggcacucgagaaucagcacacgaucgaccuuaccgauuccgaaaugaacaagcuguuugagaaaacaaagaaacaauugcgagaaaacgcugaggacaugggcaauggaugcuucaagauuuaucauaagugugauaacgccugcaucggcagcauacgcaaugggacuuacgaccacaacguauacagagacgaggcucuaaauaacagguuucagaucaaaggaguggaacugaagucugguuauaaagauuggauucucuggaucucauucgccauuaguugcuuucugcuuugugucgcacuguugggcuucaucaugugggccugccagaaggggaauauacgguguaacauuugcaucuga

SEQ ID NO: 141126 - RNA, 1701 nt, Artificial Sequence; identical to SEQ ID NO: 140489
  derived and/or modified CDS sequence (opt3) from hemagglutinin__InfluenzaA__ALA08605

SEQ ID NO: 141127 - RNA, 1701 nt, Artificial Sequence; identical to SEQ ID NO: 140489
  derived and/or modified CDS sequence (opt3) from hemagglutinin__InfluenzaA__ALA08606

SEQ ID NO: 141128 - RNA, 1701 nt, Artificial Sequence; identical to SEQ ID NO: 141104
  derived and/or modified CDS sequence (opt3) from hemagglutinin__InfluenzaA__ALA08607

SEQ ID NO: 141129 - RNA, 1701 nt, Artificial Sequence
  derived and/or modified CDS sequence (opt3) from hemagglutinin__InfluenzaA__ALA08609
augaagaccaucauugcccugggcuacauacucugccuuguguucgcucagaaaauccccgggaacgacaauagcacagcaacucuguguuugggacaccaugccgucccuaacgguacgauuguuaagaccaucacaaaugauagaauugaggugacuaacgcgaccgaauuaguacaaaauuccucuaucggcgagauaugcgacucaccacacaaaauccuggauggggaaaacuguacacuaauugacgcucuccugggagauccgcagugcgacggcuuucagaauaagaaaugggaucuuuucguggagaggaguaaggccuauagcaacuguuaccccuaugacgucccugauuacgcaucccugcggucuuugguggccucgucagguacccucgaauuuaauaacgagagcuucaauuggacugggguuacacagaacggaaccaguuccgcuugcauccgccgaucuagcuccucauuuuucagucgucugaauuggcugacgcaucucaacuauacuuacccagcauuaaaugugaccaugcccaacaacgagcaauuugacaagcuguauauuuggggcguccaccauccuggcacagauaaagaccagaucuuccuuuacgcccagagcucugggagaauaacuguguccaccaagaggucacagcaagcuguaauuccaaauaucggaagccggccccgcauuagagauaucccuaguaggaucucuauuuacuggacaauaguuaaaccaggugacaucuugcugauuaacuccaccggcaaucuaaucgccccgcggggguauuuuaagauacgcagcggaaaaucgucuauuaugcgauccgacgcgcccaucggcaaguguaagucagaaugcaucacgccuaacgguaguauuccaaaugauaaacccuuccagaacgugaauagaaucacuuacggggcauguccuagguaugucaagcacagcacacucaaacuggccaccggaaugcggaacgugccagagaagcagacucguggcauuuuuggcgcuauagccggguucaucgaaaauggaugggaggguaugguggacggcugguacggguuucgccaccagaacuccgagggaagaggccaagcagcugaucuuaaaucuacacaggccgcgauugaccagaucaaugguaagcugaacagguugaucgggaaaaccaaugaaaaguuccaucaaauugagaaggaguucagcgaagucgaaggccggauacaggaucucgacaaauauguugaggauacgaagaucgaccuguggucauacaacgccgaguuacugguggcacucgaaaaucagcacaccauugaucuuacagacagugagaugaacaaacuguuugaaaagacuaaaaagcaguugcgagagaacgcugaagauaugggaaauggcugcuucaagaucuaucauaaaugugacaacgccugcauuggguccauccgcaauggaaccuacgaccacaacguauacagagaugaggcucuaaauaacagguuucaaauaaaggguguggagcugaaaagcggcuauaaggacuggauccucuggauuucuuucgccaucucaugcuuucugcuuugugucgcacuguugggguucauuaugugggccugccagaaaggaaauauccgguguaacauaugcauuuga

SEQ ID NO: 141130 - RNA, 1701 nt, Artificial Sequence; identical to SEQ ID NO: 141046
  derived and/or modified CDS sequence (opt3) from hemagglutinin__InfluenzaA__ALA08610

SEQ ID NO: 141131 - RNA, 1701 nt, Artificial Sequence
  derived and/or modified CDS sequence (opt3) from hemagglutinin__InfluenzaA__ALA08611
augaagaucauuauagcccugagcuacauccucugccuuguguucgcucagaaaauucccggcaacgacaauuccaccgcaacacuguguuuggggcaccaugccgucccuaacggaacuaucguuaagacgauuaccaaugauagaaucgaggugacaaacgcgacugaauuaguacaaaauucuucaauaggugagaucugcgacaguccacacaggauucuggauggcgaaaacuguacccuaaucgacgcucuccugggggauccgcagugcgacggauuucagaauaaaaagugggaucuuuucguggagcggagcaaagccuauuccaacuguuaccccuaugacgucccugauuacgcaucucugcgcucguugguggccucaagcggcacacucgaauuuaauaacgagaguuucaauuggaccgguguuacucagaacgggacauccucugcuugcauucgacguagcuccucaaguuucuucagcagacugaauuggcugacccaucucaacuauacguacccagcauuaaaugugacuaugcccaacaacgagcaauuugacaagcuguauaucuggggaguccaccauccuggcaccgauaaggaccagauauuccuuuacgcccagucuuccggcaggauuacagugucaacuaaacggagccagcaagcuguaaucccaaauauugggagucgccccagaaucagggauaucccuucucggauuuccauauacuggaccaucguuaagccaggagacauuuugcugaucaacagcacagguaaucuaauagccccgcgcggcuauuuuaaaauucgaucggggaagucuuccaucaugagaucagacgcgcccaucggaaaauguaagagugaaugcauuaccccuaacggcagcaucccaaaugauaagcccuuccagaacgugaauaggauuacguacggugcauguccucgguaugucaaacacuccacucucaagcuggccacagggaugcguaacgugccagagaaacagacccgcggaauauuuggcgcuaucgccggcuucauugaaaaugggugggagggaaugguggacgguugguacggcuuuagacaccagaacucugaggggaggggacaagcagcugaucuuaagagcacucaggccgcgaucgaccagaucaauggcaaacugaaccgguugauugguaagacaaaugaaaaauuccaucaaauagagaaggaauuuucagaggucgaagggcgaauccaggaucucgagaaguauguugaggacaccaaaauugaucuguggaguuacaacgccgaauuacugguggcacucgagaaucagcacacgaucgaccuuaccgauuccgaaaugaacaagcuguuugagaaaacaaagaaacaguugcgcgaaaacgcugaggacaugggcaauggaugcuucaagauuuaucauaagugugauaacgccugcaucggcagcauaagaaaugggacuuacgaccacaacguauacagggacgaggcucuaaauaaccgguuucaaaucaaaggaguggaacugaagucugguuauaaagauuggauucucuggaucucauucgccauuaguugcuuucugcuuugugucgcacuguugggcuucaucaugugggccugccagaaggggaauauacgcuguaacauuugcaucuga

SEQ ID NO: 141132 - RNA, 1701 nt, Artificial Sequence; identical to SEQ ID NO: 141104
  derived and/or modified CDS sequence (opt3) from hemagglutinin__InfluenzaA__ALA08612

SEQ ID NO: 141133 - RNA, 1701 nt, Artificial Sequence; identical to SEQ ID NO: 140489
  derived and/or modified CDS sequence (opt3) from hemagglutinin__InfluenzaA__ALA08614

SEQ ID NO: 141134 - RNA, 1701 nt, Artificial Sequence; identical to SEQ ID NO: 140489
  derived and/or modified CDS sequence (opt3) from hemagglutinin__InfluenzaA__ALA08615

SEQ ID NO: 141135 - RNA, 1701 nt, Artificial Sequence; identical to SEQ ID NO: 140489
  derived and/or modified CDS sequence (opt3) from hemagglutinin__InfluenzaA__ALA08616

SEQ ID NO: 141136 - RNA, 1701 nt, Artificial Sequence; identical to SEQ ID NO: 141029
  derived and/or modified CDS sequence (opt3) from hemagglutinin__InfluenzaA__ALA08617

SEQ ID NO: 141137 - RNA, 1701 nt, Artificial Sequence
  derived and/or modified CDS sequence (opt3) from hemagglutinin__InfluenzaA__ALA08619
augaagaccgugaucgcccugagcuacauucucugccuugucuucgcucagaaaauacccggcaacgacaauuccacagcaacucuguguuuggggcaccaugccguuccuaacggaacgaucgugaagaccauuacaaaugauagaaucgagguaacuaacgcgaccgaauuagugcaaaauucuucaauuggugagaucugcgacaguccacaccagauacuggauggcgaaaacuguacacuaaucgacgcucuccugggggauccgcagugcgacggauuucagaauaaaaagugggaucuuuucgucgagaggagcaaagccuauuccaacuguuaccccuaugacgugccugauuacgcaucucugcggucguugauugccucaagcggcacccucgaauuuaauaacgagaguuucaauuggacugguguuacacaaaacgggaccuccucugcuugcauccgcaagagcuccucaaguuucuuuagccgacugaauuggcugacgcaucucaacuauacuuacccagcauuaaaugugaccaugcccaacaacgagcaguuugacaagcuguauauuuggggaguccaccauccuggcacagauaaagaccagaucuuccuuuacgcccguucuuccggcagaauaacugugucaaccaagaggagccagcaagcuguaauuccaaauaucgggagucggccccgcauuagagauaucccuucuaggaucuccauuuacuggacaauaguuaaaccaggagacaucuugcugauuaacagcaccgguaaucuaaucgccccgcggggcuauuuuaagauacgcucggggaaaucuuccauuaugcgaucagacgcgcccaucggaaaguguaagagugaaugcaucacgccuaacggcagcauuccaaaugagaaacccuuccagaacgugaauagaaucacuuacggugcauguccuagguaugucaagcacuccacacucaaacuggccaccgggaugcggaacgugccagaaaagcagacucguggaauuuuuggcgcuauagccggcuucaucgagaaugggugggagggaaugguggaugguugguacggcuuucgccaccagaacucugaagggagaggacaagcagcugaccuuaaaagcacacaggccgcgauugaucagaucaauggcaagcugaacagguugaucgguaaaaccaaugagaaguuccaucaaauugaaaaggaguucucagaagucgaggggcggauacaggaccucgagaaauauguugaagauacgaagaucgaccuguggaguuacaacgccgaguuacugguggcacucgaaaaucagcacaccauugaucuuacagacuccgagaugaacaaacuguuugaaaagacuaaaaagcaguugcgagagaacgcugaggauaugggcaauggaugcuucaagaucuaucauaaaugugacaacgccugcauuggcagcauccgcaaugggauauacgaucacaacguauacagagacgaagcucuaaauaacagguuucaaaucaagggaguggagcugaaaucugguuauaaggacuggauucucuggaucucauucgccauuaguugcuuucugcuuugugucgcacuguugggcuucaucaugugggccugccagaaagggaauauacgguguaacauuugcaucuga

SEQ ID NO: 141138 - RNA, 1701 nt, Artificial Sequence; identical to SEQ ID NO: 141104
  derived and/or modified CDS sequence (opt3) from hemagglutinin__InfluenzaA__ALA08620

SEQ ID NO: 141139 - RNA, 1701 nt, Artificial Sequence; identical to SEQ ID NO: 141095
  derived and/or modified CDS sequence (opt3) from hemagglutinin__InfluenzaA__ALA08621

SEQ ID NO: 141140 - RNA, 1701 nt, Artificial Sequence
  derived and/or modified CDS sequence (opt3) from hemagglutinin__InfluenzaA__ALA08622
augaagaccaucauugcccugagcuacauacucugccuuguguucgcucagaaaauccccggcaacgacaauuccacagcaacucuguguuuggggcaccaugccgucccuaacggaacgauuguuaagaccaucacaaaugauagaauugaggugacuaacgcgaccgaauuaguacaaaauucuucaaucggugagauaugcgacaguccacaccagauccuggauggcgaaaacuguacacuaauugacgcucuccugggggauccgcagugcgacggauuucagaauaaaaagugggaucuuuucguggagaggagcaaagccuauuccaacuguuaccccuaugacgucccugauuacgcaucucugcggucguugguggccucaagcggcacccucgaauuuaauaacgagaguuucaauuggacugguguuacacaaaacgggaccuccucugcuugcauccgccgaagcuccucaaguuucuucagccgucugaauuggcugacgcaucucaacuauaaguacccagcauuaaaugugacuaugcccaacaacgagcaguuugacaagcuguauauuuggggaguccaccauccuggcaccgauaaagaccagaucuuccuuuacgcccagucuuccggcagaauaacagugucaacuaagaggagccaacaggcuguaauuccaaauaucgggagucggccccgcauuagagauaucccuucuaggaucuccauuuacuggaccauaguuaaaccaggagacaucuugcugauuaacagcacagguaaucuaaucgccccgcggggcuauuuuaagauacgcucggggaaaucuuccauuaugcgaucagacgcgcccaucggaaaguguaagagugaaugcaucaccccuaacggcagcauuccaaaugauaaacccuuccagaacgugaauagaaucacguacggugcauguccuagguaugucaagcacuccacucucaaacuggccacagggaugcggaacgugccagagaagcagacccguggaauuuuuggcgcuauagccggcuucaucgaaaaugggugggagggaaugguggacgguugguacggcuuucgccaccaaaacucugaggggagaggacaggcagcugaucuuaaaagcacucaggccgcgauugaccaaaucaauggcaagcugaacagguugaucgguaaaacaaaugaaaaguuccaucagauugagaaggaauuuucagaggucgaagggcggauacaggaucucgagaaauauguugaggacaccaagaucgaucuguggaguuacaacgccgaauuacugguggcacucgagaaucagcacacgauugaccuuaccgauuccgaaaugaacaaacuguuugagaagacuaaaaagcaauugcgagaaaacgcugaggacaugggcaauggaugcuucaagaucuaucauaaaugugauaacgccugcauuggcagcauccgcaaugggacauacgaccacaacguauacagagacgaggcucuaaauaacagguuucagauaaagggaguggaacugaaaucugguuauaaggauuggauccucuggauuucauucgccaucaguugcuuucugcuuugugucgcacuguugggcuucauuaugugggccugccagaaagggaauauccgguguaacauaugcauuuga

SEQ ID NO: 141141 - RNA, 1701 nt, Artificial Sequence; identical to SEQ ID NO: 140489
  derived and/or modified CDS sequence (opt3) from hemagglutinin__InfluenzaA__ALA08623

SEQ ID NO: 141142 - RNA, 1701 nt, Artificial Sequence; identical to SEQ ID NO: 141095
  derived and/or modified CDS sequence (opt3) from hemagglutinin__InfluenzaA__ALA08624

SEQ ID NO: 141143 - RNA, 1701 nt, Artificial Sequence; identical to SEQ ID NO: 140489
  derived and/or modified CDS sequence (opt3) from hemagglutinin__InfluenzaA__ALA08625

SEQ ID NO: 141144 - RNA, 1701 nt, Artificial Sequence; identical to SEQ ID NO: 140489
  derived and/or modified CDS sequence (opt3) from hemagglutinin__InfluenzaA__ALA08626

SEQ ID NO: 141145 - RNA, 1701 nt, Artificial Sequence; identical to SEQ ID NO: 140489
  derived and/or modified CDS sequence (opt3) from hemagglutinin__InfluenzaA__ALA08627

SEQ ID NO: 141146 - RNA, 1701 nt, Artificial Sequence; identical to SEQ ID NO: 141033
  derived and/or modified CDS sequence (opt3) from hemagglutinin__InfluenzaA__ALA08629

SEQ ID NO: 141147 - RNA, 1701 nt, Artificial Sequence
  derived and/or modified CDS sequence (opt3) from hemagglutinin__InfluenzaA__ALA08630
augaagaccaucauugcccugagcuacauacucugccuuguguucgcucagaaaauccccggcaacgacaauuccacagcaacucuguguuuggggcaccaugccgucccuaacggaacgauuguuaagaccaucacaaaugauagaauugaggugacuaacgcgaccgaauuaguacaaaauucuucaaucggugagauaugcgacaguccacaccagauccuggauggcgaaaacuguacacuaauugacgcucuccugggggauccgcagugcgacggauuucagaauaaaaagugggaucuuuucguggagaggagcaaagccuauuccaacuguuaccccuaugacgucccugauuacgcaucucugcggucguugguggccucaagcggcacccucgaauuuaauaacgagaguuucaauuggacugguguuacacaaaacgggaccuccucugcuugcauccgcaagagcuccucaaguuucuucagccgacugaauuggcugacgcaucucaacuauacuuacccagcauuaaaugugaccaugcccaacaacgagcaguuugacaagcuguauauuuggggaguccaccauccuggcacagauaaagaccagaucuuccuuuacgcccguucuuccggcagaauaacugugucaaccaagaggagccagcaagcuguaauuccaaauaucgggagucggccccgcauuagagauaucccuucuaggaucuccauuuacuggacaauaguuaaaccaggagacaucuugcugauuaacagcaccgguaaucuaaucgccccgcggggcuauuuuaagauacgcucggggaaaucuuccauuaugcgaucagacgcgcccaucggaaaguguaagagugaaugcaucacgccuaacggcagcauuccaaaugauaaacccuuccagaacgugaauagaaucacuuacggugcauguccuagguaugucaagcacuccacacucaaacuggccaccgggaugcggaacgugccagagaagcagacucguggaauuuuuggcgcuauagccggcuucaucgaaaaugggugggagggaaugguggacgguugguacggcuuucgccaccagaacucugaggggagaggacaagcagcugaucuuaaaagcacacaggccgcgauugaccagaucaauggcaagcugaacagguugaucgguaaaaccaaugaaaaguuccaucaaauugagaaggaauuuucagaggucgaagggcggauacaggaucucgagaaauauguugaggacacgaagaucgaucuguggaguuacaacgccgaauuacugguggcacucgagaaucagcacaccauugaccuuacagauuccgaaaugaacaaacuguuugagaagacuaaaaagcaguugcgagaaaacgcugaggacaugggcaauggaugcuucaagaucuaucauaaaugugauaacgccugcauuggcagcauccgcaaugggaccuacgaccacaacguauacagagacgaggcucuaaauaacagguuucaaauaaagggaguggaacugaaaucugguuauaaggauuggauccucuggauuucauucgccaucaguugcuuucugcuuugugucgcacuguugggcuucauuaugugggccugccagaaagggaauauccgguguaacauaugcauuuga

SEQ ID NO: 141148 - RNA, 1701 nt, Artificial Sequence
  derived and/or modified CDS sequence (opt3) from hemagglutinin__InfluenzaA__ALA08631
augaagaccaucauugcccugagcuacauacucugccuuguguucgcucagaaaauccccggcaacgacaauuccacagcaacucuguguuuggggcaccaugccgucccuaacggaacgauuguuaagaccaucacaaaugauagaauugaggugacuaacgcgaccgaauuaguacaaaauucuucaaucggugagauaugcgacaguccacaccagauccuggauggcgaaaacuguacacuaauugacgcucuccugggggauccgcagugcgacggauuucagaauaaaaagugggaucuuuucguggagaggagcaaagccuauuccaacuguuaccccuaugacgucccugauuacgcaucucugcggucguugguggccucaagcggcacccucgaauuuaauaacgagaguuucaauuggacugguguuacacaaaacgggaccuccucugcuugcauccgccgaagcuccucaaguuucuucagccgucugaauuggcugacgcaucucaacuauacuuacccagcauuaaaugugaccaugcccaacaaggagcaguuugacaagcuguauauuuggggaguccaccauccuggcacagauaaagaccagaucuuccuuuacgcccagucuuccggcagaauaacugugucaaccaagaggagccaacaggcuguaauuccaaacaucgggagucggccccgcauuagagauaucccuucuaggaucuccauuuacuggacaauaguuaaaccaggagacaucuugcugauuaauagcaccgguaaccuaaucgccccgcggggcuauuuuaagauacgcucggggaaaucuuccauuaugcgaucagacgcgcccaucggaaaguguaagagugaaugcaucacgccuaauggcagcauuccaaacgauaaacccuuccagaaugugaacagaaucacuuacggugcauguccuagguaugucaagcacuccacacucaaacuggccaccgggaugcggaaugugccagagaagcagacucguggaauuuuuggcgcuauagccggcuucaucgaaaacgggugggagggaaugguggacgguugguacggcuuucgccaccaaaauucugaggggagaggacaggcagcugaucuuaaaagcacacaggccgcgauugaccaaaucaacggcaagcugaauagguugaucgguaaaaccaacgaaaaguuccaucagauugagaaggaauuuucagaggucgaagggcggauacaggaucucgagaaauauguugaggacacgaagaucgaucuguggaguuacaaugccgaauuacugguggcacucgagaaccagcacaccauugaccuuacagauuccgaaaugaauaaacuguuugagaagacuaaaaagcaauugcgagaaaacgcugaggacaugggcaacggaugcuucaagaucuaucauaaaugugauaaugccugcauuggcagcauccgcaacgggaccuacgaccacaauguauacagagacgaggcucuaaacaauagguuucagauaaagggaguggaacugaaaucugguuauaaggauuggauccucuggauuucauucgccaucaguugcuuucugcuuugugucgcacuguugggcuucauuaugugggccugccagaaagggaacauccgguguaauauaugcauuuga

SEQ ID NO: 141149 - RNA, 1701 nt, Artificial Sequence
  derived and/or modified CDS sequence (opt3) from hemagglutinin__InfluenzaA__ALA08632
augaagaccaucauugcccugagcuacauacucugccuuguguucgcucagaaaauccccggcaacgacaauuccacagcaacucuguguuuggggcaccaugccgucccuaacggaacgauuguuaagaccaucacaaaugauagaauugaggugacuaacgcgaccgaauuaguacaaaauucuucaaucggugagauaugcgacaguccacaccagauccuggauggcgaaaacuguacacuaauugacgcucuccugggggauccgcagugcgacggauuucagaauaaaaagugggaucuuuucguggagaggagcaaagccuauuccaacuguuaccccuaugacgucccugauuacgcaucucugcggucguugguggccucaagcggcacccucgaauuuaauaacgagaguuucaauuggacugguguuacacaaaacgggaccuccucugcuugcauccgccgaagcuccucaaguuucuucagccgucugaauuggcugacgcaucucaacuauacuuacccagcauuaaaugugaccaugcccaacaacgagcaguuugacaagcuguauauuuggggaguccaccauccuggcacagauaaggaccagaucuuccuuuacgcccagucuuccggcagaauaacugugucaaccaaagggagccaacaggcuguaauuccaaauguuggaaguaggccccggauccgcgauauuccuucuagaaucuccaucuacuggacaauugugaagccaggugacauauugcugaucaacagcaccggcaaucuaauugccccgaggggguauuuuaaaauccggucgggaaagucuuccauaaugcgcucagacgcgcccauuggcaaauguaagagugaaugcaucacgccuaacgguagcaucccaaaugauaagcccuuccagaacgucaaucgaauuacuuacggggcauguccuagauaugugaaacacuccacacucaagcuggccaccggaaugaggaacgugccagagaaacagacucggggcaucuuuggcgcuauugccggguucauagaaaauggaugggaggguauggucgacggcugguacggguuucgucaccaaaacucugagggacgcggccaggcagcugaucuuaagagcacacaggccgcgaucgaccaaauuaaugguaaacugaacagauugaucgggaagaccaaugaaaaauuccaucagaucgagaaggaauuuucagagguugaaggcaggauucaggaucucgagaaguauguggaggacacgaaaauagaucuguggaguuacaacgccgaauuacugguagcacucgagaaucagcacaccaucgaccuuacagauuccgaaaugaacaagcuguuugagaaaacuaagaaacaauugcgggaaaacgcugaggacaugggaaauggcugcuucaagauuuaucauaagugugauaacgccugcaucgggagcauucgaaauggaaccuacgaccacaacguguaccgcgacgaggcucuaaauaacagauuucagaucaaaggugucgaacugaagucuggcuauaaagauuggauacucuggaucucauucgccauuaguugcuuucugcuuuguguggcacuguugggguucaucaugugggccugccagaagggaaauauuagguguaacaucugcauauga

SEQ ID NO: 141150 - RNA, 1701 nt, Artificial Sequence; identical to SEQ ID NO: 141046
  derived and/or modified CDS sequence (opt3) from hemagglutinin__InfluenzaA__ALA08634

SEQ ID NO: 141151 - RNA, 1701 nt, Artificial Sequence; identical to SEQ ID NO: 140489
  derived and/or modified CDS sequence (opt3) from hemagglutinin__InfluenzaA__ALA08635

SEQ ID NO: 141152 - RNA, 1701 nt, Artificial Sequence
  derived and/or modified CDS sequence (opt3) from hemagglutinin__InfluenzaA__ALA08636
augaagaccaucauugcccugagcuacauacucugccuuguguucgcucagaaaauccccggcaacgacaauuccacagcaacucuguguuuggggcaccaugccgucccuaacggaacgauuguuaagaccaucacaaaugauagaauugaggugacuaacgcgaccgaauuaguacaaaauucuucaaucggugagauaugcgacaguccacaccagauccuggauggcgaaaacuguacacuaauugacgcucuccugggggauccgcagugcgacggauuucagaauaaaaagugggaucuuuucguggagaggagcaaagccuauuccaacuguuaccccuaugacgucccugauuacgcaucucugcggucguugguggccucaagcggcacccucgaauuuaauaacgagaguuucaauuggacugguguuacacaaaacgggaccuccucugcuugcauccgccgaagcuccucaaguuucuucagccgucugaauuggcugacgcaucucaacuauacuuacccagcauuaaaugugaccaugcccaacaacgagcaguuugacaagcuguauauuuggggaauccaccauccuggcacagauaaggaccagauauuccuuuacgcccagucuuccggcagaauuacugucucaaccaaaaggagccaacaggcugugaucccaaauauugggagucggccccgcaucagagauaucccuucuaggauuuccauauacuggacaaucguaaagccaggagacauuuugcugaucaacagcaccgguaaucuaauagccccgcggggcuauuuuaaaauucgcucggggaagucuuccaucaugcgaucagacgcgcccaucggaaaauguaagagugaaugcauuacgccuaacggcagcaucccaaaugauaagcccuuccagaacguuaauagaauuacuuacggugcauguccuagguaugugaaacacuccacacucaagcuggccaccgggaugcggaacgucccagagaaacagacucguggaauauuuggcgcuaucgccggcuucauugaaaaugggugggagggaaugguggacgguugguacggcuuucgccaccaaaacucugaggggagaggacaggcagcugaucuuaagagcacacaggccgcgaucgaccaaaucaauggcaaacugaacagguugauugguaagaccaaugaaaaauuccaucagauagagaaggaauuuucagagguggaagggcggauccaggaucucgagaaguaugucgaggacacgaaaauugaucuguggaguuacaacgccgaauuacugguugcacucgagaaucagcacaccaucgaccuuacagauuccgaaaugaacaagcuguuugagaaaacuaagaaacaauugcgagaaaacgcugaggacaugggcaauggaugcuucaagauuuaucauaagugugauaacgccugcaucggcagcauacgcaaugggaccuacgaccacaacguguacagagacgaggcucuaaauaacagguuucagaucaaaggaguagaacugaagucugguuauaaagauuggauucucuggaucucauucgccauuaguugcuuucugcuuuguguggcacuguugggcuucaucaugugggccugccagaaggggaauauacgguguaacauuugcaucuga

SEQ ID NO: 141153 - RNA, 1701 nt, Artificial Sequence; identical to SEQ ID NO: 141046
  derived and/or modified CDS sequence (opt3) from hemagglutinin__InfluenzaA__ALA08637

SEQ ID NO: 141154 - RNA, 1701 nt, Artificial Sequence
  derived and/or modified CDS sequence (opt3) from hemagglutinin__InfluenzaA__ALA08638
augaagaccaucauugcccugagcuacauacucugccuuguguucgcucagaaaauccccggcaacgacaauuccacagcaacucuguguuuggggcaccaugccgucccuaacggaacgauuguuaagaccaucacaaaugauagaauugaggugacuaacgcgaccgaauuaguacaaaauucuucaaucggugagauaugcgacaguccacaccagauccuggauggcgaaaacuguacacuaauugacgcucuccugggggauccgcagugcgacggauuucagaauaaaaagugggaucuuuucguggagaggagcaaagccuauuccaacuguuaccccuaugacgucccugauuacgcaucucugcggucguugguggccucaagcggcacccucgaauuuaauaacgagaguuucaauuggacugguguuacacaaaacgggaccuccucugcuugcauccgcggaagcaauuccucauuuuucagucgacugaacuggcugacgcauagcaauuuuaaguauccagcacucaacgugacuaugcccaacaaugagcaguucgacaaguuauacauuuggggcguccaccauccuggcaccgauaaagaccagaucuuucuguaugcccagucuuccgggcguauaacagugucaacuaagagaagccaacaggcuguaauuccaaacaucggaaguaggccccggauucgcgauaucccuucuagaaucuccauuuacuggaccauaguuaaaccaggugacauccuuuugauuaauagcacaggcaaccugaucgccccgaggggguacuucaagauacggucgggaaaaucuuccauuaugcgcucagacgcgcccaucggcaaguguaagagugaaugcaucaccccuaaugguagcauuccaaacgauaaacccuuucagaaugugaaccgaaucacguauggggcauguccuagauacgucaagcacuccacucuaaaacucgccacaggaaugaggaaugugccagagaagcagacccggggcauuuucggcgcuauagccggguuuaucgaaaacggaugggaggguaugguggacggcugguauggguuccgucaccaaaauucugagggacgcggccaggcagcugaucugaaaagcacucaggccgcgauugaccaaaucaacgguaaacuuaauagacugaucgggaaaacaaacgaaaaguuccaucagauugagaaggaauuuucagaggucgaaggcaggauacaggauuuggagaaauacguugaggacaccaagaucgaucucuggaguuauaaugccgaacuguuaguggcacuggagaaccagcacacgauugaccucaccgauuccgaaaugaacaaacuuuucgagaagacaaagaagcaacugcgggaaaaugcugaggacaugggaaacggcugcuuuaagaucuaccauaaaugugauaaugccugcauugggagcauccgaaacggaacuuaugaccacaauguauaccgcgacgaggcuuugaacaauagauuccagauaaaggguguggaacuaaaaucuggcuacaaggauuggauccuguggauuucauuugccaucaguugcuuccuccugugugucgcacuucugggguuuauuaugugggccugccagaaaggaaacaucagguguaauauaugcauuuga

SEQ ID NO: 141155 - RNA, 1701 nt, Artificial Sequence; identical to SEQ ID NO: 141046
  derived and/or modified CDS sequence (opt3) from hemagglutinin__InfluenzaA__ALA08639

SEQ ID NO: 141156 - RNA, 1701 nt, Artificial Sequence; identical to SEQ ID NO: 141046
  derived and/or modified CDS sequence (opt3) from hemagglutinin__InfluenzaA__ALA08640

SEQ ID NO: 141157 - RNA, 1701 nt, Artificial Sequence; identical to SEQ ID NO: 141046
  derived and/or modified CDS sequence (opt3) from hemagglutinin__InfluenzaA__ALA08641

SEQ ID NO: 141158 - RNA, 1701 nt, Artificial Sequence; identical to SEQ ID NO: 141046
  derived and/or modified CDS sequence (opt3) from hemagglutinin__InfluenzaA__ALA08642

SEQ ID NO: 141159 - RNA, 1701 nt, Artificial Sequence; identical to SEQ ID NO: 141046
  derived and/or modified CDS sequence (opt3) from hemagglutinin__InfluenzaA__ALA08643

SEQ ID NO: 141160 - RNA, 1701 nt, Artificial Sequence; identical to SEQ ID NO: 140489
  derived and/or modified CDS sequence (opt3) from hemagglutinin__InfluenzaA__ALA08644

SEQ ID NO: 141161 - RNA, 1701 nt, Artificial Sequence
  derived and/or modified CDS sequence (opt3) from hemagglutinin__InfluenzaA__ALA08645
augaagaccaucauugcccugagcuacauacucugccuuguguucgcucagaaacugcccgagaacgacaauuccacagcaacuuuguguuuaggccaccaugccgucccuaacgggacgaucguuaagaccauuacaucugauagaaucgaagugacuaaugcgaccgagcugguacaaaacucaaguauuggagaaaucugcgacagcccacaccagauacuagaugguaaaaauuguacacucaucgacgcucugcuuggcgauccgcagugcgacggguuucagaacaagaaaugggaucuguucguggagagguccaaggccuauucuaauuguuaccccuaugacgucccugauuacgcaucguugcggucacucguggccagcaguggaacccuggaauuuaacgacgaguccuucaauugggcuggcguuacucaaaacgguacaucuagcgcaugcauucgcggguccaauucaaguuucuuuagccgacugaacuggcucacccauucuaauuuuaaguauccagccuuaaacgugacgaugcccaauaacgagcaguucgauaaacuguacaucuggggaguccaccauccuggcacugacaaggaucagauuuuucuuuaugcucaguccucaggccguaucaccgugagcacaaaaagaagucaacaggccguaauaccaaacauugggucuaggccccggauccgcaauauuccuuccagaaucagcaucuacuggacuauuguuaagccaggagacauauugcugaucaacucgaccgguaaucuaauugcgccgaggggcuacuucaaaauccggucugggaaguccucaauaaugcgcagugacgcacccauuggaaaguguaaaagcgaaugcaucacaccuaacggcuccaucccaaaugauaagcccuuucagaacgugaaucgaauuaccuauggugccuguccuagauacgucaaacagucuacgcucaagcuggcuacugggaugaggaacgugccagagaaacaaacacggggaaucuucggcgccauugcaggcuuuauagaaaaugggugggagggaaugaaggacgguugguauggcuuccgucaccagaacagcgaggggcgcggacaggcugccgaucuuaaaucaacccaagcggccaucgaccagauuaauggcaagcugaacagauugaucgguaagacuaaugaaaaauuccaccagaucgagaaggaauuuagugagguggaagggaggauucaggaucucgagaaauacgucgaggacacaaagauagauaucugguccuauaacgcagaacuguuaguugcucuggagaaucaacauaccauugaccucacggauagcgaaaugaacaaacuuuucgagaagaccaagaaacagcugcgggaaaacgccgaggacaugggcaauggaugcuuuaagaucuaccacaaaugugauaacgcuugcauuggcucuauccgaaaugggacauaugaccaugacguguaccgcgaugaggccuugaacaauagauuccagauaaagggaguagaacuaaaaucagguuacaaggacuggauccuguggauuaguuuugcaaucagcugcuuccuccuguguguggcccuucugggcuuuauuaugugggcuugccagaaggggaacaucagguguaauauaugcauuuga

SEQ ID NO: 141162 - RNA, 1701 nt, Artificial Sequence; identical to SEQ ID NO: 140489
  derived and/or modified CDS sequence (opt3) from hemagglutinin__InfluenzaA__ALA08646

SEQ ID NO: 141163 - RNA, 1701 nt, Artificial Sequence; identical to SEQ ID NO: 140489
  derived and/or modified CDS sequence (opt3) from hemagglutinin__InfluenzaA__ALA08647

SEQ ID NO: 141164 - RNA, 1701 nt, Artificial Sequence; identical to SEQ ID NO: 141046
  derived and/or modified CDS sequence (opt3) from hemagglutinin__InfluenzaA__ALA08648

SEQ ID NO: 141165 - RNA, 1701 nt, Artificial Sequence
  derived and/or modified CDS sequence (opt3) from hemagglutinin__InfluenzaA__ALA08650
augaagaccaucauugcccugagcuacauacucugccuuguguucgcucagaaaauccccggcaacgacaauuccacagcaacucuguguuuggggcaccaugccgucccuaacggaacgauuguuaagaccaucacaaaugagagaauugaagugacuaacgcgaccgaguuaguacaaaauucuucaaucggugaaauaugcgauaguccacaccagauccuggacggcgagaacuguacacuaauugaugcucuccugggggacccgcagugcgauggauuucagaauaaaaagugggaccuuuucguggaaaggagcaaagccuauuccaacuguuaccccuaugaugucccugacuacgcaucucugcggucguugguggccucaagcggcacccucgaguuuaauaacgagaguuucaauuggacugguguuacacaaaacgggaccuccucugcuugcauccgccgaagcuccucaaguuucuuuagccgucugaauuggcugacgcaucucaacuauacuuacccagcauuaaaugugaccaugcccaacaacgaacaguuugauaagcuguauauuuggggaguccaccauccuggcacagacaaggaucagaucuuccuuuacgcccagucuuccggcagaauaacugugucaaccaaaaggagccaacaggcuguaauuccaaauaucgggagucggccccgcauuagagacaucccuucuaggaucuccauuuacuggacaauaguuaagccaggagauaucuugcugauuaacagcaccgguaaucuaaucgccccgcggggcuauuuuaaaauacgcucggggaagucuuccauuaugcgaucagacgcgcccaucggaaaauguaagagugagugcaucacgccuaacggcagcauuccaaaugacaagcccuuccagaacgugaauagaaucacuuacggugcauguccuagguaugucaaacacuccacacucaagcuggccaccgggaugcggaacgugccagaaaaacagacucguggaauuuuuggcgcuauagccggcuucaucgagaaugggugggagggaaugguggaugguugguacggcuuucgccaccaaaacucugaagggagaggacaggcagcugaccuuaagagcacacaggccgcgauugaucaaaucaauggcaaacugaacagguugaucgguaagaccaaugagaaauuccaucagauugaaaaggaguucucagaagucgaggggcggauacaggaccucgagaaguauguugaagauacgaaaaucgaccuguggaguuacaacgccgaguuacugguggcacucgaaaaucagcacaccauugaucuuacagacuccgagaugaacaagcuguuugagaaaacuaagaaacaauugcgagaaaacgcugaggauaugggcaauggaugcuucaagaucuaucauaagugugacaacgccugcauuggcagcauccgcaaugggaccuacgaucacaacguauacagagacgaagcucuaaauaacagguuucagauaaaaggaguggagcugaagucugguuauaaagacuggauccucuggauuucauucgccaucaguugcuuucugcuuugugucgcacuguugggcuucauuaugugggccugccagaaggggaauauccgguguaacauaugcauuuga

SEQ ID NO: 141166 - RNA, 1701 nt, Artificial Sequence; identical to SEQ ID NO: 141046
  derived and/or modified CDS sequence (opt3) from hemagglutinin__InfluenzaA__ALA08652

SEQ ID NO: 141167 - RNA, 1701 nt, Artificial Sequence; identical to SEQ ID NO: 140489
  derived and/or modified CDS sequence (opt3) from hemagglutinin__InfluenzaA__ALA08653

SEQ ID NO: 141168 - RNA, 1701 nt, Artificial Sequence
  derived and/or modified CDS sequence (opt3) from hemagglutinin__InfluenzaA__ALA08654
augaagaccaucauugcccugagcuacauacucugccuuguguucgcucagaaaauccccggcaacgacaauuccacagcaacucuguguuuggggcaccaugccgucccuaacggaacgauuguuaagaccaucacaaaugauagaauugaggugacuaacgcgaccgaauuaguacaaaauucuucaaucggugagauaugcgacaguccacaccagauccuggauggcgaaaacuguacacuaauugacgcucuccugggggauccgcagugcgacggauuucagaauaaaaagugggaucuuuucguggagaggagcaaagccuauuccaacuguuaccccuaugacgucccugauuacgcaucucugcggucguugguggccucaagcggcacccucgaauuuaauaacgagaguuucaauuggacugguguuacacaaaacgggaccuccucugcuugcauccgccgaagcuccucaaguuucuucagccgucugaauuggcugacgcaucucaacuauacuuacccagcauuaaaugugaccaugcccaacaacgagcaguuugacaagcuguauauuuggggaguccaccauccuggcacagauaaggaccagaucuuccuuuacgcccagucuuccggcagaauaacugugucaaccaaaaggagccaacaggcuguaauuccaaauaucgggagucggccccgcauuagagauaucccuucuaggaucuccauuuacuggacaauaguuaagccaggagacaucuugcugauuaacagcaccgguaaucuaaucgccccgcggggcuauuuuaaaauacgcucggggaagucuuccauuaugcgaucagacgcgcccaucggaaaauguaagagugaaugcaucacgccuaacggcagcauuccaaaugauaagcccuuccagaacgugaauagaaucacuuacggugcauguccuagguaugucaaacacuccacacucaagcuggccaccgggaugcggaacgugccagagaaacagacucguggaauuuuuggcgcuauagccggcuucaucgaaaaugggugggagggaaugguggacgguugguacggcuuucgccaccaaaacucugaggggagaggacaggcagcugaucuuaagagcacacaggccgcgauugaccaaaucaauggcaaacugaacagguugaucgguaagaccaaugaaaaauuccaucagauugagaaggaauuuucagaggucgaagggcggauacaggaucucgagaaguauguugaggacacgaaaaucgaucuguggaguuacaacgccgaauuacugguggcacucgagaaucagcacaccauugaccuuacagauuccgaaaugaacaagcuguuugagaaaacuaagaaacaauugcgagaaaacgcugaggacaugggcaauggaugcuucaagaucuaucauaagugugauaacgccugcauuggcagcauccgcaaugggaccuacgaccacaacguauacagagacgaggcucuaaauaacagguuucagauaaaaggaguggaacugaagucugguuauaaagauuggauccucuggauuucauucgccaagaguugcuuucugcuuugugucgcacuguugggcuucaucaugugggccugccagaaagggaauauucgguguaacaucugcauauga

SEQ ID NO: 141169 - RNA, 1701 nt, Artificial Sequence; identical to SEQ ID NO: 141046
  derived and/or modified CDS sequence (opt3) from hemagglutinin__InfluenzaA__ALA08655

SEQ ID NO: 141170 - RNA, 1701 nt, Artificial Sequence; identical to SEQ ID NO: 141046
  derived and/or modified CDS sequence (opt3) from hemagglutinin__InfluenzaA__ALA08656

SEQ ID NO: 141171 - RNA, 1701 nt, Artificial Sequence
  derived and/or modified CDS sequence (opt3) from hemagglutinin__InfluenzaA__ALA08657
augaagaccaucauugcccugagcuacauacucugccuuguguucgcucagaaacugcccgagaacgacaauuccacagcaacuuuguguuuaggccaccaugccgucccuaacgggacgaucguuaagaccauuacaucugauagaaucgaagugacuaaugcgaccgagcugguacaaaacucaaguauuggagaaaucugcgacagcccacaccagauacuagaugguaaaaauuguacacucaucgacgcucugcuuggcgauccgcagugcgacggguuucagaacaagaaaugggaucuguucauugagagguccaaggccuauucuaauuguuaccccuaugacgugccugauuacgcaucguugcggucacucgucgccagcaguggaacccuggaauuuaacgacgaguccuucaauugggcuggcgugacucaaaacgguacaucuagcgcaugcauccgcggguccaauucaaguuucuuuagccgacugaacuggcucacccauucuaauuuuaaguauccagccuuaaacguuacgaugcccaauaacgagcaguucgauaaacuguacauuuggggagugcaccauccuggcacugacaaggaucagaucuuucuuuaugcucaguccucaggccguauaaccgucagcacaaaaagaagucaacaggccgugauuccaaacaucgggucuaggccccggauucgcaauaucccuuccagaaucagcauuuacuggacuauaguaaagccaggagacaucuugcugauuaacucgaccgguaaucuaaucgcgccgaggggcuacuucaaaauacggucugggaaguccucaauuaugcgcagugacgcacccaucggaaaguguaaaagcgaaugcaucacaccuaacggcuccauuccaaaugauaagcccuuucagaacguuaaucgaaucaccuauggugccuguccuagauacgugaaacagucuacgcucaagcuggcuacugggaugaggaacgucccagagaaacaaacacggggaauuuucggcgccauagcaggcuuuaucgaaaaugggugggagggaaugaaggacgguugguauggcuuccgucaccagaacagcgaggggcgcggacaggcugccgaucuuaaaucaacccaagcggccauugaccagaucaauggcaagcugaacagauugaucgguaagacuaaugaaaaauuccaccagauugagaaggaauuuagugagguggaagggaggauacaggaucucgagaaauacguggaggacacaaagaucgaucugugguccuauaacgcagaauuacuggucgcucucgagaaucaacauaccauugaccuuacggauagcgaaaugaacaaacuguucgagaagaccaagaaacaguugcgggaaaacgccgaggacaugggcaauggaugcuuuaagaucuaccacaaaugugauaacgcuugcauuggcucuauccgaaaugggacauaugaccaugacguuuaccgcgaugaggcccuaaacaauagauuccagauaaagggaguggaacugaaaucagguuacaaggacuggauccucuggauuaguuuugcaaucagcugcuuccugcuuuguguagcccuguugggcuuuauuaugugggcuugccagaaggggaacaucagguguaauauaugcauuuga

SEQ ID NO: 141172 - RNA, 1701 nt, Artificial Sequence; identical to SEQ ID NO: 141046
  derived and/or modified CDS sequence (opt3) from hemagglutinin__InfluenzaA__ALA08658

SEQ ID NO: 141173 - RNA, 1701 nt, Artificial Sequence; identical to SEQ ID NO: 141033
  derived and/or modified CDS sequence (opt3) from hemagglutinin__InfluenzaA__ALA08659

SEQ ID NO: 141174 - RNA, 1701 nt, Artificial Sequence
  derived and/or modified CDS sequence (opt3) from hemagglutinin__InfluenzaA__ALA08660
augaagaccaucauugcccugagcuacauacucugccuuguguucgcucagaaaauccccggcaacgacaauuccacagcaacucuguguuuggggcaccaugccgucccuaacggaacgauuguuaagaccaucacaaaugauagaauugaggugacuaacgcgaccgaauuaguacaaaauucuucaaucggugagauaugcgacaguccacaccagauccuggauggcgaaaacuguacacuaauugacgcucuccugggggauccgcagugcgacggauuucagaauaaaaagugggaucuuuucguggagaggagcaaagccuauuccaacuguuaccccuaugacgucccugauuacgcaucucugcggucguugguggccucaagcggcacccucgaauuuaauaacgagaguuucaauuggacugguguuacacaaaacgggaccuccucugcuugcauccgccgaagcuccucaaguuucuucagccgucugaauuggcugacgcaucucaacuauacuuacccagcauuaaaugugaccaugcccaacaacgagcaguuugacaagcuguauauuuggggaguccaccauccuggcacagauaaggaccagaucuuccuuuacgcccagucuuccggcagaauaacugugucaaccaaaaggagccaacaggcuguaauuccaaauaucgggagucggccccgcauuagagauaucccuucuaggaucuccauuuacuggacaauaguuaagccaggagacaucuugcugauuaacagcaccgguaaucuaaucgccccgcggggcuauuuuaaaauacgcucggggaagucuuccauuaugcgaucagacgcgcccaucggaaaauguaagagugaaugcaucacgccuaacggcagcauuccaaaugauaagcccuuccagaacgugaauagaaucacuuacggugcauguccuagguaugucaaacacgggacacucaagcuggccaccggaaugcggaacgugccagagaaacagacucguggcauuuuuggcgcuauagccggguucaucgaaaauggaugggaggguaugguggacggcugguacggguuucgccaccaaaacuccgagggaagaggccaggcagcugaucuuaagucuacacaggccgcgauugaccaaaucaaugguaaacugaacagguugaucgggaagaccaaugaaaaauuccaucagauugagaaggaauuuagcgaggucgaaggccggauacaggaucucgagaaguauguugaggacacgaaaaucgaucuguggucauacaacgccgaauuacugguggcacucgagaaucagcacaccauugaccuuacagauagugaaaugaacaagcuguuugagaaaacuaagaaacaauugcgagaaaacgcugaggacaugggaaauggcugcuucaagaucuaucauaagugugauaacgccugcauuggguccauccgcaauggaaccuacgaccacaacguauacagagacgaggcucuaaauaacagguuucagauaaaagguguggaacucaagagcggcuauaaagauuggauccuguggauuucuuucgccaucucaugcuuucugcuuugugucgcacuguugggguucauuaugugggccugccagaagggaaauauccgguguaacauaugcauuuga

SEQ ID NO: 141175 - RNA, 1701 nt, Artificial Sequence
  derived and/or modified CDS sequence (opt3) from hemagglutinin__InfluenzaA__ALA08662
augaagaccaucauugcccugagcuacauacucugccuuguguucgcucagaaaauccccggcaacgacaauuccacagcaacucuguguuuggggcaccaugccgucccuaacggaacgauuguuaagaccaucacaaaugauagaauugaggugacuaacgcgaccgaauuaguacaaaauucuucaaucggugagauaugcgacaguccacaccagauccuggauggcgaaaacuguacacuaauugacgcucuccugggggauccgcagugcgacggauuucagaauaaaaagugggaucuuuucguggagaggagcaaagccuauuccaacuguuaccccuaugacgucccugauuacgcaucucugcggucguugguggccucaagcggcacccucgaauuuaauaacgagaguuucaauuggacugguguuacacaaaacgggaccuccucugcuugcauccgccgaagcuccucaaguuucuucagccgucugaauuggcugacgcaucucaacuauacuuacccagcauuaaaugugaccaugcccaacaacgagcaguuugacaagcuguauauuuggggaguccaccauccuggcacagauaaggaccagaucuuccuuuacgcccagucuuccggcagaauaacugugucaaccaaaaggagccaacaggcuguaauuccaaauaucgggagucggccccgcauuagagauaucccuucuaggaucuccauuuacuggacaauaguuaagccaggagacaucuugcugauuaacagcaccgguaaucuaaucgccccgcggggcuauuuuaaaauacucucggggaagucuuccauuaugcgcucagacgcgcccaucggaaaauguaagagugaaugcaucacgccuaacggcagcauuccaaaugauaagcccuuccagaacgugaaucgaaucacuuacggugcauguccuagauaugucaaacacuccacacugaagcuggccaccgggaugaggaacgugccagagaaacagacucggggaauuuuuggcgcuauagccggcuucaucgaaaaugggugggagggaaugguggacgguugguacggcuuucgucaccaaaacucugaggggcgcggacaggcagcugaucuuaagagcacacaggccgcgauugaccaaaucaauggcaaauugaacagacucaucgguaagaccaaugaaaaauuccaucagauugagaaggaauuuucagaggucgaagggaggauacaggaucuggagaaguauguugaggacaguaaaaucgauuuaugguccuacaacgccgaacugcucguggcacuugagaaucagcacacgauugaccugaccgauagcgaaaugaacaaguuguuugagaaaacaaagaaacaacuacgggaaaacgcugaggacaugggcaauggaugcuucaagaucuaucauaagugugauaacgccugcauuggcucuauccgaaaugggacuuacgaccacaacguauaccgcgacgaggcucugaauaacagauuucagauaaaaggaguggaacucaagucagguuauaaagauuggauccuguggauuaguuucgccaucagcugcuuucuucugugugucgcauugcucggcuucauuaugugggccugccagaaggggaauaucagguguaacauaugcauuuga

SEQ ID NO: 141176 - RNA, 1701 nt, Artificial Sequence; identical to SEQ ID NO: 141147
  derived and/or modified CDS sequence (opt3) from hemagglutinin__InfluenzaA__ALA08663

SEQ ID NO: 141177 - RNA, 1701 nt, Artificial Sequence; identical to SEQ ID NO: 141175
  derived and/or modified CDS sequence (opt3) from hemagglutinin__InfluenzaA__ALA08665

SEQ ID NO: 141178 - RNA, 1701 nt, Artificial Sequence
  derived and/or modified CDS sequence (opt3) from hemagglutinin__InfluenzaA__ALA08666
augaagaccaucauugcccugagcuacauacucugccuuguguucgcucagaaacugcccggcaacgacaauuccacagcaacuuuguguuuagggcaccaugccgucccuaacggaacgaucguuaagaccauuacaaaugauagaaucgaggugacuaacgcgaccgaacugguacaaaauucuucaauuggugagaucugcgacaguccacaccagauacuagauggcgaaaacuguacacucaucgacgcucugcuuggggauccgcagugcgacggauuucagaauaaaaagugggaucuguucguggagaggagcaaagccuauuccaacuguuaccccuaugacgucccugauuacgcaucuuugcggucgcucguggccucaagcggcacccuggaauuuaauaacgagaguuucaauugggcugguguuacucaaaacgggacauccucugcaugcauucgcggaagcaauuccucauuuuucagucgacugaacuggcucacccauuuaaauuuuaaguauccagcccugaacgugacgaugcccaacaaugagcaguucgacaaguuguacaucuggggcguccaccauccuggcacugauaaagaccagauuuuucuuuaugcucagagcucugggcguaucaccguguccacaaagagaucacaacaggccguaauaccaaacauuggaagcaggccccggauccgcaauauuccuaguagaaucucuaucuacuggacuauuguuaaaccaggugauauacugcuaaucaacuccaccggcaaucucauugcgccgaggggguacuucaagauccggagcggaaaaucgucuauaaugcgcuccgacgcacccauuggcaaguguaagucagaaugcaucacaccuaacgguaguaucccaaaugacaaacccuuucagaacgugaaucgaauuaccuauggggccuguccuagauacgucaagcagagcacgcugaaacuugcuacuggaaugaggaacgugccagagaagcaaacacggggcaucuucggcgccauugcaggguuuauagaaaauggaugggaggguaugguggauggcugguauggguuccgucaccagaacuccgagggacgcggccaggcugccgaccugaaaucuacccaagcggccaucgaucagauuaaugguaaguugaacagacucaucgggaaaacuaaugaaaaguuccaccagaucgagaaggaauuuagcgaggucgaaggcaggauucaggaccuggagaaauacguugaggauacaaagauagacuuauggucauauaacgcagaacugcucguggcucuugagaaccaacauaccaucgaucugacggacagugaaaugaauaaauuguucgagaagaccaaaaagcagcuacgggaaaacgccgaggauaugggaaauggcugcuuuaagauuuaccacaaaugugacaacgcuugcaucggguccauucgaaauggaacauaugaucaugacguauaccgcgacgaggcccugaacaauagauuccagaucaaggguguggaacucaaaagcggcuacaaggauuggauacuguggaucucuuuugcaaugucaugcuuccuucugugugucgccuugcucggguuuauuaugugggcuugccagaaaggaaacaucagguguaauauuugcaucuga

SEQ ID NO: 141179 - RNA, 1701 nt, Artificial Sequence
  derived and/or modified CDS sequence (opt3) from hemagglutinin__InfluenzaA__ALA08667
augaagaccaucauugcccugagcuacauacucugccuuguguucgcucagaaaauccccggcaacgacaauuccacagcaacucuguguuuggggcaccaugccgucccuaacggaacgauuguuaagaccaucacaaaugauagaauugaggugacuaacgcgaccgaauuaguacaaaauucuucaaucggugagauaugcgacaguccacaccagauccuggauggcgaaaacuguacacuaauugacgcucuccugggggauccgcagugcgacggauuucagaauaaaaagugggaucuuuucguggagaggagcaaagccuauuccaacuguuaccccuaugacgucccugauuacgcaucucugcggucguugguggccucaagcggcacccucgaauuuaauaacgagaguuucaauuggacugguguuacacaaaacgggaccuccucugcuugcauccgcaagagcuccucaaguuucuucagccgacugaauuggcugacgcaucucaacuauaaguacccagcauuaaaugugacuaugcccaacaacgagcaguuugacaaacuguauauuuggggaguccaccauccuggcaccgauaaggaccagaucuuccuuuacgcccguucuuccggcagaauaacagugucaacuaaaaggagccagcaagcuguaauuccaaauaucgggagucggccccgcauuagagauaucccuucuaggaucuccauuuacuggaccauaguuaagccaggagacaucuugcugauuaacagcacagguaaucuaaucgccccgcggggcuauuuuaaaauacgcucggggaagucuuccauuaugcgaucagacgcgcccaucggaaaguguaaaagugaaugcaucaccccuaacggcagcauuccaaaugauaagcccuuccagaacgugaauagaaucacguacggugcauguccuagguaugucaaacacuccacucucaagcuggccacagggaugcggaacgugccagagaaacagacccguggaauuuuuggcgcuauagccggcuucaucgaaaaugggugggagggaaugguggacgguugguacggcuuucgccaccagaacucugaggggagaggacaagcagcugaucuuaagagcacucaggccgcgauugaccagaucaauggcaaacugaacagguugaucgguaagacaaaugaaaaguuccaucaaauugagaaagaauuuucagaggucgaagggcggauacaggaucucgagaaguauguugaggacaccaaaaucgaucuguggaguuacaacgccgaauuacugguggcacucgagaaucagcacacgauugaccuuaccgauuccgaaaugaacaagcuguuugagaaaacaaagaagcaguugcgagaaaacgcugaggacaugggcaauggaugcuucaaaaucuaucauaagugugauaacgccugcauuggcagcauccgcaaugggacuuacgaccacaacguauacagagacgaggcucuaaauaacagguuucaaauaaaaggaguggaacugaagucugguuauaaagauuggauccucuggauuucauucgccaucaguugcuuucugcuuugugucgcacuguugggcuucauuaugugggccugccagaaggggaauauccgguguaacauaugcauuuga

SEQ ID NO: 141180 - RNA, 1701 nt, Artificial Sequence
  derived and/or modified CDS sequence (opt3) from hemagglutinin__InfluenzaA__ALA08668
augaagaccaucauugcccugagcuacauacucugccuuguguucgcucagaaaauccccggcaacgacaauuccacagcaacucuguguuuggggcaccaugccgucccuaacggaacgauuguuaagaccaucacaaaugauagaauugaggugacuaacgcgaccgaauuaguacaaaauucuucaaucggugagauaugcgacaguccacaccagauccuggauggcgaaaacuguacacuaauugacgcucuccugggggauccgcagugcgacggauuucagaauaaaaagugggaucuuuucguggagaggagcaaagccuauuccaacuguuaccccuaugacgucccugauuacgcaucucugcggucguugguggccucaagcggcacccucgaauuuaauaacgagaguuucaauuggacugguguuacacaaaacgggaccuccucugcuugcauccgccgaagcuccucaaguuucuucagccgucugaauuggcugacgcaucucaacuauacuuacccagcauuaaaugugaccaugcccaacaacgagcaguuugacaagcuguauauuuggggaguccaccauccuggcacagauaaggaccagaucuuccuuuacgcccagucuuccggcagaauaacugugucaaccaaaaggagccaacaggcuguaauuccaaauaucgggagucggccccgcauuagagauaucccuucuaggaucuccauuuacuggacaauaguuaagccaggagacaucuugcugauuaacagcaccgguaaucuaaucgccccgcggggcuauuuuaaaauacgcucggggaagucuuccauuaugcgaucagacgcgcccaucggaaaauguaagagugaaugcaucacgccuaacggcagcauuccaaaugauaagcccuuccagaacgugaauagaaucacuuacggugcauguccuagguaugucaaacacuccacacucaagcuggccaccgggaugcggaacgugccagagaaacagacucguggaauuuuuggcgcuauagccggcuucaucgaaaaugggugggagggaaugguggacgguugguacggcuuucgccaccaaaacucugaggggagaggacaggcagcugaucuuaagagcacacaggccgcgauugaccaaaucaauggcaaacugaacagguugaucgguaagaccaaugaaaaauuccaucagauugagaaggaauuuucagaggucgaagggcggauacaggaucucgagaaguauguugaggacacgaaaaucgaucuguggaguuacaacgccgaauuacugguggcacucgagaaucagcacaccauugaccuuacagauuccgaaaugaacaagcuguuugagaaaacuaagaaacaauugcgagaaaacgcugaggacaugggcaauggaugcuucaagaucuaucauaagugugauaacgccugcauuggcagcauccgcaaugggaccuacgaccacaacguauacagagacgaggcuauaaauaacagguuucagaucaaaggaguggaacuaaagucugguuauaaagauuggauucuguggaucucauucgccauuaguugcuuucuccugugugucgcacuucugggcuucaucaugugggccugccagaaggggaauauacgguguaacauuugcaucuga

SEQ ID NO: 141181 - RNA, 1701 nt, Artificial Sequence; identical to SEQ ID NO: 141147
  derived and/or modified CDS sequence (opt3) from hemagglutinin__InfluenzaA__ALA08669

SEQ ID NO: 141182 - RNA, 1701 nt, Artificial Sequence; identical to SEQ ID NO: 141040
  derived and/or modified CDS sequence (opt3) from hemagglutinin__InfluenzaA__ALA08670

SEQ ID NO: 141183 - RNA, 1701 nt, Artificial Sequence; identical to SEQ ID NO: 141147
  derived and/or modified CDS sequence (opt3) from hemagglutinin__InfluenzaA__ALA08671

SEQ ID NO: 141184 - RNA, 1701 nt, Artificial Sequence; identical to SEQ ID NO: 141147
  derived and/or modified CDS sequence (opt3) from hemagglutinin__InfluenzaA__ALA08672

SEQ ID NO: 141185 - RNA, 1701 nt, Artificial Sequence; identical to SEQ ID NO: 141040
  derived and/or modified CDS sequence (opt3) from hemagglutinin__InfluenzaA__ALA08673

SEQ ID NO: 141186 - RNA, 1701 nt, Artificial Sequence; identical to SEQ ID NO: 141147
  derived and/or modified CDS sequence (opt3) from hemagglutinin__InfluenzaA__ALA08674

SEQ ID NO: 141187 - RNA, 1701 nt, Artificial Sequence; identical to SEQ ID NO: 140489
  derived and/or modified CDS sequence (opt3) from hemagglutinin__InfluenzaA__ALA08675

SEQ ID NO: 141188 - RNA, 1701 nt, Artificial Sequence; identical to SEQ ID NO: 141147
  derived and/or modified CDS sequence (opt3) from hemagglutinin__InfluenzaA__ALA08676

SEQ ID NO: 141189 - RNA, 1701 nt, Artificial Sequence; identical to SEQ ID NO: 141147
  derived and/or modified CDS sequence (opt3) from hemagglutinin__InfluenzaA__ALA08677

SEQ ID NO: 141190 - RNA, 1701 nt, Artificial Sequence; identical to SEQ ID NO: 141147
  derived and/or modified CDS sequence (opt3) from hemagglutinin__InfluenzaA__ALA08678

SEQ ID NO: 141191 - RNA, 1701 nt, Artificial Sequence; identical to SEQ ID NO: 141147
  derived and/or modified CDS sequence (opt3) from hemagglutinin__InfluenzaA__ALA08679

SEQ ID NO: 141192 - RNA, 1701 nt, Artificial Sequence; identical to SEQ ID NO: 141147
  derived and/or modified CDS sequence (opt3) from hemagglutinin__InfluenzaA__ALA08680

SEQ ID NO: 141193 - RNA, 1701 nt, Artificial Sequence; identical to SEQ ID NO: 141046
  derived and/or modified CDS sequence (opt3) from hemagglutinin__InfluenzaA__ALA08681

SEQ ID NO: 141194 - RNA, 1701 nt, Artificial Sequence; identical to SEQ ID NO: 141125
  derived and/or modified CDS sequence (opt3) from hemagglutinin__InfluenzaA__ALA08682

SEQ ID NO: 141195 - RNA, 1701 nt, Artificial Sequence; identical to SEQ ID NO: 141046
  derived and/or modified CDS sequence (opt3) from hemagglutinin__InfluenzaA__ALA08683

SEQ ID NO: 141196 - RNA, 1701 nt, Artificial Sequence
  derived and/or modified CDS sequence (opt3) from hemagglutinin__InfluenzaA__ALA08684
augaagaccaucauugcccugagccacauacucugccuuguguucgcucagaaaauccccggcaacgacaauuccacagcaacucuguguuuggggcaucacgccgucccuaacggaacgauuguuaagaccaucacaaaugauagaauugaggugacuaacgcgaccgaauuaguacaaaauucuucaaucggugagauaugcgacaguccacaucagauccuggauggcgaaaacuguacacuaauugacgcucuccugggggauccgcagugcgacggauuucagaauaaaaagugggaucuuuucguggagaggagcaaagccuacuccaacuguuaucccuacgacgucccugauuaugcaucucugcggucguugguggccucaagcggcacccucgaauuuaauaacgagaguuucaauuggacugguguuacacaaaacgggaccuccucugcuugcauccgccgaagcuccucaaguuucuucagccgucugaauuggcugacgcaccucaacuacaaguauccagcauuaaaugugacuaugcccaacaacgagcaguuugacaagcuguacauuuggggaguccaucacccuggcaccgauaaagaccagaucuuccuuuaugcccagucuuccggcagaauaacagugucaacuaaggggagccaacaggcuguaauuccaaauaucggaaguaggccccggauucgcgauaucccuucuagaaucuccauuuacuggaccauaguuaaaccaggugacaucuugcugauuaacagcacaggcaaucuaaucgccccgaggggguacuuuaagauacggucgggaaaaucuuccauuaugcgcucagacgcgcccaucggcaaguguaagagugaaugcaucaccccuaacgguagcauuccaaaugauaaacccuuccagaacgugaaucgaaucacguauggggcauguccuagauacgucaagcacuccacucucaaacuggccacaggaaugaggaacgugccagagaagcagacccggggcauuuuuggcgcuauagccggguucaucgaaaauggaugggaggguaugguggacggcugguauggguuucgucaucaaaacucugagggacgcggccaggcagcugaucuuaaaagcacucaggccgcgauugaccaaaucaaugguaagcugaacagauugaucgggaaaacaaaugaaaaguuccaccagauugagaaggaauuuucagaggucgaaggcaggauacaggaucucgagaaauacguugaggacaccaagaucgaucuguggaguuauaacgccgaauuacugguggcacucgagaaucagcauacgauugaccuuaccgauuccgaaaugaacaaacuguuugagaagacuaaaaagcaauugcgggaaaacgcugaggacaugggaaauggcugcuucaagaucuaccacaaaugugauaacgccugcauugggagcauccgaaauggaacauaugaccacaacguauaccgcgacgaggcucuaaauaacagauuucagauaaaggguaucgaacugaaaucuggcuacaaggauuggauucucuggaucucauucgccauuaguugcuuucugcuuuguguggcacuguugggguucaucaugugggccugccagaaaggaaauauaagguguaacauuugcaucuga

SEQ ID NO: 141197 - RNA, 1701 nt, Artificial Sequence; identical to SEQ ID NO: 140489
  derived and/or modified CDS sequence (opt3) from hemagglutinin__InfluenzaA__ALA08686

SEQ ID NO: 141198 - RNA, 1701 nt, Artificial Sequence
  derived and/or modified CDS sequence (opt3) from hemagglutinin__InfluenzaA__ALA08687
augaagaccaucauugcccugagcuacauacucugccuuguguucgcucagaaaauccccggcaacgacaauuccacagcaacucuguguuuggggcaccaugccgucccuaacggaacgauuguuaagaccaucacaaaugauagaauugaggugacuaacgcgaccgaauuaguacaaaauucuucaaucggugagauaugcgacaguccacaccagauccuggauggcgaaaacuguacacuaauugacgcucuccugggggauccgcagugcgacggauuucagaauaaaaagugggaucuuuucguggagaggagcaaagccuauuccaacuguuaccccuaugacgucccugauuacgcaucucugcggucguugaucgccucaagcggcacccucgaauuuaauaacgagaguuucaauuggacuggugugacacaaaacgggaccuccucugcuugcauucgccgaagcuccucaaguuucuucagccgucugaauuggcugacgcaucucaacuauacuuacccagcauuaaauguuaccaugcccaacaacgagcaguuugacaagcuguauaucuggggagugcaccauccuggcacagauaaggaccagauauuccuuuacgcccagucuuccggcagaauuacugucucaaccaaaaggagccaacaggcugugaucccaaauauugggagucggccccgcaucagagauaucccuucuaggauuuccauauacuggacaaucguaaagccaggagacauuuugcugaucaacagcaccgguaaucuaauagccccgcggggcuauuuuaaaauucgcucggggaagucuuccaucaugcgaucagacgcgcccaucggaaaauguaagagugaaugcauuacgccuaacggcagcaucccaaaugauaagcccuuccagaacguuaauagaauuacuuacggugcauguccuagguaugugaaacacuccacacucaagcuggccaccgggaugcggaacgucccagagaaacagacucguggaauauuuggcgcuaucgccggcuucauugaaaaugggugggagggaaugguggacgguugguacggcuuucgccaccaaaacucugaggggagaggacaggcagcugaucuuaagagcacacaggccgcgaucgaccaaaucaauggcaaacugaacagguugauugguaagaccaaugaaaaauuccaucagauagagaaggaauuuucagagguggaagggcggauccaggaucucgagaaguaugucgaggacacgaaaauugaucuguggaguuacaacgccgaauuacugguugcacucgagaaucagcacaccaucgaccuuacagauuccgaaaugaacaagcuguuugagaaaacuaagaaacaauugcgagaaaacgcugaggacaugggcaauggaugcuucaagauuuaucauaagugugauaacgccugcaucggcagcauacgcaaugggaccuacgaccacaacguguacagagacgaggcucuaaauaacagguuucagaucaaaggaguagaacugaagucugguuauaaagauuggauucucuggaucucauucgccauuaguugcuuucugcuuuguguggcacuguugggcuucaucaugugggccugccagaaggggaauauacgguguaacauuugcaucuga

SEQ ID NO: 141199 - RNA, 1701 nt, Artificial Sequence; identical to SEQ ID NO: 141140
  derived and/or modified CDS sequence (opt3) from hemagglutinin__InfluenzaA__ALA08688

SEQ ID NO: 141200 - RNA, 1701 nt, Artificial Sequence; identical to SEQ ID NO: 140489
  derived and/or modified CDS sequence (opt3) from hemagglutinin__InfluenzaA__ALE31612

SEQ ID NO: 141201 - RNA, 1701 nt, Artificial Sequence
  derived and/or modified CDS sequence (opt3) from hemagglutinin__InfluenzaA__ALE31613
augaagaccaucauugcccugagcuacauacucugccuuguguucgcucagaaaauccccggcaacgacaauuccacagcaacucuguguuuggggcaccaugccgucccuaacggaacgauuguuaagaccaucacaaaugauagaauugaggugacuaacgcgaccgaauuaguacaaaauucuucaaucggugagauaugcgacaguccacaccagauccuggauggcgaaaacuguacacuaauugacgcucuccugggggauccgcagugcgacggauuucagaauaaaaagugggaucuuuucguggagaggagcaaagccuauuccaacuguuaccccuaugacgucccugauuacgcaucucugcggucguugguggccucaagcggcacccucgaauuuaauaacgagaguuucaauuggacugguguuacacaaaacgggaccuccucugcuugcauccgccgaagcuccucaaguuucuucagccgucugaauuggcugacgcaucucaacuauacuuacccagcauuaaaugugaccaugcccaacaacgagcaguuugacaagcuguauauuuggggaguccaccauccuggcacagauaaggaccagaucuuccuuuacgcccagucuuccggcagaauaacugugucaaccaaagggagccaacaggcuguaauuccaaauaucggaaguaggccccggauucgcgauaucccuucuagaaucuccauuuacuggacaauaguuaagccaggugacaucuugcugauuagcucgaccggcaaccuaaucgccccgaggggguauuuuaaaauacggucuggaaaguccucaauuaugcgcagugacgcgcccaucggcaaauguaagagcgaaugcaucacgccuaaugguuccauuccaaacgauaagcccuuccagaaugugaaccgaaucacuuacggggcauguccuagauaugucaaacacucuacacucaagcuggccaccggaaugaggaaugugccagagaaacagacucggggcauuuuuggcgcuauagccggguucaucgaaaacggaugggaggguaugguggacggcugguacggguuucgucaccaaaauagcgagggacgcggccaggcagcugaucuuaagucaacacaggccgcgauugaccaaaucaacgguaaacugaauagauugaucgggaagaccaacgaaaaauuccaucagauugagaaggaauuuagugaggucgaaggcaggauacaggaucucgagaaguauguugaggacacgaaaaucgaucugugguccuacaaugccgaauuacugguggcacucgagaaccagcacaccauugaccuuacagauagcgaaaugaauaagcuguuugagaaaacuaagaaacaauugcgggaaaacgcugaggacaugggaaacggcugcuucaagaucuaucauaagugugauaaugccugcauugggucuauccgaaacggaaccuacgaccacaauguauaccgcgacgaggcucuaaacaauagauuucagauaaaagguguggaacugaagucaggcuauaaagauuggauccucuggauuaguuucgccaucagcugccugcuucugugugucgcauugcucggguuuauuaugugggccugccagaagggaaacaucagguguaauauaugcauuuga

SEQ ID NO: 141202 - RNA, 1701 nt, Artificial Sequence
  derived and/or modified CDS sequence (opt3) from hemagglutinin__InfluenzaA__ALE31614
augaagaccaucauugcccugagcuacauacucugccuuguguucgcucagaaaauccccggcaacgacaauuccacagcaacucuguguuuggggcaccaugccgucccuaacggaacgauuguuaagaccaucacaaaugauagaauugaggugacuaacgcgaccgaauuaguacaaaauucuucaaucgguaaaauaugcgacaguccacaccagauccuggauggcgagaacuguacacuaauugacgcucuccugggggauccgcagugcgacggauuucagaauaagaaaugggaucuuuucguggaaaggagcaaggccuauuccaacuguuaccccuaugacgucccugauuacgcaucucugcggucguugguggccucaagcggcacccucgaguuuaauaacgaaaguuucaauuggacugguguuacacaaaacgggaccuccucugcuugcauccgccgaagcuccucaaguuucuuuagccgucugaauuggcugacgcaucucaacuauacuuacccagcauuaaaugugaccaugcccaacaacgagcaguuugacaagcuguauauuuggggaguccaccauccuggcacagauaaagaccagaucuuccuuuacgcccagucuuccggcagaauaacugugucaaccaagaggagccaacaggcuguaauuccaaauaucgggagucggccccgcauuagagauaucccuucuaggaucuccauuuacuggacaauaguuaaaccaggagacaucuugcugauuaacagcaccgguaaucuaaucgccccgcggggcuauuuuaagauacgcucggggaaaucuuccauuaugcgaucagacgcgcccaucggaaaguguaagagugagugcaucacgccuaacggcagcauuccaaaugauaaacccuuccagaacgugaauagaaucacuuacggugcauguccuagguaugucaagcacuccacacucaaacuggccaccgggaugcggaacgugccagaaaagcagacucguggaauuuuuggcgcuauagccggcuucaucgagaaugggugggaaggaaugguggacgguugguacggcuuucgccaccaaaacucugaggggagaggacaggcagcugaucuuaaaagcacacaggccgcgauugaccaaaucaauggcaagcugaacagguugaucgguaaaaccaaugagaaguuccaucagauugaaaaggaguucucagaagucgaggggcggauacaggaucucgaaaaauauguugaggacacgaagaucgaucuguggaguuacaacgccgaguuacugguggcacucgaaaaucagcacaccauugaccuuacagauuccgagaugaacaaacuguuugaaaagacuaaaaagcaauugcgagagaacgcugaagacaugggcaauggaugcuucaagaucuaucauaaaugugauaacgccugcauuggcagcauccgcaaugggaccuacgaccacaacguauacagagacgaggcucuaaauaacagguuucagauaaagggaguggagcugaaaucugguuauaaggauuggauccucuggauuucauucgccaucaguugcuuucugcuuugugucgcacuguugggcuucauuaugugggccugccagaaagggaauauccgguguaacauaugcauuuga

SEQ ID NO: 141203 - RNA, 1701 nt, Artificial Sequence
  derived and/or modified CDS sequence (opt3) from hemagglutinin__InfluenzaA__ALE31615
augaagaccaucauugcccugagcuacauacucugccuuguguucgcucagaaacugcccggcaacgacaauuccacagcaacuuuguguuuagggcaccaugccgucccuaacggaacgaucguuaagaccauuacaaaugauagaaucgaggugacuaacgcgaccgaacugguacaaaauucuucaauuggugagaucugcgacaguccacaccagauacuagauggcgaaaacuguacacucaucgacgcucugcuuggggauccgcagugcgacggauuucagaauaaaaagugggaucuguucguggagaggagcaaagccuauuccaacuguuaccccuaugacgucccugauuacgcaucuuugcggucgcucguggccucaagcggcacccuggaauuuaauaacgagaguuucaauugggcugguguuacucaaaacgggacauccucugcaugcauucgcggaagcaauuccucauuuuucagucgacugaacuggcucacccauuuaaauuuuaaguauccagcccugaacgugacgaugcccaacaaugagcaguucgacaaguuguacaucuggggcguccaccauccuggcacugauaaagaccagauuuuucuuuaugcucagagcucugggcguaucaccguguccacaaagagaucacaacaggccguaauaccaaacauuggaagcaggccccggauccgcaauauuccuaguagaaucucuaucuacuggacuauuguuaaaccaggugauauacugcuaaucaacuccaccggcaaucucauugcgccgaggggguacuucaagauccggagcggaaaaucgucuauaaugcgcuccgacgcacccauuggcaaguguaagucagaaugcaucacaccuaacgguaguaucccaaaugacaaacccuuucagaacgugaaucgaauuaccuauggggccuguccuagauacgucaagcagagcacgcugaaacuugcuacuggaaugaggaacgugccagagaagcaaacacggggcaucuucggcgccauugcaggguuuauagaaaauggaugggaggguaugguggauggcugguauggguuccgucaccagaacuccgagggacgcggccaggcugccgaccugaaaucuacccaagcggccaucgaucagauuaaugguaaguugaacagacucaucgggaaaacuaaugaaaaguuccaccagaucgagaaggaauuuagcgaggucgaaggcaggauucaggaccuggagaaauacguugaggauacaaagauagacuuauggucauauaacgcagaacugcucguggcucuugagaaccaacauaccaucgaucugacggacagugaaaugaauaaauuguucgagaagaccaaaaagcagcuacgggaaaacgccgaggauaugggaaauggcugcuuuaagauuuaccacaaaugugacaacgcuugcaucgaguccauucgaaaugggacauaugaucaugacguauaccgcgacgaagcccugaacaauagauuccagaucaagggaguggagcucaaaagcgguuacaaggauuggauacuguggaucucuuuugcaauuucaugcuuccuucugugugucgccuugcucggcuuuaucaugugggcuugccagaaagggaacauuagguguaauaucugcauauga

SEQ ID NO: 141204 - RNA, 1701 nt, Artificial Sequence; identical to SEQ ID NO: 140489
  derived and/or modified CDS sequence (opt3) from hemagglutinin__InfluenzaA__ALE31616

SEQ ID NO: 141205 - RNA, 1701 nt, Artificial Sequence; identical to SEQ ID NO: 140489
  derived and/or modified CDS sequence (opt3) from hemagglutinin__InfluenzaA__ALE31617

SEQ ID NO: 141206 - RNA, 1701 nt, Artificial Sequence; identical to SEQ ID NO: 140489
  derived and/or modified CDS sequence (opt3) from hemagglutinin__InfluenzaA__ALE31618

SEQ ID NO: 141207 - RNA, 1701 nt, Artificial Sequence; identical to SEQ ID NO: 141147
  derived and/or modified CDS sequence (opt3) from hemagglutinin__InfluenzaA__ALE31619

SEQ ID NO: 141208 - RNA, 1701 nt, Artificial Sequence; identical to SEQ ID NO: 140489
  derived and/or modified CDS sequence (opt3) from hemagglutinin__InfluenzaA__ALE31620

SEQ ID NO: 141209 - RNA, 1701 nt, Artificial Sequence
  derived and/or modified CDS sequence (opt3) from hemagglutinin__InfluenzaA__ALE31622
augaagaccaucauugcccugagcuacauacucugccuuguguucgcucagaaaauccccggcaacgacaauuccacagcaacucuguguuuggggcaccaugccgucccuaacggaacgauuguuaagaccaucacaaaugauagaauugaggugacuaacgcgaccgaauuaguacaaaauucuucaaucggugagauaugcgacaguccacaccagauccuggauggcgaaaacuguacacuaauugacgcucuccugggggauccgcagugcgacggauuucagaauaaaaagugggaucuuuucguggagaggagcaaagccuauuccaacuguuaccccuaugacgucccugauuacgcaucucugcggucguugguggccucaagcggcacccucgaauuuaauaacgagaguuucaauuggacugguguuacacaaaacgggaccuccucugcuugcauccgccgaagcuccucaaguuucuucagccgucugaauuggcugacgcaucucaacuauacuuacccagcauuaaaugugaccaugcccaacaacgagcaguuugacaagcuguauauuuggggaguccaccauccuggcacagauaaggaccagaucuuccuuuacgcccagucuuccggcagaauaacugugucaaccaaaaggagccaacaggcuguaauuccaaauaucgggagucggccccgcauuagagauaucccuucuaggaucuccauuuacuggacaauaguuaagccaggagacaucuugcugauuaacagcaccgguaaucuaaucgccccgcggggcuauuuuaaaauacgcucggggaagucuuccauuaugcgaucagacgugcccaucggaaaauguaagagugaaugcaucacgccuaacggcagcauuccaaaugauaagcccuuccagaacgucaauagaaucacuuacggugcguguccuagguaugugaaacacuccacacucaagcuggcaaccgggaugcggaacgugccagagaaacagacucguggaauuuuuggcgccauagcuggcuucaucgaaaaugggugggagggaauggucgacgguugguacggcuuucgccaccaaaacucugaggggagaggacaggccgcagaucuuaagagcacacaggcugccauugaccaaaucaauggcaaacugaacagguugaucgguaagaccaaugaaaaauuccaucagauugagaaggaauuuucagagguugaagggcggauacaggaucucgagaaguauguggaggacacgaaaaucgaucuguggaguuacaacgcggaauuacugguagcccucgagaaucagcacaccauugaccuuacagauuccgaaaugaacaagcuguuugagaaaacuaagaaacaauugcgagaaaacgcagaggacaugggcaauggaugcuucaagaucuaucauaagugugauaacgcuugcauuggcagcauccgcaaugggaccuacgaccacaacguguacagagacgaggcccuaaauaacagguuucagauaaaaggagucgaacugaagucugguuauaaagauuggauccucuggauuucauucgcuaucaguugcuuucugcuuuguguggcccuguugggcuucauuaugugggcaugccagaaggggaauauccgguguaacauaugcauuuga

SEQ ID NO: 141210 - RNA, 1701 nt, Artificial Sequence; identical to SEQ ID NO: 140489
  derived and/or modified CDS sequence (opt3) from hemagglutinin__InfluenzaA__ALE31623

SEQ ID NO: 141211 - RNA, 1701 nt, Artificial Sequence; identical to SEQ ID NO: 140489
  derived and/or modified CDS sequence (opt3) from hemagglutinin__InfluenzaA__ALE31625

SEQ ID NO: 141212 - RNA, 1701 nt, Artificial Sequence; identical to SEQ ID NO: 140489
  derived and/or modified CDS sequence (opt3) from hemagglutinin__InfluenzaA__ALE31626

SEQ ID NO: 141213 - RNA, 1701 nt, Artificial Sequence; identical to SEQ ID NO: 140489
  derived and/or modified CDS sequence (opt3) from hemagglutinin__InfluenzaA__ALE31627

SEQ ID NO: 141214 - RNA, 1701 nt, Artificial Sequence; identical to SEQ ID NO: 140489
  derived and/or modified CDS sequence (opt3) from hemagglutinin__InfluenzaA__ALE31628

SEQ ID NO: 141215 - RNA, 1701 nt, Artificial Sequence; identical to SEQ ID NO: 140489
  derived and/or modified CDS sequence (opt3) from hemagglutinin__InfluenzaA__ALE31629

SEQ ID NO: 141216 - RNA, 1701 nt, Artificial Sequence; identical to SEQ ID NO: 140489
  derived and/or modified CDS sequence (opt3) from hemagglutinin__InfluenzaA__ALE31632

SEQ ID NO: 141217 - RNA, 1701 nt, Artificial Sequence
  derived and/or modified CDS sequence (opt3) from hemagglutinin__InfluenzaA__ALE31634
augaagaccaucauugcccugagcuacauacucugccuugugcuggcucagaaaauccccggcaacgacaauuccacagcaacuuuguguuuagggcaccaugccgucccuaacggaacgauuguuaagaccaucacaaaugauagaauugaggugacuaacgcgaccgaacugguacaaaauucuucaaucggugagauaugcgacaguccacaccagauccuagauggcgaaaacuguacacucauugacgcucugcuuggggauccgcagugcgacggauuccagaauaaaaagugggaucuguuuguggagaggagcaaagccuauuccaacuguuaccccuaugacgucccugauuacgcaucuuugcggucgcucguggccucaagcggcacccuggaguucaauaacgaaaguuuuaauuggacugguguuacacaaaacgggaccuccucugcuugcauccgccgaagcuccucaaguuucuuuagccgucugaauuggcucacgcauuuaaacuauacuuacccagcacugaaugugaccaugcccaacaacgagcaguucgacaagcuguauauuuggggaguccaccauccuggcacagauaaggaccagaucuuuuuguacgcccagucuuccggcagaauaacugugucaaccaaaaggagccaacaggcuguaauuccaaauaucgggagucggccccgcauuagagauaucccuucuaggaucuccauuuacuggacaauaguuaagccaggagacauccugcuaauuaacagcaccgguaaucucaucgccccgcggggcuauuucaaaauacgcucggggaagucuuccauuaugcgaucagacgcgcccaucggaaaauguaagagugaaugcaucacgccuaacggcagcauuccaaaugauaagcccuuucagaacgugaauagaaucacuuacggugcauguccuagguaugucaaacacuccacacugaaacuugccaccgggaugcggaacgugccagagaagcagacucguggaauuuucggcgcuauagccggcuuuaucgaaaaugggugggagggaaugguggacgguugguacggcuuccgccaccaaaacucugaggggagaggacaggcagcugaucuuaagagcacacaggccgcgauugaccaaaucaauggcaaauugaacaggcucaucgguaagaccaaugaaaaauuucaucagauugagaaggaguucucagaagucgaagggcggauacaggaucuggagaaguauguugaggacacgaaaaucgauuuauggaguuacaacgccgaacugcucguggcacuugagaaucagcacaccauugaccugacagauuccgaaaugaacaaguuguucgagaaaacuaagaaacaacuacgagaaaacgcugaggacaugggcaauggaugcuuuaagaucuaucauaagugugauaacgccugcauuggcagcauccgcaaugggaccuacgaccacaacguauacagagacgaggcucugaauaacagguuccagauaaaaggaguggaacucaagucugguuauaaagauuggauccuguggauuucauuugccaucaguugcuuccuucugugugucgcauugcucggcuuuauuaugugggccugccagaaggggaauauccgguguaacauaugcauuuga

SEQ ID NO: 141218 - RNA, 1701 nt, Artificial Sequence; identical to SEQ ID NO: 140489
  derived and/or modified CDS sequence (opt3) from hemagglutinin__InfluenzaA__ALE31635

SEQ ID NO: 141219 - RNA, 1701 nt, Artificial Sequence; identical to SEQ ID NO: 140489
  derived and/or modified CDS sequence (opt3) from hemagglutinin__InfluenzaA__ALE31636

SEQ ID NO: 141220 - RNA, 1701 nt, Artificial Sequence
  derived and/or modified CDS sequence (opt3) from hemagglutinin__InfluenzaA__ALE31638
augaagaccaucauugcccugagcuacauacucugccuuguguucgcucagaaaauccccggcaacgacaauuccacagcaacucuguguuuggggcaccaugccgucccuaacggaacgauuguuaagaccaucacaaaugauagaauugaggugacuaacgcgaccgaauuaguacaaaauucuucaaucggugagauaugcgacaguccacaccagauccuggauggcgaaaacuguacacuaauugacgcucuccugggggauccgcagugcgacggauuucagaauaaaaagugggaucuuuucguggagaggagcaaagccuauuccaacuguuaccccuaugacgucccugauuacgcaucucugcggucguugguggccucaagcggcacccucgaauuuaauaacgagaguuucaauuggacugguguuacacaaaacgggaccuccucugcuugcauccgccgaagcuccucaaguuucuucagccgucugaauuggcugacgcaucucaacuauacuuacccagcauuaaaugugaccaugcccaacaacgagcaguuugacaagcuguauauuuggggaguccaccauccuggcacagauaaggaccagaucuuccuuuacgcccagucuuccggcagaauaacugugucaaccaaaaggagccaacaggcuguaauuccaaauaucgggagucggccccgcauuagagauaucccuucuaggaucuccauuuacuggacaauaguuaagccaggagacaucuugcugauuaacagcaccgguaaucuaaucgccccgcggggcuauuuuaaaauacgcucggggaagucuuccauuaugcgaucagacgcgcccaucggaaaauguaagagugaaugcaucacgccuaacggcagcauuccaaaugguaagcccuuccagaacgugaauagaaucacuuacggggcauguccuagguaugucaaacacuccacacucaagcuggccaccggaaugcggaacgugccagagaaacagacucguggcauuuuuggcgcuauagccggguucaucgaaaauggaugggaggguaugguggauggcugguacggguuucgccaccaaaacucugagggaagaggccaggcagcugaccuuaagagcacacaggccgcgauugaucaaaucaaugguaaacugaacagguugaucgggaagaccaaugaaaaauuccaucagauugagaaggaauuuucagaggucgaaggccggauacaggaccucgagaaguauguugaggauacgaaaaucgaccuguggaguuacaacgccgaauuacugguggcacucgagaaucagcacaccauugaucuuacagacuccgaaaugaacaagcuguuugagaaaacuaagaaacaauugcgagaaaacgcugaggauaugggaaauggcugcuucaagaucuaucauaagugugacaacgccugcauugggagcauccgcaauggaaccuacgaucacaacguauacagagacgaggcucuaaauaacagguuucagauaaaagguguggaacugaagucuggcuauaaagacuggauccucuggauuucauucgccaucaguugcuuucugcuuugugucgcacuguugggguucauuaugugggccugccagaagggaaauauccgguguaacauaugcauuuga

SEQ ID NO: 141221 - RNA, 1701 nt, Artificial Sequence; identical to SEQ ID NO: 140489
  derived and/or modified CDS sequence (opt3) from hemagglutinin__InfluenzaA__ALE31639

SEQ ID NO: 141222 - RNA, 1701 nt, Artificial Sequence; identical to SEQ ID NO: 141040
  derived and/or modified CDS sequence (opt3) from hemagglutinin__InfluenzaA__ALE31640

SEQ ID NO: 141223 - RNA, 1701 nt, Artificial Sequence; identical to SEQ ID NO: 141046
  derived and/or modified CDS sequence (opt3) from hemagglutinin__InfluenzaA__ALE31641

SEQ ID NO: 141224 - RNA, 1701 nt, Artificial Sequence; identical to SEQ ID NO: 141046
  derived and/or modified CDS sequence (opt3) from hemagglutinin__InfluenzaA__ALE31642

SEQ ID NO: 141225 - RNA, 1701 nt, Artificial Sequence
  derived and/or modified CDS sequence (opt3) from hemagglutinin__InfluenzaA__ALE31643
augaagaccaucauugcccugagcuacauacucugccuuguguucgcucagaaacugcccgagaacgacaauuccacagcaacuuuguguuuaggccaccaugccgucccuaacgggacgaucguuaagaccauuacaucugauagaaucgaagugacuaaugcgaccgagcugguacaaaacucaaguauuggagaaaucugcgacagcccacaccagauacuagaugguaaaaauuguacacucaucgacgcucugcuuggcgauccgcagugcgacggguuucagaacaagaaaugggaucuguucguggagagguccaccgccuauucuaauuguuaccccuaugacgucccugauuacgcaucguugcggucacucguggccagcaguggaacucuggaauuuaacgacgaguccuucaauugggcuggcguuacacaaaacgguaccucuagcgcaugcauucgcggguccaauucaaguuucuuuagccgacugaacuggcucacgcauucuaauuuuaaguauccagccuuaaacgugacuaugcccaauaacgagcaguucgauaagcuguacaucuggggaguccaccauccuggcaccgacaaagaucagauuuuucuuuaugcucaguccucaggccguaucacagugagcacuaagagaagucaacaggccguaauaccaaacauugggucuaggccccggauccgcaauauuccuuccagaaucagcaucuacuggaccauuguuaaaccaggagacauauugcugaucaacucgacagguaaucuaauugcgccgaggggcuacuucaagauccggucugggaaauccucaauaaugcgcagugacgcacccauuggaaaguguaagagcgaaugcaucaccccuaacggcuccaucccaaaugauaaacccuuucagaacgugaaucgaauuacguauggugccuguccuagauacgucaagcagucuacucucaaacuggcuacagggaugaggaacgugccagagaagcaaacccggggaaucuucggcgccauugcaggcuuuauagaaaaugggugggagggaaugaaagacgguugguauggcuuccgucaccagaacagcgaggggcgcggacaggcugccgaucuuaagucaacucaagcggccaucgaccagauuaauggcaaacugaacagauugaucgguaagacaaaugaaaaguuccaccagaucgagaaagaauuuagugagguggaagggaggauucaggaucucgagaaguacgucgaggacaccaaaauagaucugugguccuauaacgcagaauuacugguugcucucgagaaucaacauacgaucgaccuuaccgauagcgaaaugaacaagcuguucgagaaaacaaagaagcaguugcgggaaaacgccgaggacaugggcaauggaugcuuuaaaauuuaccacaagugugauaacgcuugcaucggcucuauucgaaaugggacuuaugaccaugacguguaccgcgaugaggcccuaaacaauagauuccagaucaaaggaguagaacugaagucagguuacaaagacuggauacucuggaucaguuuugcaauuagcugcuuccugcuuuguguggcccuguugggcuuuaucaugugggcuugccagaaggggaacauuagguguaauaucugcauauga

SEQ ID NO: 141226 - RNA, 1701 nt, Artificial Sequence; identical to SEQ ID NO: 140489
  derived and/or modified CDS sequence (opt3) from hemagglutinin__InfluenzaA__ALE31644

SEQ ID NO: 141227 - RNA, 1701 nt, Artificial Sequence; identical to SEQ ID NO: 140489
  derived and/or modified CDS sequence (opt3) from hemagglutinin__InfluenzaA__ALE31645

SEQ ID NO: 141228 - RNA, 1701 nt, Artificial Sequence; identical to SEQ ID NO: 140489
  derived and/or modified CDS sequence (opt3) from hemagglutinin__InfluenzaA__ALE31646

SEQ ID NO: 141229 - RNA, 1701 nt, Artificial Sequence; identical to SEQ ID NO: 141046
  derived and/or modified CDS sequence (opt3) from hemagglutinin__InfluenzaA__ALE31647

SEQ ID NO: 141230 - RNA, 1701 nt, Artificial Sequence
  derived and/or modified CDS sequence (opt3) from hemagglutinin__InfluenzaA__ALE31648
augaagaccaucauugcccugagcuacauacucugccuuguguucgcucagaaaauccccggcaacgacaauuccacagcaacucuguguuuggggcaccaugccgucccuaacggaacgauuguuaagaccaucacaaaugauagaauugaggugacuaacgcgaccgaauuaguacaaaauucuucaaucggugagauaugcgacaguccacaccagauccuggauggcgaaaacuguacacuaauugacgcucuccugggggauccgcagugcgacggauuucagaauaaaaagugggaucuuuucguggagaggagcaaagccuauuccaacuguuaccccuaugacgucccugauuacgcaucucugcggucguugguggccucaagcggcacccucgaauuuaauaacgagaguuucaauuggacugguguuacacaaaacgggaccuccucugcuugcauccgccgaagcuccucaaguuucuucagccgucugaauuggcugacgcaucucaacuauacuuacccagcauuaaaugugaccaugcccaacaacgagcaguuugacaagcuguauauuuggggaguccaccauccuggcacagauaaggaccagaucuuccuuuacgcccagccaucuggcagaauaacuguguccaccaaaaggucacaacaggcuguaauucccaauaucgggagccggccucgcauuagagauaucccaaguaggaucucuauuuacuggacaauaguuaagccgggagacaucuugcugauuaacuccaccgguaaucuaaucgcgccccggggcuauuuuaaaauacgcagcgggaagucgucuauuaugcgauccgacgccccuaucggaaaauguaagucagaaugcaucacgccaaacggcaguauucccaaugauaagccuuuccagaacgugaauagaaucacuuacggugcauguccaagguaugucaaacacagcacacucaagcuggccaccgggaugcggaacgugcccgagaaacagacucguggaauuuuuggcgcuauagccggcuucaucgaaaaugggugggagggaaugguggacgguugguacggcuuucgccaccaaaacuccgaggggagaggacaggcagcugaucuuaagucuacacaggccgcgaccgaccaaauuaauggcaaacugaacagguugaucgguaagacgaaugaaaaauuccaucagaucgagaaggaauuuagcgaggucgaagggcggauucaggaucucgagaaguauguugaggacaccaaaauagaucuguggucauacaacgccgaauuacugguggcacucgagaaucagcacacaaucgaccuuacugauagugaaaugaacaagcuguuugagaaaaccaagaaacaauugcgagaaaacgcugaggacaugggcaauggaugcuucaagauuuaucauaagugugauaacgccugcaucggcuccauucgcaaugggacauacgaccacaacguauacagagacgaggcucuaaauaacagguuucagaucaaaggaguggaacucaagagcgguuauaaagauuggauacuguggaucucuuucgccauuucaugcuuucugcuuugugucgcacuguugggcuucaucaugugggccugccagaaggggaauauucgguguaacaucugcauauga

SEQ ID NO: 141231 - RNA, 1701 nt, Artificial Sequence; identical to SEQ ID NO: 140489
  derived and/or modified CDS sequence (opt3) from hemagglutinin__InfluenzaA__ALE31649

SEQ ID NO: 141232 - RNA, 1701 nt, Artificial Sequence; identical to SEQ ID NO: 141046
  derived and/or modified CDS sequence (opt3) from hemagglutinin__InfluenzaA__ALE31650

SEQ ID NO: 141233 - RNA, 1701 nt, Artificial Sequence
  derived and/or modified CDS sequence (opt3) from hemagglutinin__InfluenzaA__ALE31652
augaagaccaucauugcccugagcuacauacucugccuuguguucgcucagaaaauccccggcaacgacaauuccacagcaacucuguguuuggggcaccaugccgucccuaacggaacgauuguuaagaccaucacaaaugauagaauugaggugacuaacgcgaccgaauuaguacaaaauucuucaaucggugagauaugcgacaguccacaccagauccuggauggcgaaaacuguacacuaauugacgcucuccugggggauccgcagugcgacggauuucagaauaaaaagugggaucuuuucguggagaggagcaaagccuauuccaacuguuaccccuaugacgucccugauuacgcaucucugcggucguugguggccucaagcggcacccucgaauuuaauaacgagaguuucaauuggacugguguuacacaaaacgggaccuccucugcuugcauccgccgaagcuccucaaguuucuucagccgucugaauuggcugacgcaucucaacuauaaguacccagcauuaaaugugacuaugcccaacaacgagcaguuugacaagcuguauauuuggggaguccaccauccuggcaccgauaaagaccagaucucucuuuacgcccaguccucaggcagaauaacagugagcacuaagaggagucaacaggcuguaauuccaaauaucgggucucggccccgcauuagagauaucccuuccaggaucagcauuuacuggaccauaguuaaaccaggagacaucuugcugauuaacucgacagguaaucuaaucgccccgcggggcuauuucaagauacgcucugggaaauccucaauuaugcgaagugacgcgcccaucggaaaguguaagagcgaaugcaucaccccuaacggcuccauuccaaaugauaaacccuuucagaacgugaauagaaucacguacggugcauguccuagguaugucaagcacucuacucucaaacuggccacagggaugcggaacgugccagagaagcagacccguggaauuuucggcgcuauagccggcuuuaucgaaaaugggugggagggaaugguggacgguugguacggcuuccgccaccaaaacagcgaggggagaggacaggcagcugaucuuaaaucaacucaggccgcgauugaccaaaucaauggcaagcugaacagguugaucgguaaaacaaaugaaaaguuucaucagauugagaaggaauuuagugaggucgaagggcggauacaggaucucgagaaauauguugaggacaccaagaucgaucugugguccuacaacgccgaauuacugguggcacucgagaaucagcacacgauugaccuuaccgauagcgaaaugaacaaacuguucgagaagacuaaaaagcaauugcgagaaaacgcugaggacaugggcaauggaugcuuuaagaucuaucauaaaugugauaacgccugcauuggcucuauccgcaaugggacauacgaccacaacguauacagagacgaggcucuaaauaacagguuccagauaaagggaguggaacugaaaucagguuauaaggauuggauccucuggauuaguuuugccaucagcugcuuccugcuuugugucgcacuguugggcuuuauuaugugggccugccagaaagggaauauccgguguaacauaugcauuuga

SEQ ID NO: 141234 - RNA, 1701 nt, Artificial Sequence; identical to SEQ ID NO: 141140
  derived and/or modified CDS sequence (opt3) from hemagglutinin__InfluenzaA__ALE31653

SEQ ID NO: 141235 - RNA, 1701 nt, Artificial Sequence; identical to SEQ ID NO: 140489
  derived and/or modified CDS sequence (opt3) from hemagglutinin__InfluenzaA__ALE31654

SEQ ID NO: 141236 - RNA, 1701 nt, Artificial Sequence; identical to SEQ ID NO: 140489
  derived and/or modified CDS sequence (opt3) from hemagglutinin__InfluenzaA__ALE31655

SEQ ID NO: 141237 - RNA, 1701 nt, Artificial Sequence
  derived and/or modified CDS sequence (opt3) from hemagglutinin__InfluenzaA__ALE31656
augaagaccaucauugcccugagcuacauacucugccuuguguucgcucagaaaauccccggcaacgacaauuccacagcaacucuguguuuggggcaccaugccgucccuaacggaacgauuguuaagaccaucacaaaugauagaauugaggugacuaacgcgaccgaauuaguacaaaauucuucaaucggugagauaugcgacaguccacaccagauccuggauggcgaaaacuguacacuaauugacgcucuccugggggauccgcagugcgacggauuucagaauaaaaagugggauaucuucguggagaggagcaaagccuauuccaacuguuaccccuaugacgucccugauuacgcaucucuucggucgcugguggccucaagcggcaccuuggaauuuaauaacgagaguuucaauuggacugguguuacacaaaacgggaccuccucugcuugcauucgccgaagcuccucaaguuucuucagccgucucaauuggcugacgcaucugaacuauacuuacccagcacucaaugugaccaugcccaacaacgagcaguuugacaaguuauauaucuggggaguccaccauccuggcacagauaaggaccagauauuccuguacgcccagucuuccggcagaauuacugugucaaccaaaaggagccaacaggcuguaaucccaaauauugggagucggccccgcaucagagauaucccuucuaggauuuccauauacuggacaaucguuaagccaggagacauucuuuugaucaacagcaccgguaaucugauagccccgcggggcuauuuuaaaauucgcucggggaagucuuccaucaugcgaucagacgcgcccaucggaaaauguaagagugaaugcauuacgccuaacggcagcaucccaaaugauaagcccuuccagaacgugaauagaauuacuuacggugcauguccuagguaugucaaacacuccacacuaaagcucgccaccgggaugcggaacgugccagagaaacagacucguggaauauuuggcgcuaucgccggcuucauugaaaaugggugggagggaaugauggacgguugguacggcuuucgccaccaaaacucugaggggagaggacaggcagcugaucuuaagagcacacaggccgcgaucgaccaaaucaauggcaaacuuaacaggcugauugguaagaccaaugaaaaauuccaucagauagagaaggaauuuucagagguggaagggcggauccaggauuuggagaaguaugucgaggacacgaaaauugaucucuggaguuacaacgccgaacuguuaguugcacuggagaaucagcacaccaucgaccucacagauuccgaaaugaacaagcuguuugagaaaacuaagaaacaacugcgagaaaacgcugaggacaugggcaauggaugcuucaagauuuaucauaagugugauaacgccugcaucggcagcauacgcaaugggaccuacgaccacaacguguacagagacgaggcuuugaauaacagguuucagaucaaaggaguagaacuaaagucugguuauaaagauuggauucuguggaucucauucgccauuaguugcuuucuccuguguguggcacuucugggcuucaucaugugggccugccagaaggggaauauacgguguaacauuugcaucuga

SEQ ID NO: 141238 - RNA, 1701 nt, Artificial Sequence
  derived and/or modified CDS sequence (opt3) from hemagglutinin__InfluenzaA__ALE31657
augaagaccaucauugcccugagcuacauacucugccuuguguccgcucagaaaauccccggcaacgacaauucuacagcaacucuguguuuggggcaccaugccgucccuaacggaacgauuguuaagaccaucacaaaugauagaauugaggugacuaacgcgaccgaauuaguacaaaauucaaguaucggugagauaugcgacagcccacaccagauccuggauggcgaaaacuguacacuaauugacgcucuccugggggauccgcagugcgacggauuccagaauaaaaagugggaucuuuuuguggagagguccaaagccuauucuaacuguuaccccuaugacgucccugauuacgcaucgcugcggucauugguggccagcaguggcacccucgaguucaauaacgaauccuuuaauuggacugguguuacacaaaacgggaccucuagcgcuugcauccgccgauccucaaguagcuucuuuucucgucugaauuggcugacgcaucucaacuauacuuacccagcauuaaaugugaccaugcccaacaacgagcaguucgacaagcuguauauuuggggaguccaccauccuggcacagauaaggaccagaucuuucuuuacgcccaguccucaggcagaauaacugugagcaccaaaaggagucaacaggcuguaauuccaaauaucgggucucggccccgcauuagagauaucccuuccaggaucagcauuuacuggacaauaguuaagccaggagacaucuugcugauuaacucgaccgguaaucuaaucgccccgcggggcuauuucaaaauacgcucugggaaguccucaauuaugcgaagugacgcgcccaucggaaaauguaagagcgaaugcaucacgccuaacggcuccauuccaaaugauaagcccuuucagaacgugaauagaaucacuuacggugcauguccuagguaugucaaacacucuacacucaagcuggccaccgggaugcggaacgugccagagaaacagacucguggaauuuucggcgcuauagccggcuuuaucgaaaaugggugggagggaaugguggacgguugguacggcuuccgccaccaaaacagcgaggggagaggacaggcagcugaucuuaagucaacacaggccgcgauugaccaaaucaauggcaaacugaacagguugaucgguaagaccaaugaaaaauuucaucagauugagaaggaguucagugaagucgaagggcggauacaggaucucgagaaguauguugaggacacgaaaaucgaucugugguccuacaacgccgaauuacugguggcacucgagaaucagcacaccauugaccuuacagauagcgaaaugaacaagcuguucgagaaaacuaagaaacaauugcgagaaaacgcugaggacaugggcaauggaugcuuuaagaucuaucauaagugugauaacgccugcauuggcucuauccgcaaugggaccuacgaccacaacguauacagagacgaggcucuaaauaacagguuccagauaaaaggaguggaacugaagucagguuauaaagauuggauccucuggauuaguuuugccaucagcugcuuccugcuuugugucgcacuguugggcuuuauuaugugggccugccagaaggggaauauccgguguaacauaugcauuuga

SEQ ID NO: 141239 - RNA, 1701 nt, Artificial Sequence; identical to SEQ ID NO: 140489
  derived and/or modified CDS sequence (opt3) from hemagglutinin__InfluenzaA__ALE31658

SEQ ID NO: 141240 - RNA, 1701 nt, Artificial Sequence; identical to SEQ ID NO: 141104
  derived and/or modified CDS sequence (opt3) from hemagglutinin__InfluenzaA__ALE31659

SEQ ID NO: 141241 - RNA, 1701 nt, Artificial Sequence; identical to SEQ ID NO: 141033
  derived and/or modified CDS sequence (opt3) from hemagglutinin__InfluenzaA__ALE31660

SEQ ID NO: 141242 - RNA, 1701 nt, Artificial Sequence
  derived and/or modified CDS sequence (opt3) from hemagglutinin__InfluenzaA__ALE31661
augaagaccaucauugcccugagcuacauacucugccuuguguucgcucagaaaauccccggcaacgacaauuccacagcaacucuguguuuggggcaccaugccgucccuaacggaacgauuguuaagaccaucacaaaugauagaauugaggugacuaacgcgaccgaauuaguacaaaauucuucaaucggugagauaugcgacaguccacaccagauccuggauggcgaaaacuguacacuaauugacgcucuccugggggauccgcagugcgacggauuucagaauaaaaagugggaucuuuucguggagaggagcaaagccuauuccaacuguuaccccuaugacgucccugauuacgcaucucugcggucguugguggccucaagcggcacccucgaauuuaauaacgagaguuucaauuggacugguguuacacaaaacgggaccuccucugcuugcauccgccgaagcuccucaaguuucuucagccgucugaauuggcugacgcaucucaacuauacuuacccagcauuaaaugugaccaugcccaacaacgagcaguuugacaagcuguauauuuggggaguccaccauccuggcacagauaaggaccagaucuuccuuuacgcccagucuuccggcagaauaacugugucaaccaaaaagagccaacaggcuguaauuccaaauaucgggaguaggccccggauucgcgauaucccuucuagaaucuccauuuacuggacaauaguuaaaccaggagacaucuugcugauuaacagcaccgguaaucuaaucgccccgaggggcuauuuuaagauacggucggggaaaucuuccauuaugcgcucagacgcgcccaucggaaaguguaagagugaaugcaucacgccuaacggcagcauuccaaaugauaaacccuuccagaacgugaaucgaaucacuuacggugcauguccuagauaugucaagcacuccacacucaaacuggccaccgggaugaggaacgugccagagaagcagacucggggaauuuuuggcgcuauagccggcuucaucgaaaaugggugggagggaaugguggacgguugguacggcuuucgucaccaaaacucugaggggcgcggacaggcagcugaucuuaaaagcacacaggccgcgauugaccaaaucaauggcaagcugaacagauugaucgguaaaaccaaugaaaaguuccaucagauugagaaggaauuuucagaggucgaagggaggauacaggaucucgagaaauauguugaggacacgaagaucgaucuguggaguuacaacgccgaauuacugguggcacucgagaaucagcacaccauugaccuuacagauuccgaaaugaacaaacuguuugagaagacuaaaaagcaauugcgggaaaacgcugaggacaugggcaauggaugcuucaagaucuaucauaaaugugauaacgccugcauuggcagcauccgaaaugggaccuacgaccacaacguauaccgcgacgaggcucuaaauaacagauuucagauaaagggaguggaacugaaaucugguuauaaggauuggauccucuggauuucauucgccaucaguugcuuucugcuuugugucgcacuguugggcuucauuaugugggccugccagaaagggaauaucagguguaacauaugcauuuga

SEQ ID NO: 141243 - RNA, 1701 nt, Artificial Sequence
  derived and/or modified CDS sequence (opt3) from hemagglutinin__InfluenzaA__ALE31662
augaagaccaucauugcccugagcuacauacucugccuuguguucgcucagaaaauccccggcaacgacaauuccacagcaacucuguguuuggggcaccaugccgucccuaacggaacgauuguuaagaccaucgcgaaugauagaauugaggugacaaacgcuacugaauuaguacaaaauucuucaaucggugagauaugcgacaguccacaccagauccuggauggcgaaaacuguacccuaauugacgcccuccugggggauccgcagugcgacggauuucagaauaaaaagugggaucuuuucguggagaggagcaaagcauauuccaacuguuaccccuaugacgucccugauuacgccucucugcggucguugguggcuucaagcggcacacucgaauuuaauaacgagaguuucaauuggaccgguguuacucaaaacgggacauccucugcaugcauccgccgaagcuccucaaguuucuucagccgucugaauuggcugacccaucucaacuauacguacccagccuuaaaugugacuaugcccaacaacgagcaguuugacaagcuguauauuuggggaguccaccauccuggcaccgauaaggaccagaucuuccuuuacgcucagucuuccggcagaauaacagugucaacuaaagggagccaacaggccguaauuccaaauaucggaaguaggccccggauucgcgauaucccuucuagaaucuccauuuacuggaccauaguuaagccaggugacaucuugcugauuaacagcacaggcaaucuaaucgcgccgaggggguauuuuaaaauacggucgggaaagucuuccauuaugcgcucagacgcacccaucggcaaauguaagagugaaugcaucaccccuaacgguagcauuccaaaugauaagcccuuccagaacgugaaucgaaucacguacggggccuguccuagauaugucaaacacuccacucucaagcuggcuacaggaaugaggaacgugccagagaaacagacccggggcauuuuuggcgccauagcaggguucaucgaaaauggaugggaggguaugguggacggcugguacggguuucgucaccaaaacucugagggacgcggccaggcugccgaucuuaagagcacucaggcggccauugaccaaaucaaugguaaacugaacagauugaucgggaagacaaaugaaaaauuccaucagauugagaaggaauuuucagaggucgaaggcaggauacaggaucucgagaaguauguugaggacaccaaaaucgaucuguggaguuacaacgcagaauuacugguggcucucgagaaucagcacacgauugaccuuaccgauuccgaaaugaacaagcuguuugagaaaacaaagaaacaauugcgggaaaacgccgaggacaugggaaauggcugcuucaagaucuaucauaagugugauaacgcuugcauugggagcauccgaaauggaacuuacgaccacaacguauaccgcgacgaggcccuaaauaacagauuucagauaaaagguguggaacugaagucuggcuauaaagauuggauccucuggauuucauucgcaaucaguugccugcuucugugugucgccuugcucggguuuauuaugugggcuugccagaagggaaauaucagguguaacauaugcauuuga

SEQ ID NO: 141244 - RNA, 1701 nt, Artificial Sequence; identical to SEQ ID NO: 140475
  derived and/or modified CDS sequence (opt3) from hemagglutinin__InfluenzaA__ALE31663

SEQ ID NO: 141245 - RNA, 1701 nt, Artificial Sequence
  derived and/or modified CDS sequence (opt3) from hemagglutinin__InfluenzaA__ALE31666
augaagaccaucauugcccugagcuacauacucugccuuguguucgcucagaaaauccccggcaacgacaauuccacagcaacucuguguuuggggcaccaugccgucccuaacggaacgauuguuaagaccaucacaaaugauagaauugaggugacuaacgcgaccgaauuaguacaaaauucuucaaucggugagauaugcgacaguccacaccagauccuggauggcgaaaacuguacacuaauugacgcucuccugggggauccgcagugcgacggauuucagaauaaaaagugggaucuuuucguggagaggagcaaagccuauuccaacuguuaccccuaugacgucccugauuacgcaucucugcggucguugguggccucaagcggcacccucgaauuuaauaacgagaguuucaauuggacugguguuacacaaaacgggaccuccucugcuugcauccgcaagagcuccucaaguuucuucagccgacugaauuggcugacgcaucucaaguauacuuacccagcauuaaacgugaccaugcccaauaacgagcaguuugacaaacuguauauuuggggaguccaccauccuggcacagauaaggaccagaucuuccuuuacgcccguucuuccggcagaauaacugugucaaccaaaaggagccagcaagcuguaauuccaaacaucgggagucggccccgcauuagagauaucccuucuaggaucuccauuuacuggacaauaguuaagccaggagacaucuugcugauuaauagcaccgguaaccuaaucgccccgcggggcuauuuuaaaauacgcucggggaagucuuccauuaugcgaucagacgcgcccaucggaaaguguaaaagugaaugcaucacgccuaauggcagcauuccaaacgauaagcccuuccagaaugugaacagaaucacuuacggugcauguccuagguaugucaaacacuccacacucaagcuggccaccgggaugcggaaugugccagagaaacagacucguggaauuuuuggcgcuauagccggcuucaucgaaaacgggugggagggaaugguggacgguugguacggcuuucgccaccaaaauucugaggggagaggacaggcagcugaucuuaagagcacacaggccgcgauugaccagaucaacggcaaacugaauagguugaucgguaagaccaacgaaaaguuccaucaaauugagaaagaauuuucagaggucgaagggcggauacaggaucucgagaaguauguugaggacacgaaaaucgaucuguggaguuacaaugccgaauuacugguggcacucgagaaccagcacaccauugaccuuacagauuccgaaaugaauaagcuguuugagaaaacuaagaagcaguugcgagaaaacgcugaggacaugggcaacggaugcuucaaaaucuaucauaagugugauaaugccugcauuggcagcauccgcaacgggaccuacgaccacaauguauacagagacgaggcucuaaacaauagguuucaaauaaaaggaguggaacugaagucugguuauaaagauuggauccucuggauuucauucgccaucaguugcuuucugcuuugugucgcacuguugggcuucauuaugugggccugccagaaggggaacauccgguguaauauaugcauuuga

SEQ ID NO: 141246 - RNA, 1701 nt, Artificial Sequence
  derived and/or modified CDS sequence (opt3) from hemagglutinin__InfluenzaA__ALE31667
augaagaccaucauugcccugagcuacauacucugccuuguguucgcucagaaaauccccggcaacgacaauuccacagcaacucuguguuuggggcaccaugccgucuuaaacggaacgauuguuaagaccaucacaaaugauagaauugaggugacuaacgcgaccgaacugguacaaaauucuucaaucggugagauaugcgacaguccucaccagauccuagauggcgaaaacuguacacucauugacgcucugcuuggggauccacagugcgacggauuucagaauaaaaagugggaucuguucguggagaggagcaaagccuauuccaacuguuacccguaugacguccccgauuacgcaucuuugcggucgcucguggccucaagcggcacccuggaauuuaauaacgagaguuucaauuggacugguguuacacaaaacgggaccuccucugcuugcauccgcaagagcuccucaaguuucuucagccgacugaauuggcucacgcauuuaaacuauacuuacccugcacugaaugugaccaugccaaacaacgagcaguuugacaaacuuuauauuuggggaguccaccaucccggcacagauaaggaccagaucuucuuguacgcccguucuuccggcagaauaacugugucaaccaagaggagccagcaagcuguaauuccuaauaucgggagucggccacgcauuagagauauccccucuaggaucuccauuuacuggacaauaguuaaaccuggagacauccugcuaauuaacagcaccgguaaucucaucgccccacggggcuauuuuaagauacgcucggggaaaucuuccauuaugcgaucagacgcgccgaucggaaaguguaagagugaaugcaucacgcccaacggcagcauuccuaaugauaaaccauuccagaacgugaauagaaucacuuacggugcaugucccagguaugucaagcacuccacacugaaacuugccaccgggaugcggaacgugccugagaagcagacucguggaauuuuuggcgcuauagccggcuucaucgaaaaugggugggagggaaugguggacgguugguacggcuuucgccaccagaacucugaggggagaggacaagcagcugaucugaaaagcacacaggccgcgauugaccagaucaauggcaaguugaacaggcucaucgguaaaaccaaugaaaaguuccaucaaauugagaaggaauuuucagaggucgaagggcggauacaggaucuggagaaauauguugaggacacgaagaucgauuuauggaguuacaacgccgaacugcucguggcacuugagaaucagcacaccauugaccugacagauuccgaaaugaacaaauuguuugagaagacuaaaaagcagcuacgagaaaacgcugaggacaugggcaauggaugcuucaagaucuaucauaaaugugauaacgccugcauuggcagcauccgcaaugggaccuacgaccacaacguauacagagacgaggcucugaauaacagguuucaaauaaagggaguggaacucaaaucugguuauaaggauuggauccuguggauuucauucgccaucaguugcuuucuucugugugucgcauugcucggcuucauuaugugggccugccagaaagggaauauccgguguaacauaugcauuuga

SEQ ID NO: 141247 - RNA, 1701 nt, Artificial Sequence; identical to SEQ ID NO: 140489
  derived and/or modified CDS sequence (opt3) from hemagglutinin__InfluenzaA__ALE31668

SEQ ID NO: 141248 - RNA, 1701 nt, Artificial Sequence; identical to SEQ ID NO: 140489
  derived and/or modified CDS sequence (opt3) from hemagglutinin__InfluenzaA__ALE31669

SEQ ID NO: 141249 - RNA, 1701 nt, Artificial Sequence
  derived and/or modified CDS sequence (opt3) from hemagglutinin__InfluenzaA__ALE31670
augaagaccaucauugcccugagcuacauacucugccuuguguucgcucagaaacugcccgagaacgacaauuccacagcaacuuuguguuuaggccaccaugccgucccuaacgggacgaucguuaagaccauuacaucugauagaaucgaagugacuaaugcgaccgagcugguacaaaacucaaguauuggagaaaucugcgacagcccacaccagauacuagaugguaaaaauuguacacucaucgacgcucugcuuggcgauccgcagugcgacggguuucagaacaagaaaugggaucuguucguggagagguccaaggccuauucuaauuguuaccccuaugacgucccugauuacgcaucguugcggucacucguggccagcaguggaacccuggaauuuaacgacgaguccuucaauugggcuggcguuacucaaaacgguacaucuagcgcaugcauucgcggguccaauucaaguuucuuuagccgacugaacuggcucacccauucuaauuuuaaguauccagccuuaaacgugacgaugcccaauaacgagcaguucgauaaacuguacaucuggggaguccaccauccuggcacugacaaggaucagauuuuucuuuaugcucaguccucaggccguaucaccgugagcacaaaaagaagucaacaggccguaauaccaaacauugggucuaggccccggauccgcaauauuccuuccagaaucagcaucuacuggacuauuguuaagccaggagacauauugcugaucaacucgaccgguaaucuaauugcgccgaggggcuacuucaaaauccggucugggaaguccucaauaaugcgcagugacgcacccauuggaaaguguaaaagcgaaugcaucacaccuaacggcuccaucccaaaugauaagcccuuucagaacgugaaucgaauuaccuauggugccuguccuagauacgucaaacagucuacgcucaagcuggcuacugggaugaggaacgugccagagaaacaaacacggggaaucuucggcgccauugcaggcuuuauagaaaaugggugggagggaaugaaggacgguugguauggcuuccgucaccagaacagcgaggggcgcggacaggcugccgaucuuaaaucaacccaagcggccaucgaccagauuaauggcaagcugaacagauugaucgguaagacuaaugaaaaauuccaccagaucgagaaggaauuuagugagguggaagggaggauucaggaucucgagaaauacgucgaggacacaaagauagaucugugguccuauaacgcagaauuacugguugcucucgagaaucaacauaccaucgaccuuacggauagcgaaaugaacaaacuguucgagaagaccaagaaacagaugcgggaaaacgccgaggacaugggcaauggaugcuuuaagauuuaccacaaaugugauaacgcuugcaucggcucuauucgaaaugggacauaugaccaugacguguaccgcgaugaggccuugaacaauagauuccagaucaagggaguagaacuaaaaucagguuacaaggacuggauacuguggaucaguuuugcaauuagcugcuuccuccuguguguggcccuucugggcuuuaucaugugggcuugccagaaggggaacauuagguguaauaucugcauauga

SEQ ID NO: 141250 - RNA, 1701 nt, Artificial Sequence; identical to SEQ ID NO: 140489
  derived and/or modified CDS sequence (opt3) from hemagglutinin__InfluenzaA__ALE31671

SEQ ID NO: 141251 - RNA, 1701 nt, Artificial Sequence; identical to SEQ ID NO: 140489
  derived and/or modified CDS sequence (opt3) from hemagglutinin__InfluenzaA__ALE31672

SEQ ID NO: 141252 - RNA, 1701 nt, Artificial Sequence; identical to SEQ ID NO: 141046
  derived and/or modified CDS sequence (opt3) from hemagglutinin__InfluenzaA__ALE31673

SEQ ID NO: 141253 - RNA, 1701 nt, Artificial Sequence
  derived and/or modified CDS sequence (opt3) from hemagglutinin__InfluenzaA__ALE31674
augaagaccaucauugcccugagcuacauacucugccuuguguucgcucagaaaauccccggcaacgacaauuccacagcaacucuguguuuggggcaccaugccgucccuaacggaacgauuguuaagaccaucacaaaugauagaauugaggugacuaacgcgaccgaauuaguacaaaauucuucaaucggugagauaugcgacaguccacaccagauccuggauggcgaaaacuguacacuaauugacgcucuccugggggauccgcagugcgacggauuucagaauaaaaagugggaucuuuucguggagaggagcaaagccuauuccaacuguuaccccuaugacgucccugauuacgcaucucugcggucguugguggccucaagcggcacccucgaauuuaauaacgagaguuucaauuggacugguguuacacaaaacgggaccuccucugcuugcauccgccgaagcuccucaaguuucuucagccgucugaauuggcugacgcaucucaacuauacuuacccagcauuaaaugugaccaugcccaacaacgagcaguuugacaagcuguauauuuggggaguccaccauccuggcacagauaaggaccagaucuuccuuuacgcccacucuuccggcagaauaacugugucaaccaaaaggagccagcaagcuguaauuccaaauaucgggagucggccccgcauuagagauaucccuucuaggaucuccauuuacuggacaauaguuaagccaggagacaucuugcugauuaacagcaccgguaaucuaaucgccccgcggggcuauuuuaaaauacgcucggggaagucuuccauuaugcgaucagacgcgcccaucggaaaauguaagagugaaugcaucacgccuaacggcagcauuccaaaugauaagcccuuccagaacgugaauagaaucacuuacggugcauguccuagguaugucaaacacuccacacucaagcuggccaccgggaugcggaacgugccagagaaacagacucguggaauuuuuggcgcuauagccggcuucaucgaaaaugggugggagggaaugguggacgguugguacggcuuucgccaucagaacucugaggggagaggacaagcagcugaucuuaagagcacacaggccgcgauugaccagaucaauggcaaacugaacagguugaucgguaagaccaaugaaaaauuccaccaaauugagaaggaauuuucagaggucgaagggcggauacaggaucucgagaaguauguugaggacacgaaaaucgaucuguggaguuacaacgccgaauuacugguggcacucgagaaucagcauaccauugaccuuacagauuccgaaaugaacaagcuguuugagaaaacuaagaaacaguugcgagaaaacgcugaggacaugggcaauggaugcuucaagaucuaucacaagugugauaacgccugcauuggcagcauccgcaaugggaccuacgaccacaacguauacagagacgaggcucuaaauaacagguuucaaauaaaaggaguggaacugaagucugguuauaaagauuggauccucuggauuucauucgccaucaguugcuuucugcuuugugucgcacuguugggcuucauuaugugggccugccagaaggggaauauccgguguaacauaugcauuuga

SEQ ID NO: 141254 - RNA, 1701 nt, Artificial Sequence
  derived and/or modified CDS sequence (opt3) from hemagglutinin__InfluenzaA__ALE31675
augaagaccaucauugcccugagcuacauacucugccuuguguucgcucagaaaauccccggcaacgacaauuccacagcaacucuguguuuggggcaccaugccgucccuaacggaacgauuguuaagaccaucacaaaugauagaauugaggugacuaacgcgaccgaauuaguacaaaauucuucaaucggugagauaugcaacaguccacaccagauccuggacggcgaaaauuguacacuaauugaugcucuccugggggacccgcagugcgauggauuucagaacaaaaagugggaccuuuucguggagaggagcaaagccuauuccaauuguuaccccuaugaugucccugacuacgcaucucugcggucguugguggccucaagcggcacccucgaauuuaacaaugagaguuucaacuggacugguguuacacaaaaugggaccuccucugcuugcauccgccgaagcuccucaaguuucuucagccgucugaacuggcugacgcaucucaauuauacuuacccagcauuaaacgugaccaugcccaacaaugagcaguuugauaagcuguauauuuggggaguccaccauccuggcacagacaaggaucagaucuuccuuuacgcccagucuuccggcagaauaacugugucaaccaaagggagccaacaggcuguaauuccaaacaucggaaguaggccccggauucgcgacaucccuucuagaaucuccauuuacuggacaauaguuaagccaggugauaucuugcugauuaauagcaccggcaaccuaaucgccccgaggggguauuuuaaaauacggucgggaaagucuuccauuaugcgcucagacgcgcccaucggcaaauguaagagugaaugcaucacgccuaaugguagcauuccaaacgacaagcccuuccagaaugugaaccgaaucacuuacggggcauguccuagauaugucaaacacuccacacucaagcuggccaccggaaugaggaaugugccagagaaacagacucggggcauuuuuggcgcuauagccggguucaucgaaaacggaugggaggguaugguggauggcugguacggguuucgucaccaaaauucugagggacgcggccaggcagcugaccuuaagagcacacaggccgcgauugaucaaaucaacgguaaacugaauagauugaucgggaagaccaacgaaaaauuccaucagauugagaaggaauuuucagaggucgaaggcaggauacaggaccucgagaaguauguugaggauacgaaaaucgaccuguggaguuacaaugccgaauuacugguggcacucgagaaccagcacaccauugaucuuacagacuccgaaaugaacaagcuguuugagaaaacuaagaaacaauugcgggaaaaugcugaggauaugggaaacggcugcuucaagaucuaucauaagugugacaaugccugcauugggagcauccgaaacggaaccuacgaucacaauguauaccgcgacgaggcucuaaacaauagauuucagauaaaagguguggaacugaagucuggcuauaaagacuggauccucuggauuucauucgccaucaguugcuuucugcuuugugucgcacuguugggguucauuaugugggccugccagaagggaaacaucagguguaauauaugcauuuga

SEQ ID NO: 141255 - RNA, 1701 nt, Artificial Sequence
  derived and/or modified CDS sequence (opt3) from hemagglutinin__InfluenzaA__ALE31676
augaagaccaucauugcccugagcuacauacucugccuuguguucgcucagaaaauccccggcaacgacaauuccacagcaacucuguguuuggggcaccaugccgucccuaacggaacgauuguuaagaccaucacaaaugauagaauugaggugacuaacgcgaccgaauuaguacaaaauucuucaaucggugagauaugcgacaguccacaccagauccuggauggcgaaaacuguacacuaauugacgcucuccugggggauccgcagugcgacggauuucagaauaaaaagugggaucuuuucguggagaggagcaaagccuauuccaacuguuaccccuaugacgucccugauuacgcaucucugcggucguugguggccucaagcggcacccucgaauuuaauaacgagaguuucaauuggacugguguuacacaaaacgggaccuccucugcuugcauccgccgaagcuccucaaguuucuucagccgucugaauuggcugacgcaucucaacuauacuuacccagcauuaaaugugaccaugcccaacaacgagcaguuugacaagcuguauauuuggggaguccaccauccuggcacagauaaggaccagaucuuccuuuacgcccagucuuccggcagaauaacugugucaaccaaaaggagccaacaggcuguaauuccaaauaucgggagucggcccaagauucgcgauaucccuucuagaaucuccauuuacuggacaauaguuaaaccaggagacaucuugcugauuaacagcaccgguaaucuaaucgccccgaggggcuauuuuaagauacucucggggaaaucuuccauuaugcggucagacgcgcccaucggaaaguguaagagugaaugcaucacgccuaacggcagcauuccaaaugauaaacccuuccagaacgugaaucgcaucacuuacggugcauguccucgauaugucaagcacuccacacugaaacuugccaccgggaugagaaacgugccagagaagcagacuaggggaauuuuuggcgcuauagccggcuucaucgaaaaugggugggagggaaugguggacgguugguacggcuuucggcaccaaaacucugaggggcguggacaggcagcugaucugaaaagcacacaggccgcgauugaccaaaucaauggcaaguugaaccgccucaucgguaaaaccaaugaaaaguuccaucagauugagaaggaauuuucagaggucgaagggagaauacaggaucuggagaaauauguugaggacaguaagaucgauuuaugguccuacaacgccgaacugcucguggcacuugagaaucagcacacgauugaccugaccgauagcgaaaugaacaaauuguuugagaagacuaaaaagcaacuaagggaaaacgcugaggacaugggcaauggaugcuucaagaucuaucauaaaugugauaacgccugcauuggcucuauccggaaugggacauacgaccacaacguauaccgagacgaggcucugaauaaccgcuuucagauaaagggaguggaacucaaaucagguuauaaggauuggauccuguggauuaguuucgccaucagcugcuuucuucugugugucgcauugcucggcuucauuaugugggccugccagaaagggaauaucagauguaacauaugcauuuga

SEQ ID NO: 141256 - RNA, 1701 nt, Artificial Sequence; identical to SEQ ID NO: 141147
  derived and/or modified CDS sequence (opt3) from hemagglutinin__InfluenzaA__ALE31677

SEQ ID NO: 141257 - RNA, 1701 nt, Artificial Sequence; identical to SEQ ID NO: 140489
  derived and/or modified CDS sequence (opt3) from hemagglutinin__InfluenzaA__ALE31678

SEQ ID NO: 141258 - RNA, 1701 nt, Artificial Sequence; identical to SEQ ID NO: 140489
  derived and/or modified CDS sequence (opt3) from hemagglutinin__InfluenzaA__ALE31679

SEQ ID NO: 141259 - RNA, 1701 nt, Artificial Sequence; identical to SEQ ID NO: 141105
  derived and/or modified CDS sequence (opt3) from hemagglutinin__InfluenzaA__ALE31680

SEQ ID NO: 141260 - RNA, 1701 nt, Artificial Sequence; identical to SEQ ID NO: 141104
  derived and/or modified CDS sequence (opt3) from hemagglutinin__InfluenzaA__ALE31681

SEQ ID NO: 141261 - RNA, 1701 nt, Artificial Sequence; identical to SEQ ID NO: 140489
  derived and/or modified CDS sequence (opt3) from hemagglutinin__InfluenzaA__ALE31682

SEQ ID NO: 141262 - RNA, 1701 nt, Artificial Sequence; identical to SEQ ID NO: 140489
  derived and/or modified CDS sequence (opt3) from hemagglutinin__InfluenzaA__ALE31683

SEQ ID NO: 141263 - RNA, 1701 nt, Artificial Sequence; identical to SEQ ID NO: 140489
  derived and/or modified CDS sequence (opt3) from hemagglutinin__InfluenzaA__ALE31684

SEQ ID NO: 141264 - RNA, 1701 nt, Artificial Sequence; identical to SEQ ID NO: 140489
  derived and/or modified CDS sequence (opt3) from hemagglutinin__InfluenzaA__ALE31685

SEQ ID NO: 141265 - RNA, 1701 nt, Artificial Sequence; identical to SEQ ID NO: 140489
  derived and/or modified CDS sequence (opt3) from hemagglutinin__InfluenzaA__ALE31686

SEQ ID NO: 141266 - RNA, 1701 nt, Artificial Sequence
  derived and/or modified CDS sequence (opt3) from hemagglutinin__InfluenzaA__ALE31687
augaagaccaucauugcccugagcuacauacucugccuuguguucgcucagaaaauccccggcaacgacaauuccacagcaacucuguguuuggggcaccaugccgucccuaacggaacgauuguuaagaccaucacaaaugauagaauugaggugacuaacgcgaccgaauuaguacaaaauucuucaaucggugagauaugcgacaguccacaccagauccuggauggcgaaaacuguacacuaauugacgcucuccugggggauccgcagugcgacggauuucagaauaaaaagugggaucuuuucguggagaggagcaaagccuauuccaacuguuaccccuaugacgucccugauuacgcaucucugcggucguugguggccucaagcggcacccucgaauuuaauaacgagaguuucaauuggacugguguuacacaaaacgggaccuccucugcuugcauccgccgaagcuccucaaguuucuucagccgucugaauuggcugacgcaucucaacuauacuuacccagcauuaaaugugaccaugcccaacaacgagcaguuugacaagcuguauauuuggggaguccaccauccuggcacagauaaggaccagaucuuccuuuacgcccagucuuccggcagaauaacugugucaaccaaaaggagccaacaggcuguaauuccaaauaucgggagucggccccgcauuagagauaucccuucuaggaucuccauuuacuggacaauaguuaagccaggagacaucuugcugauuaacagcaccgguaaucuaaucgccccgcggggcuauuuuaaaauacgcucggggaagucuuccauuaugcgaucagacgcgcccaucggaaaauguaagagugaaugcaucacgccuaacggcagcauuccaaaugauaagcccuuccagaacgugaauagaaucacuuacggugcauguccuagguaugucaaacacuccacacucaagcuggccaccgggaugcggaacgugccagagaaacagacucguggaauuuuuggcgcuauagccggcuucaucgaaaaugggugggagggaaugguggacgguugguacggcuuucgccaccaaaacucugaggggagaggacaggcagcugaucuuaagagcacacaggccgcgauugaccaaaucaauggcaaacugaacagguugaucgguaagaccaaugaaaaauuccaucagauugagaaggaauuuucagaggucgaagggcggauacaggaucucgagaaguauguugaggacacgaaaaucgaucuguggaguuacaacgccgaauuacugguggcacucgagaaucagcacaccauugaccuuacagauuccgaaaugaacaagcuguuugagaaaacuaagaaacaauugcgagaaaacgcugaggacaugggcaauggaugcuucaagaucuaucauaagugugauaacgccugcauugagagcauccgcaauggcaccuacgaccacaacguauacagagacgaagcucuaaauaacagguuucagauaaaagggguggagcugaagucuggauauaaagauuggauccucuggauuucauucgccaucaguugcuuucugcuuugugucgcacuguuggguuucauuaugugggccugccagaagggcaauauccgguguaacauaugcauuuga

SEQ ID NO: 141267 - RNA, 1701 nt, Artificial Sequence
  derived and/or modified CDS sequence (opt3) from hemagglutinin__InfluenzaA__ALE31688
augaagaccacaaucgcccugagcuacauucucugccuuguguucgcucagaaacugcccgagaacgacaauuccacugcaacguuguguuuaggccaccaugccgucccuaacgggaccauaguuaagacaaucacuucugauagaauugaagugaccaaugcgacagagcugguacaaaacucaaguaucggagaaauuugcgacagcccacaccagauccuagaugguaaaaauuguacccucauagacgcucugcuuggcgauccgcagugcgacggguuucagaacaagaaaugggaucuguucguggagagguccaaggccuauucuaauuguuaccccuaugacgucccugauuacgcaucguugcggucacucguggccagcaguggaacucuggaauuuaacgacgaguccuucaauugggcuggcguuacacaaaacgguaccucuagcgcaugcauccgcggguccaauucaaguuucuuuagccgacugaacuggcucacgcauucuaauuuuaaguauccagccuuaaacgugacuaugcccaauaacgagcaguucgauaaacuguacauuuggggaguccaccauccuggcaccgacaaggaucagaucuuucuuuaugcucaguccucaggccguauuacagugagcacuaaaagaagucaacaggccguaaucccaaacauagggucuaggccccggauucgcaauaucccuuccagaauuagcaucuacuggaccaucguuaagccaggagacauuuugcugauaaacucgacagguaaucuaaucgcgccgaggggcuacuucaaaauucggucugggaaguccucaaucaugcgcagugacgcacccauaggaaaguguaaaagcgaaugcauuaccccuaacggcuccaucccaaaugauaagcccuuucagaacgugaaucgaaucacguauggugccuguccuagauacgucaaacagucuacucucaagcuggcuacagggaugaggaacgugccagagaaacaaacccggggaauuuucggcgccaucgcaggcuuuauugaaaaugggugggagggaaugaaggacgguugguauggcuuccgucaccagaacagcgaggggcgcggacaggcugccgaucuuaaaucaacucaagcggccauagaccagaucaauggcaagcugaacagauugauugguaagacaaaugaaaaauuccaccagaucgagaaggaauuuagugagguggaagggaggauccaggaucucgagaaauacgucgaggacaccaagauugaucugugguccuauaacgcagaauuacugguugcucucgagaaucaacauacgauagaccuuaccgauagcgaaaugaacaaacuguucgagaagacaaagaaacaguugcgggaaaacgccgaggacaugggcaauggaugcuuuaagaucuaccacaaaugugauaacgcuugcauuggcucuauccgaaaugggacuuaugaccaugacguguaccgcgaugaggcccuaaacaauagauuccagauuaagggaguagaacugaaaucagguuacaaggacuggauccucuggauaaguuuugcaaucagcugcuuccugcuuuguguggcccuguugggcuuuauuaugugggcuugccagaaggggaacaucagguguaauauuugcaucuga

SEQ ID NO: 141268 - RNA, 1701 nt, Artificial Sequence; identical to SEQ ID NO: 140489
  derived and/or modified CDS sequence (opt3) from hemagglutinin__InfluenzaA__ALE31689

SEQ ID NO: 141269 - RNA, 1701 nt, Artificial Sequence
  derived and/or modified CDS sequence (opt3) from hemagglutinin__InfluenzaA__ALE31690
augaagaccaucauugcccugagcugcauacucugucuuguguucgcucagaaacugcccggcaacgacaauuccacagcaacuuugugcuuagggcaccaugccgucccuaacggaacgaucguuaagaccauuacaaaugauagaaucgaggugacuaacgcgaccgaacugguacaaaauucuucaauuggugagaucugugacaguccacaccagauacuagauggcgaaaacugcacacucaucgacgcucugcuuggggauccgcagugugacggauuucagaauaaaaagugggaucuguucguggagaggagcaaagccuacuccaacugcuaucccuacgacgucccugauuaugcaucuuugcggucgcucguggccucaagcggcacccuggaauuuaauaacgagaguuucaauugggcugguguuacucaaaacgggacauccucuagcuguauucgcggauccaauucaaguuucuucagccgacugaacuggcucacccauuuaaauucuaaguacccagcacugaacgugacgaugcccaacaaugagcaguuugacaaacuuuauaucuggggcguccaccauccuggcacugauaaggaccagauuuucuuguacgcccaguccucagggcguaucaccgugagcacaaagagaagucaacaggcuguaauaccaaacauuggaucuaggccccggauccgcgauauuccuuccagaaucagcaucuauuggacuauuguuaaaccaggugacauacugcuaaucaauucgaccggcaaccucauugccccgaggggguacuuuaagauccggucuggaaaauccucaauaaugcgcagugacgcgcccauuggcaagugcaagagcgaauguaucacaccuaaugguuccaucccaaacgauaaacccuuccagaaugugaaccgaauuaccuacggggcaugcccuagauaugucaagcagucuacgcugaaacuugccacuggaaugaggaaugugccagagcggcaaacacguggcaucuuuggcgcuauugccggguucauagaaaacggaugggaggguaugguggacggcugguacggguuucgccaccagaauagcgagggaagaggccaggcagcugaucugaagucaacccaagccgcgaucgaccagauuaacgguaaauugaauaggcucaucgggaagacuaacgaaaaauuccaccagaucgagaaggaauuuagugaggucgaaggccggauucaggaucuggagaaguauguugaggacacaaaaauagauuuaugguccuacaaugccgaacugcucguggcacuugagaaccaacauaccaucgaccugacggauagcgaaaugaacaaguuguuugagaaaaccaagaaacagcuacgagaaaaugcugaggacaugggaaacggcuguuucaagauuuaucacaagugcgauaaugccugcaucgggucuauucgcaacggaacauacgaccauaauguauauagagacgaggcucugaacaauagguuucagaucaaagguguggaacucaagucaggcuacaaagauuggauacuguggaucaguuucgccauuagcuguuuucuucugugcgucgcauugcucggguucaucaugugggccugucagaagggaaacauucggugcaauaucuguauauga

SEQ ID NO: 141270 - RNA, 1701 nt, Artificial Sequence; identical to SEQ ID NO: 138042
  derived and/or modified CDS sequence (opt3) from hemagglutinin__InfluenzaA__ALE31691

SEQ ID NO: 141271 - RNA, 1701 nt, Artificial Sequence
  derived and/or modified CDS sequence (opt3) from hemagglutinin__InfluenzaA__ALE31692
augaagaccaucauugcccugagcuacauacucugccuuguguucgcucagaaaauccccggcaacgacaauuccacagcaacucuguguuuggggcaccaugccgucccuaacggaacgauuguuaagaccaucacaaaugauagaauugaggugacuaacgcgaccgaauuaguacaaaauucuucaaucggugagauaugcgacaguccacaccagauccuggauggcgaaaacuguacacuaauugacgcucuccugggggauccgcagugcgacggauuucagaauaaaaagugggaucuuuucguggagaggagcaaagccuauuccaacuguuaccccuaugacgucccugauuacgcaucucugcggucguugguggccucaagcggcacccucgaauuuaauaacgagaguuucaauuggacugguguuacacaaaacgggaccuccucugcuugcauccgcaagagcuccucaaguuucuucagccgacugaauuggcugacgcaucucaacuauacuuacccagcauuaaaugugaccaugcccaacaacgagcaguuugacaagcuguauauuuggggaguccaccauccuggcacagauaaagaccagaucuuccuuuacgcccguucuuccggcagaauaacugugucaaccaagaggagccagcaagcuguaauuccaaauaucggguaccggccccgcauuagagauaucccuaguaggaucucuauuuauuggacaauaguuaaaccaggagacaucuugcugauuaacuccaccgguaaucuaaucgccccgcggggcuacuuuaagauacgcagcgggaaaucgucuauuaugcgauccgacgcgcccaucggaaaguguaagucagaaugcaucacgccuaacggcaguauuccaaaugauaaacccuuccagaacgugaauagaaucacuuauggugcauguccuagguacgucaagcacagcacacucaaacuggccaccgggaugcggaacgugccagagaagcagacucguggaauuuuuggcgcuauagccggcuucaucgaaaaugggugggagggaaugguggacgguugguauggcuuucgccaccagaacuccgaggggagaggacaagcagcugaucuuaaaucuacacaggccgcgauugaccagaucaauggcaagcugaacagguugaucgguaaaaccaaugaaaaguuccaucaaauugagaaggaauuuagcgaggucgaagggcggauacaggaucucgagaaauacguugaggacacgaagaucgaucuguggucauauaacgccgaauuacugguggcacucgagaaucagcacaccauugaccuuacagauagugaaaugaacaaacuguuugagaagacuaaaaagcaguugcgagaaaacgcugaggacaugggcaauggaugcuucaagaucuaccauaaaugugauaacgccugcauuggcuccauccgcaaugggaccuacgaccacaacguauauagagacgaggcucuaaauaacagguuucaaauaaagggaguggaacugaaaagcgguuacaaggauuggauccucuggauuucuuucgccaucucaugcuuucugcuuugugucgcacuguugggcuucauuaugugggccugccagaaagggaauauccgguguaacauaugcauuuga

SEQ ID NO: 141272 - RNA, 1701 nt, Artificial Sequence; identical to SEQ ID NO: 141271
  derived and/or modified CDS sequence (opt3) from hemagglutinin__InfluenzaA__ALE31693

SEQ ID NO: 141273 - RNA, 1701 nt, Artificial Sequence; identical to SEQ ID NO: 140489
  derived and/or modified CDS sequence (opt3) from hemagglutinin__InfluenzaA__ALE31694

SEQ ID NO: 141274 - RNA, 1701 nt, Artificial Sequence; identical to SEQ ID NO: 141271
  derived and/or modified CDS sequence (opt3) from hemagglutinin__InfluenzaA__ALE31695

SEQ ID NO: 141275 - RNA, 1701 nt, Artificial Sequence; identical to SEQ ID NO: 141147
  derived and/or modified CDS sequence (opt3) from hemagglutinin__InfluenzaA__ALE31696

SEQ ID NO: 141276 - RNA, 1701 nt, Artificial Sequence; identical to SEQ ID NO: 141271
  derived and/or modified CDS sequence (opt3) from hemagglutinin__InfluenzaA__ALE31697

SEQ ID NO: 141277 - RNA, 1701 nt, Artificial Sequence
  derived and/or modified CDS sequence (opt3) from hemagglutinin__InfluenzaA__ALE31698
augaagaccaucauugcccugagcuacauacucugcaugguguucgcucagaaaauccccggcaacgacaauuccacagcaacucuuugucuggggcaccaugccgucccuaacggaacgauuguuaagaccaucacaaaugauagaauugaggugacuaacgcgaccgaauugguacaaaauucuucaaucggugagauaugcgacaguccacaccagaucuuagauggcgaaaacuguacacugauugacgcucuacucggggauccgcagugcgacggauuucagaauaaaaagugggaucuguucguggagaggagcaaagccuauuccaacuguuaccccuaugacgucccugauuacgcaucucuucggucgcugguggccucaagcggcaccuuggaauuuaauaacgagaguuucaauuggacugguguuacacaaaacgggaccuccucugcuugcauccgccgaagcuccucaaguuucuucagccgucucaauuggcugacgcaucugaacuauacuuacccagcacucaaugugaccaugcccaacaacgagcaguuugacaaguuauauauuuggggaguccaccauccuggcacagauaaggaccagaucuuccuguacgcccagucuuccggcagaauaacugugucaaccaaaaggagccaacaggcuguaauuccaaauaucgggagucggccccgcauuagagauaucccuucuaggaucuccauuuacuggacaauaguuaagccaggagacauccuuuugauuaacagcaccgguaaucugaucgccccgcggggcuauuuuaaaauacgcucggggaagucuuccauuaugcgaucagacgcgcccaucggaaaauguaagagugaaugcaucacgccuaacggcagcauuccaaaugauaagcccuuccagaacgugaauagaaucacuuacggugcauguccuagguaugucaaacacuccacacuaaagcucgccaccgggaugcggaacgugccagagaaacagacucguggaauuuuuggcgcuauagccggcuucaucgaaaaugggugggagggaaugguggacgguugguacggcuuucgccaccaaaacucugaggggagaggacaggcagcugaucuuaagagcacacaggccgcgauugaccaaaucaauggcaaacuuaacaggcugaucgguaagaccaaugaaaaauuccaucagauugagaaggaauuuucagaggucgaagggcggauacaggauuuggagaaguauguugaggacacgaaaaucgaucucuggaguuacaacgccgaacuguuaguggcacuggagaaucagcacaccauugaccucacagauuccgaaaugaacaagcuguuugagaaaacuaagaaacaacugcgagaaaacgcugaggacaugggcaauggaugcuucaagaucuaucauaagugugauaacgccugcauuggcagcauccgcaaugggaccuacgaccacaacguauacagagacgaggcuuugaauaacagguuucagauaaaaggaguggaacuaaagucugguuauaaagauuggauccuguggauuucauucgccaucaguugcuuucuccugugugucgcacuucugggcuucauuaugugggccugccagaaggggaauauccgguguaacauaugcauuuga

SEQ ID NO: 141278 - RNA, 1701 nt, Artificial Sequence
  derived and/or modified CDS sequence (opt3) from hemagglutinin__InfluenzaA__ALE31699
augaagaccaucauugcccugagcuacauacucugccuuguguucgcucagaaaauccccggcaacgacaauuccacagcaacucuguguuuggggcaccaugccgucccuaacggaacgauuguuaagaccaucacaaaugauagaauugaggugacuaacgcgaccgaauuaguacaaaauucuucaaucggugagauaugcgacaguccacaccagauccuggauggcgaaaacuguacacuaauugacgcucuccugggggauccgcagugcgacggauuucagaauaaaaagugggaucuuuucguggagaggagcaaagccuauuccaacuguuaccccuaugacgucccuaauuacgcaucucugcggucguugguggccucaagcggcacccucgaauuuaacaaugagaguuucaacuggacugguguuacacaaaaugggaccuccucugcuugcauccgccgaagcuccucaaguuucuucagccgucugaacuggcugacgcaucucaauuaugcauacccagccuuaaacgugacuaugcccaacaaugagcaguuugauaagcuguauauuuggggaguccaccauccuggcaccgacaaggaucagaucuuccuuuacgcucagucuuccggcagaauaacagugucaacuaaaaggagccaacaggccguaauuccaaacaucgggagucggccccgcauuagagacaucccuucuaggaucuccauuuacuggaccauaguuaagccaggagauaucuugcugauuaauagcacagguaaccuaaucgcgccgcggggcuauuuuaaaauacgcucggggaagucuuccauuaugcgaucagacgcacccaucggaaaauguaagagugaaugcaucaccccuaauggcagcauuccaaacgacaagcccuuccagaaugugaacagaaucacguacggugccuguccuagguaugucaaacacuccacucucaagcuggcuacagggaugcggaaugugccagagaaacagacccguggaauuuuuggcgccauagcaggcuucaucgaaaacgggugggagggaaugguggaugguugguacggcuuucgccaccaaaauucugaggggagaggacaggcugccgaccuuaagagcacucaggcggccauugaucaaaucaacggcaaacugaauagguugaucgguaagacaaacgaaaaauuccaucagauugagaaggaauuuucagaggucgaagggcggauacaggaccucgagaaguauguugaggauaccaaaaucgaccuguggaguuacaaugcagaauuacugguggcucucgagaaccagcacacgauugaucuuaccgacuccgaaaugaacaagcuguuugagaaaacaaagaaacaauugcgagaaaaugccgaggauaugggcaacggaugcuucaagaucuaucauaagugugacaaugcuugcauuggcagcauccgcaacgggacuuacgaucacaauguauacagagacgaggcccuaaacaauagguuucagauaaaaggaguggaacugaagucugguuauaaagacuggauccucuggauuucauucgcaaucaguugcuuucugcuuugugucgcccuguugggcuucauuaugugggcuugccagaaggggaacauccgguguaauauaugcauuuga

SEQ ID NO: 141279 - RNA, 1701 nt, Artificial Sequence; identical to SEQ ID NO: 140489
  derived and/or modified CDS sequence (opt3) from hemagglutinin__InfluenzaA__ALE31700

SEQ ID NO: 141280 - RNA, 1701 nt, Artificial Sequence; identical to SEQ ID NO: 140489
  derived and/or modified CDS sequence (opt3) from hemagglutinin__InfluenzaA__ALE31701

SEQ ID NO: 141281 - RNA, 1701 nt, Artificial Sequence; identical to SEQ ID NO: 141046
  derived and/or modified CDS sequence (opt3) from hemagglutinin__InfluenzaA__ALE31702

SEQ ID NO: 141282 - RNA, 1701 nt, Artificial Sequence; identical to SEQ ID NO: 140489
  derived and/or modified CDS sequence (opt3) from hemagglutinin__InfluenzaA__ALE31703

SEQ ID NO: 141283 - RNA, 1701 nt, Artificial Sequence; identical to SEQ ID NO: 140489
  derived and/or modified CDS sequence (opt3) from hemagglutinin__InfluenzaA__ALE31704

SEQ ID NO: 141284 - RNA, 1701 nt, Artificial Sequence; identical to SEQ ID NO: 141046
  derived and/or modified CDS sequence (opt3) from hemagglutinin__InfluenzaA__ALE31705

SEQ ID NO: 141285 - RNA, 1701 nt, Artificial Sequence
  derived and/or modified CDS sequence (opt3) from hemagglutinin__InfluenzaA__ALE31706
augaagaccaucauugcccugagcuacauacucugccuuguguucgcucagaaaauccccggcaacgacaauuccacagcaacucuguguuuggggcaccaugccgucccuaacggaacgauuguuaagaccaucacaaaugauagaauugaggugacuaacgcgaccgaauuaguacaaaauucuucaaucggugagauaugcgacaguccacaccagauccuggauggcgaaaacuguacacuaauugacgcucuccugggggauccgcagugcgacggauuucagaauaaaaagugggaucuuuucguggagaggagcaaagccuauuccaacuguuaccccuaugacgucccugauuacgcaucucugcggucguugguggccucaagcggcacccucgaauuuaauaacgagaguuucaauuggacugguguuacacaaaacgggaccuccucugcuugcauccgccgaagcuccucaaguuucuucagccgucugaauuggcugacgcaucucaacuauacuuacccagcauuaaaugugaccaugcccaacaacgagcaguuugacaagcuguauauuuggggaguccaccauccuggcacagauaaggaccagaucuuccuuuacgcccagucuuccggcagaauaacugugucaaccaaagggagccaacaggcuguaauuccaaauaucggaaguaggccccggauucgcgauaucccuucuagaaucuccauuuacuggacaauaguuaagccaggugacaucuugcugauuaacagcaccggcaaucuaaucgccccgaggggguauuuuaaaauacggucgggaaagucuuccauuaugcgcucagacgcgcccaucggcaaauguaagagugaaugcaucacgccuaacgguagcauuccaaaugauaagcccuuccagaacgugaaucgaaucacuuacggggcauguccuagauaugucaaacacuccacacucaagcuggccaccggaaugaggaacgugccagagaaacagacucggggcauuuuuggcgcuauagccggguucaucgaaaauggaugggaggguaugguggacggcugguacggguuucgucaccaaaacucugagggacgcggccaggcagcugaucuuaagagcacacaggccgcgauugaccaaaucaaugguaaacugaacagauugaucgggaagaccaaugaaaaauuccaucagauugagaaggaauuuucagaggucgaaggcaggauacaggaucucgagaaguauguugaggacacgaaaaucgaucuguggaguuacaacgccgaauuacugguggcacucgagaaucagcacaccauugaccuuacagauuccgaaaugaacaagcuguuugagaaaacuaagaaacaauugcgggaaaacgcugaggacaugggaaauggcugcuucaagaucuaucauaagugugauaacgccugcauugggagcauccgaaauggaaccuacgaccacaacguauaccgcgacgaggcucuaaauaacagauuucagauaaaagguguggaacugaagucuggcuauaaagauuggauccucuggauuucauucgccaucaguugccugcuucugugugucgcauugcucggguuuauuaugugggccugccagaagggaaauaucagguguaacauaugcauuuga

SEQ ID NO: 141286 - RNA, 1701 nt, Artificial Sequence; identical to SEQ ID NO: 141175
  derived and/or modified CDS sequence (opt3) from hemagglutinin__InfluenzaA__ALE31707

SEQ ID NO: 141287 - RNA, 1701 nt, Artificial Sequence; identical to SEQ ID NO: 141175
  derived and/or modified CDS sequence (opt3) from hemagglutinin__InfluenzaA__ALE31708

SEQ ID NO: 141288 - RNA, 1701 nt, Artificial Sequence; identical to SEQ ID NO: 140475
  derived and/or modified CDS sequence (opt3) from hemagglutinin__InfluenzaA__ALE31709

SEQ ID NO: 141289 - RNA, 1701 nt, Artificial Sequence
  derived and/or modified CDS sequence (opt3) from hemagglutinin__InfluenzaA__ALE31710
augaagaccaucauugcccugagcuacauacucugccuuguguucgcucagaaaauccccggcaacgacaauuccacagcaacucuguguuuggggcaccaugccgucccuaacggaacgauuguuaagaccaucacaaaugauagaauugaggugacuaacgcgaccgaauuaguacaaaauucuucaaucggugagauaugcgacaguccacaccagauccuggauggcgaaaacuguacacuaauugacgcucuccugggggauccgcagugcgacggauuucagaauaaaaagugggaucuuuucguggagaggagcaaagccuauuccaacuguuaccccuaugacgucccugauuacgcaucucugcggucguugguggccucaagcggcacccucgaauuuaauaacgagaguuucaauuggacugguguuacacaaaacgggaccuccucugcuugcauccgccgaagcuccucaaguuucuucagccgucugaauuggcugacgcaucucaacuauacuuacccagcauuaaaugugaccaugcccaacaacgagcaguuugacaagcuguauauuuggggaguccaccauccuggcacagauaaggaccagaucuuccuuuacgcccagucuuccggcagaauaacugugucaaccaaaaggagccaacaggcuguaauuccaaauaucgggagucgguugcgcauuagagauauccccucuaggaucuccauuuacuggacaauaguuaagccuggagacauccugcuaauuaacagcaccgguaaucucaucgccccacggggcuauuuuaaaauacugucggggaagucuuccauuaugcgcucagacgcgccgaucggaaaauguaagagugaaugcaucacgcccaacggcagcauuccuaaugauaagccauuccagaacgugaaucgaaucacuuacggugcaugucccagauaugucaaacacuccacacuuaagcuggccaccgggaugaggaacgugccugagaaacagacucggggaauuuuuggcgcuauagccggcuucaucgaaaaugggugggagggaaugguggacgguugguacggcuuucgucaccaaaacucugaggggcgcggacaggcagcugaucucaagagcacacaggccgcgauugaccaaaucaauggcaaauugaacagacugaucgguaagaccaaugaaaaauuccaucagauugagaaggaauuuucagaggucgaagggaggauacaggauuuagagaaguauguugaggacaguaaaaucgaucugugguccuacaacgccgaacuccuuguggcacuggagaaucagcacacgauugacuugaccgauagcgaaaugaacaagcuauuugagaaaacaaagaaacaacugcgggaaaacgcugaggacaugggcaauggaugcuucaagaucuaucauaagugugauaacgccugcauuggcucuauccgaaaugggacuuacgaccacaacguauaccgcgacgaggcucucaauaacagauuucagauaaaaggaguggaacugaagucagguuauaaagauuggauccuuuggauuaguuucgccaucagcugcuuucuguugugugucgcacuccugggcuucauuaugugggccugccagaaggggaauaucagguguaacauaugcauuuga

SEQ ID NO: 141290 - RNA, 1701 nt, Artificial Sequence; identical to SEQ ID NO: 141175
  derived and/or modified CDS sequence (opt3) from hemagglutinin__InfluenzaA__ALE31711

SEQ ID NO: 141291 - RNA, 1701 nt, Artificial Sequence; identical to SEQ ID NO: 141033
  derived and/or modified CDS sequence (opt3) from hemagglutinin__InfluenzaA__ALE31712

SEQ ID NO: 141292 - RNA, 1701 nt, Artificial Sequence
  derived and/or modified CDS sequence (opt3) from hemagglutinin__InfluenzaA__ALE31713
augaagaccaucauugcccugagcuacauacucugccuuguguucgcucagaaaauccccggcaacgacaauuccacagcaacucuguguuuggggcaccaugccgucccuaacggaacgauuguuaagaccaucacaaaugauagaauugaggugacuaacgcgaccgaauuaguacaaaauucuucaaucggugagauaugcgacaguccacaccagauccuggauggcgaaaacuguacacuaauugacgcucuccugggggauccgcagugcgacggauuucagaauaaaaagugggaucuuuucguggagaggagcaaagccuauuccaacuguuaccccuaugacgucccugauuacgcaucucugcggucguugguggccucaagcggcacccucgaauuuaauaacgagaguuucaauuggacugguguuacacaaaacgggaccuccucugcuugcauccgcaagagcuccucaaguuucuucagccgacugaauuggcugacgcaucucaacuauacuuacccagcauuaaaugugaccaugcccaacaacgagcaguuugacaagcuguauauuuggggaauccaccauccuggcacagauaaagaccagauauuccuuuacgcccguucuuccggcagaauuacugucucaaccaagaggagccagcaagcugugaucccaaauauugggagucggccccgcaucagagauaucccuucuaggauuuccauauacuggacaaucguaaaaccaggagacauuuugcugaucaacagcaccgguaaucuaauagccccgcggggcuauuuuaagauucgcucggggaaaucuuccaucaugcgaucagacgcgcccaucggaaaguguaagagugaaugcauuacgccuaacggcagcaucccaaaugauaaacccuuccagaacguuaauagaauuacuuacggugcauguccuagguaugugaagcacuccacacucaaacuggccaccgggaugcggaacauaccagagaagcagacuaaaggaaucuuuggcgcuauugccggcuucaucgaaaaugggugggagggaauggucgacgguugguacggcuuucgucaccagaacucugaggggcgcggacaagcagcugaucuuaagagcacacaggccgcgaucgaccagauuaauggcaaacugaacagauugauagguaagaccaaugaaaaguuccaucaaaucgagaaagaauuuucagagguggaagggaggauucaggaucucgagaaguauguggaggacacgaaaaucgaucuguggaguuacaacgccgaauuacuggucgcacucgagaaucagcacaccauugaccuuacagauuccgaaaugaacaagcuguuugagaaaacuaagaagcaguugcgggaaaacgcugaggacaugggcaauggaugcuucaaaaucuaucauaagugugauaacgccugcauaggcagcauccgaaaugggaccuacgaccacaacguuuaccgcgacgaggcucuaaauaacagauuucaaauuaaaggaguggaacugaagucugguuauaaagauuggauccucuggauuucauucgccacaaguugcuuucugcuuuguguagcacuguugggcuucaucaugugggccugccagaaggggaauauaagguguaacauuugcaucuga

SEQ ID NO: 141293 - RNA, 1701 nt, Artificial Sequence; identical to SEQ ID NO: 141147
  derived and/or modified CDS sequence (opt3) from hemagglutinin__InfluenzaA__ALE31714

SEQ ID NO: 141294 - RNA, 1701 nt, Artificial Sequence; identical to SEQ ID NO: 141147
  derived and/or modified CDS sequence (opt3) from hemagglutinin__InfluenzaA__ALE31715

SEQ ID NO: 141295 - RNA, 1701 nt, Artificial Sequence; identical to SEQ ID NO: 141175
  derived and/or modified CDS sequence (opt3) from hemagglutinin__InfluenzaA__ALE31716

SEQ ID NO: 141296 - RNA, 1701 nt, Artificial Sequence
  derived and/or modified CDS sequence (opt3) from hemagglutinin__InfluenzaA__ALE31717
augaagaccaucauugcccugagcuacauacucugccuuguguucgcucagaaaauccccggcaacgacaauuccacagcaacucuguguuuggggcaccaugccgucccuaacggaacgauuguuaagaccaucacaaaugauagaauugaggugacuaacgcgaccgaauuaguacaaaauucuucaaucggugagauaugcgacaguccacaccagauccuggauggcgaaaacuguacacuaauugacgcucuccugggggauccgcagugcgacggauuucagaauaaaaagugggaucuuuucguggagaggagcaaagccuauuccaacuguuaccccuaugacgucccugauuacgcaucucugcggucguugguggccucaagcggcacccucgaauuuaauaacgagaguuucaauuggacugguguuacacaaaacgggaccuccucugcuugcauccgcaagagcuccucaaguuucuucagccgacugaauuggcugacgcaucucaacuauaaguacccagcauuaaaugugacuaugcccaacaacgagcaguuugacaaacuguauauuuggggaguccaccauccuggcaccgauaaggaccagaucuuccuuuacgcccguucuuccggcagaauaacagugucaacuaaaaccagccagcaagcuguaauuccaaauaucgggaguaggccccggauucgcgauaucccuucuagaaucuccauuuacuggacaauaguuaagccaggagacaucuugcugauuaacagcaccgguaaucuaaucgccccgaggggcuauuuuaaaauacggucggggaagucuuccauuaugcgcucagacgcgcccaucggaaaguguaaaagugaaugcaucacgccuaacggcagcauuccaaaugauaagcccuuccagaacgugaaucgaacuacauacggugcauguccuagauaugucaaacacuccacccucaagcuggccacugggaugaggaacgugccagagaaacagacacggggaaucuuuggcgcuauugccggcuucauagaaaaugggugggagggaaugguggacgguugguacggcuuucgucaccagaacucugaggggcgcggacaagcagcugaucuuaagagcacccaggccgcgaucgaccagauuaauggcaaacugaacagauugaucgguaagacgaaugaaaaguuccaucaaaucgagaaagaauuuucagaggucgaagggaggauucaggaucucgagaaguauguugaggacaccaaaauagaucuguggaguuacaacgccgaauuacugguggcacucgagaaucagcacacaaucgaccuuacugauuccgaaaugaacaagcuguuugagaaaaccaagaagcaguugcgggaaaacgcugaggacaugggcaauggaugcuucaaaauuuaucauaagugugauaacgccugcaucggcagcauucgaaaugggacauacgaccacaacguauaccgcgacgaggcucuaaauaacagauuucaaaucaaaggaguggaacugaagucugguuauaaagauuggauacucuggaucucauucgccauuaguugcuuucugcuuugugucgcacuguugggcuucaucaugugggccugccagaaggggaauauuagguguaacaucugcauauga

SEQ ID NO: 141297 - RNA, 1701 nt, Artificial Sequence; identical to SEQ ID NO: 141147
  derived and/or modified CDS sequence (opt3) from hemagglutinin__InfluenzaA__ALE31718

SEQ ID NO: 141298 - RNA, 1701 nt, Artificial Sequence
  derived and/or modified CDS sequence (opt3) from hemagglutinin__InfluenzaA__ALE31719
augaagaccaucauugcccugagcuacauacucugccuuguguucgcucagaaaauccccggcaacgacaauuccacagcaacucuguguuuggggcaccaugccgucccuaacggaacgauuguuaagaccaucacaaaugauagaauugaggugacuaacgcgaccgaauuaguacaaaauucuucaaucggugagauaugcgacaguccacaccagauccuggauggcgaaaacuguacacuaauugacgcucuccugggggauccgcagugcgacggauuucagaauaaaaagugggaucuuuucguggagaggagcaaagccuauuccaacuguuaccccuaugacgucccugauuacgcaucucugcggucguugguggccucaagcggcacccucgaauuuaauaacgagaguuucaauuggacugguguuacacaaaacgggaccuccucugcuugcauccgcaagagcuccucaaguuucuucagccgacugaauuggcugacgcaucucaacuauacuuacccagcauuaaaugugaccaugcccaacaacgagcaguuugacaagcuguauauuuggggaguccaccauccuggcacagauaaagaccagaucuuccuuuacgcccguucuuccggcagaauaacugugucaaccaagaggagccagcaagcuguaauuccaaauaucgggagucggccccgcauuagagauaucccuucuaggaucuccauuuacuggacaauaguuaaaccaggagacaucuugcugauuaacagcaccgguaaucuaaucgccccgcggggcuauuuuaagauacgcucggggaaaucuuccauuaugcgaucagacgcgcccaucggaaaguguaagagugaaugcaucacgccuaacggcagcauuccaaaugauaaacccuuccagaacgugaauagaaucacuuacggugcauguccuagguaugucaagcacuccacacucaaacuggccaccgggaugcggaacauuccagagaagcagacucguggaauauuuggcgcuaucgccggcuucauugaaaaugggugggagggaaugguggacgguugguacggcuuucgccaccagaacucugaggggagaggacaagcagcugaucuuaaaagcacacaggccgcgaucgaccagaucaauggcaagcugaacagguugauugguaaaaccaaugaaaaguuccaucaaauagagaaggaauuuucagagguggaagggcggauccaggaucucgagaaauaugucgaggacacgaagauugaucuguggaguuacaacgccgaauuacugguugcacucgagaaucagcacaccaucgaccuuacagauuccgaaaugaacaaacuguuugagaagacuaaaaagcaguugcgagaaaacgcugaggacaugggcaauggaugcuucaagauuuaucauaaaugugauaacgccugcaucggcagcauacgcaaugggaccuacgaccacaacguguacagagacgaggcucuaaauaacagguuucaaaucaagggaguagaacugaaaucugguuauaaggauuggauucucuggaucucauucgccauuaguugcuuucugcuuuguguggcacuguugggcuucaucaugugggccugccagaaagggaauauacgguguaacauuugcaucuga

SEQ ID NO: 141299 - RNA, 1701 nt, Artificial Sequence; identical to SEQ ID NO: 141033
  derived and/or modified CDS sequence (opt3) from hemagglutinin__InfluenzaA__ALE31720

SEQ ID NO: 141300 - RNA, 1701 nt, Artificial Sequence; identical to SEQ ID NO: 141046
  derived and/or modified CDS sequence (opt3) from hemagglutinin__InfluenzaA__ALE31721

SEQ ID NO: 141301 - RNA, 1701 nt, Artificial Sequence; identical to SEQ ID NO: 141269
  derived and/or modified CDS sequence (opt3) from hemagglutinin__InfluenzaA__ALE31722

SEQ ID NO: 141302 - RNA, 1701 nt, Artificial Sequence
  derived and/or modified CDS sequence (opt3) from hemagglutinin__InfluenzaA__ALE31723
augaagaccaucauugcccugagcuacauacucugccuuguguucgcucagaaaauccccggcaacgacaauuccacagcaacucuguguuuggggcaccaugccgucccuaacggaacgauuguuaagaccaucacaaaugauagaauugaggugacuaacgcgaccgaauuaguacaaaauucuucaaucggugagauaugcgacaguccacaccagauccuggauggcgaaaacuguacacuaauugacgcucuccugggggauccgcagugcgacggauuucagaauaaaaagugggaucuuuucguggagaggagcaaagccuauuccaacuguuaccccuaugacgucccugauuacgcaucucugcggucguugguggccucaagcggcacccucgaauuuaauaacgagaguuucaauuggacugguguuacacaaaacgggaccuccucugcuugcauccgcaagagcuccucaaguuucuucagccgacugaauuggcugacgcaucucaacuauacuuacccagcauuaaaugugaccaugcccaacaacgagcaguuugacaagcuguauauuuggggaguccaccauccuggcacagauaaagaccagaucuuccuuuacgcccguucuuccggcagaauaacugugucaaccaagaggagccagcaagcuguaauuccaaauaucgggagucggccccgcauuagagauaucccuucuaggaucuccauuuacuggacaauaguuaaaccaggagacaucuugcugauuaacagcaccgguaaucuaaucgccccgcggggcuauuuuaagauacgcucggggaaaucuuccauuaugcgaucagacgcgcccaucggaaaguguaagagugaaugcacgacuccuaacggcagcaucccaaaugauaaacccuuccagaacgugaauagaauuacauacggugcauguccuagguaugucaagcacuccacccucaaacuggccacugggaugcggaacgugccagagaagcagacacguggaaucuuuggcgcuauugccggcuucauagaaaaugggugggagggaaugguggacgguugguacggcuuucgccaccagaacucugaggggagaggacaagcagcugaucuuaaaagcacccaggccgcgaucgaccagauuaauggcaagcugaacagguugaucgguaaaacgaaugaaaaguuccaucaaaucgagaaggaauuuucagaggucgaagggcggauucaggaucucgagaaauauguugaggacaccaagauagaucuguggaguuacaacgccgaauuacugguggcacucgagaaucagcacacaaucgaccuuacugauuccgaaaugaacaaacuguuugagaagaccaaaaagcaguugcgagaaaacgcugaggacaugggcaauggaugcuucaagauuuaucauaaaugugauaacgccugcaucggcagcauucgcaaugggacauacgaccacaacguauacagagacgaggcucuaaauaacagguuucaaaucaagggaguggaacugaaaucugguuauaaggauuggauacucuggaucucauucgccauuaguugcuuucugcuuugugucgcacuguugggcuucaucaugugggccugccagaaagggaauauucgguguaacaucugcauauga

SEQ ID NO: 141303 - RNA, 1701 nt, Artificial Sequence; identical to SEQ ID NO: 140489
  derived and/or modified CDS sequence (opt3) from hemagglutinin__InfluenzaA__ALE31724

SEQ ID NO: 141304 - RNA, 1701 nt, Artificial Sequence; identical to SEQ ID NO: 140489
  derived and/or modified CDS sequence (opt3) from hemagglutinin__InfluenzaA__ALE31725

SEQ ID NO: 141305 - RNA, 1701 nt, Artificial Sequence; identical to SEQ ID NO: 140489
  derived and/or modified CDS sequence (opt3) from hemagglutinin__InfluenzaA__ALE31726

SEQ ID NO: 141306 - RNA, 1701 nt, Artificial Sequence; identical to SEQ ID NO: 140489
  derived and/or modified CDS sequence (opt3) from hemagglutinin__InfluenzaA__ALE31727

SEQ ID NO: 141307 - RNA, 1701 nt, Artificial Sequence
  derived and/or modified CDS sequence (opt3) from hemagglutinin__InfluenzaA__ALE31728
augaagaccaucauugcccugagcuacauacucugccuuguguucgcucagaaaauccccggcaacgacaauuccacagcaacucuguguuuggggcaccaugccgucccuaacggaacgauuguuaagaccaucacaaaugauagaauugaggugacuaacgcgaccgaauuaguacaaaauucuucaaucggugagauaugcgacaguccacaccagauccuggauggcgaaaacuguacacuaauugacgcucuccugggggauccgcagugcgacggauuucagaauaaaaagugggaucuuuucguggagaggagcaaagccuauuccaacuguuaccccuaugacgucccugauuacgcaucucugcggucguugguggccucaagcggcacccucgaauuuaauaacgagaguuucaauuggacugguguuacacaaaacgggaccuccucugcuugcauccgccgaagcuccucaaguuucuucagccgucugaauuggcugacgcaucucaacuauacuuacccagcauuaaaugugaccauucccaacaacgagcaguuugacaagcuguauaucuggggaguccaccauccuggcacagauaaggaccagauauuccuuuacgcccagucuuccggcagaauuacugugucaaccaaaaggagccaacaggcuguaaucccaaauauugggagucggccccgcaucagagauaucccuucuaggauuuccauauacuggacaaucguuaagccaggagacauuuugcugaucaacagcaccgguaaucuaauagccccgcggggcuauuuuaaaauucgcucggggaagucuuccaucaugcgaucagacgcgcccaucggaaaauguaagagugaaugcauuacgccuaacggcagcaucccaaaugauaagcccuuccagaacgugaauagaauuacuuacggugcauguccuagguaugucaaacacuccacacucaagcuggccaccgggaugcggaacgugccagagaaacagacucguggaauauuuggcgcuaucgccggcuucauugaaaaugggugggagggaaugguggacgguugguacggcuuucgccaccaaaacucugaggggagaggacaggcagcugaucuuaagagcacacaggccgcgaucgaccaaaucaauggcaaacugaacagguugauugguaagaccaaugaaaaauuccaucagauagagaaggaauuuucagaggucgaagggcggauccaggaucucgagaaguauguugaggacacgaaaauugaucuguggaguuacaacgccgaauuacugguggcacucgagaaucagcacaccaucgaccuuacagauuccgaaaugaacaagcuguuugagaaaacuaagaaacaauugcgagaaaacgcugaggacaugggcaauggaugcuucaagauuuaucauaagugugauaacgccugcaucggcagcauacgcaaugggaccuacgaccacaacguauacagagacgaggcucuaaauaacagguuucagaucaaaggaguggaacugaagucugguuauaaagauuggauucucuggaucucauucgccauuaguugcuuucugcuuugugucgcacuguugggcuucaucaugugggccugccagaaggggaauauacgguguaacauuugcaucuga

SEQ ID NO: 141308 - RNA, 1701 nt, Artificial Sequence
  derived and/or modified CDS sequence (opt3) from hemagglutinin__InfluenzaA__ALE31729
augaagaccaucauugcccugagcuacauacucugccuuguguucgcucagaaaauccccggcaacgacaauuccacagcaacucuguguuuggggcaccaugccgucccuaacggaacgauuguuaagaccaucacaaaugauagaauugaggugacuaacgcgaccgaauuaguacaaaauucuucaaucggugagauaugcgacaguccacaccagaucauugauggcgaaaacuguacacugaucgacgcucuacucggggauccgcagugcgacggauuucagaauaaaaagugggaucuguucguggagaggagcaaagccuauuccaacuguuaccccuaugacgucccugauuacgcaucucuucggucgcugguggccucaagcggcaccuuggaauuuaauaacgagaguuucaauuggacugguguuacacaaaacgggaccuccucugcuugcauucgccgaagcuccucaaguuucuucagccgucucaauuggcugacgcaucugaacuauacuuacccagcacucaaugugaccaugcccaacaacgagcaguuugacaaguuauauaucuggggaguccaccauccuggcacagauaaggaccagauauuccuguacgcccagucuuccggcagaauuacugugucaaccaaaaggagccaacaggcuguaaucccaaauauugggagucggccccgcaucagagauaucccuucuaggauuuccauauacuggacaaucguuaagccaggagacauucuuuugaucaacagcaccgguaaucugauagccccgcggggcuauuuuaaaauucgcucggggaagucuuccaucaugcgaucagacgcgcccaucggaaaauguaagagugaaugcauuacgccuaacggcagcaucccaaaugauaagcccuuccagaacgugaauagaauuacuuacggugcauguccuagguaugucaaacacuccacacuaaagcucgccaccgggaugcggaacgugccagagaaacagacucguggaauauuuggcgcuaucgccggcuucauugaaaaugggugggagggaaugguggacgguugguacggcuuucgccaccaaaacucugaggggagaggacaggcagcugaucuuaagagcacacaggccgcgaucgaccaaaucaauggcaaacuuaacaggcugauugguaagaccaaugaaaaauuccaucagauagagaaggaauuuucagaggucgaagggcggauccaggauuuggagaaguauguugaggacacgaaaauugaucucuggaguuacaacgccgaacuguuaguggcacuggagaaucagcacaccaucgaccucacagauuccgaaaugaacaagcuguuugagaaaacuaagaaacaacugcgagaaaacgcugaggacaugggcaauggaugcuucaagauuuaucauaagugugauaacgccugcaucggcagcauacgcaaugggaccuacgaccacaacguauacagagacgaggcuuugaauaacagguuucagaucaaaggaguggaacuaaagucugguuauaaagauuggauucuguggaucucauucgccauuaguugcuuucuccugugugucgcacuucugggcuucaucaugugggccugccagaaggggaauauacgguguaacauuugcaucuga

SEQ ID NO: 141309 - RNA, 1701 nt, Artificial Sequence; identical to SEQ ID NO: 140489
  derived and/or modified CDS sequence (opt3) from hemagglutinin__InfluenzaA__ALE31730

SEQ ID NO: 141310 - RNA, 1701 nt, Artificial Sequence
  derived and/or modified CDS sequence (opt3) from hemagglutinin__InfluenzaA__ALE31731
augaagaccaucauugcccugagcuacauacucugccagguguucgcucagaaaauccccggcaacgacaauuccacagcaacucuuugucuggggcaccaugccgucccuaacggaacgauuguuaagaccaucacaaaugauagaauugaggugacuaacgcgaccgaauugguacaaaauucuucaaucggugagauaugcgacaguccacaccagaucuuagauggcgaaaacuguacacugauugacgcucuacucggggauccgcagugcgacggauuucaaaauaaaaagugggaucuguucguggagaggagcaaagccuauuccaacuguuaccccuaugacgucccugauuacgcaucucuucggucgcugguggccucaagcggcaccuuggaauuuaauaacgagaguuucaauuggacugguguuacacagaacgggaccuccucugcuugcauccgcaagagcuccucaaguuucuucagccgacucaauuggcugacgcaucugaacuauacuuacccagcacucaaugugaccaugcccaacaacgagcaguuugacaaguuauauauuuggggaguccaccauccuggcacagauaaagaccagaucuuccuguacgcccguucuuccggcagaauaacugugucaaccaagaggagccaacaggcuguaauuccaaauaucgggagucggccccgcauuagagauaucccuucuaggaucuccauuuacuggacaauaguuaaaccaggagacauccuuuugauuaacagcaccgguaaucugaucgccccgcggggcuauuuuaagauacgcucggggaaaucuuccauuaugcgaucagacgcgcccaucggaaaguguaagagugaaugcaucacgccuaacggcagcauuccaaaugauaaacccuuccagaacgugaauagaaucacuuacggugcauguccuagguaugucaagcacuccacacuaaaacucgccaccgggaugcggaacgugccagagaagcagacucguggaauuuuuggcgcuauagccggcuucaucgaaaaugggugggagggaaugguggacgguugguacggcuuucgccaccaaaacucugaggggagaggacaggcagcugaucugaaaagcacacaggccgcgauugaccaaaucaauggcaaacuuaacaggcugaucgguaagaccaaugaaaaguuccaucagauugagaaggaauuuucagaggucgaagggcggauacaggauuuggagaaauauguugaggacacgaagaucgaucucuggaguuacaacgccgaacuguuaguggcacuggagaaucagcacaccauugaccucacagauuccgaaaugaacaaacuuuuugagaagacuaaaaagcaacugcgagaaaacgcugaggacaugggcaauggaugcuucaagaucuaucauaaaugugauaacgccugcauuggcagcauccgcaaugggaccuacgaccacaacguauacagagacgaggcuuugaauaacagguuucagauaaagggaguggaacuaaaaucugguuauaaggauuggauccuguggauuucauucgccaucaguugcuuucuccugugugucgcacuucugggcuucauuaugugggccugccagaaagggaauauccgguguaacauaugcauuuga

SEQ ID NO: 141311 - RNA, 1701 nt, Artificial Sequence; identical to SEQ ID NO: 141147
  derived and/or modified CDS sequence (opt3) from hemagglutinin__InfluenzaA__ALE31732

SEQ ID NO: 141312 - RNA, 1701 nt, Artificial Sequence; identical to SEQ ID NO: 141147
  derived and/or modified CDS sequence (opt3) from hemagglutinin__InfluenzaA__ALE31733

SEQ ID NO: 141313 - RNA, 1701 nt, Artificial Sequence
  derived and/or modified CDS sequence (opt3) from hemagglutinin__InfluenzaA__ALE31734
augaagaccaucauugcccugagcuacauacucugccuuguguucgcucagaaaauccccggcaacgacaauuccacagcaacucuguguuuggggcaccaugccgucccuaacggaacgauuguuaagaccaucacaaaugauagaauugaggugacuaacgcgaccgaauuaguacaaaauucuucaaucggugagauaugcgacaguccacaccagauccuggauggcgaaaacuguacacuaauugacgcucuccugggggauccgcagugcgacggauuucagaauaaaaagugggaucuuuucguggagaggagcaaagccuauuccaacuguuaccccuaugacgucccugauuacgcaucucugcggucguugguggccucaagcggcacccucgaauuuaauaacgagaguuucaauuggacugguguuacacaaaacgggaccuccucugcuugcauccgcaagagcuccucauccuuuuucagccgacugaauuggcugacgcaucucaaguauacuuacccagcauuaaacgugaccaugcccaauaacgagcaguuugacaaacuguauauuuggggaguccaccauccuggcacagauaaggaccagaucuuccuuuacgcccguucuuccggcagaauaacugugucaaccaaaaggagccagcaagcuguaauuccaaacaucggguuucggccccgcauuagagauaucccuaguaggaucucuauuuacuggacaauaguuaagccaggagacaucuugcugauuaauuccaccgguaaccuaaucgccccgcggggcuauuucaaaauacgcagcgggaagucgucuauuaugcgauccgacgcgcccaucggaaaguguaaaucagaaugcaucacgccuaauggcaguauuccaaacgauaagcccuuucagaaugugaacagaaucacuuacggugcauguccuagguaugucaaacacagcacacucaagcuggccaccgggaugcggaaugugccagagaaacagacucguggaauuuucggcgcuauagccggcuuuaucgaaaacgggugggagggaaugguggacgguugguacggcuuccgccaccagaauagugaggggagaggacaagcagcugaucuuaagucuacacaggccgcgauugaccagaucaacggcaaacugaauagguugaucgguaagaccaacgaaaaguuccaucaaauugagaaagaauuuagcgaggucgaagggcggauacaggaucucgagaaguauguugaggacacgaaaaucgaucuguggucauacaaugccgaauuacugguggcacucgagaaccagcacaccauugaccuuacagauagugaaaugaauaagcuguucgagaaaacuaagaagcaguugcgagaaaacgcugaggacaugggcaacggaugcuuuaaaaucuaucauaagugugauaaugccugcauuggcuccauccgcaacgggaccuacgaccacaauguauacagagacgaggcucuaaacaauagguuccaaauaaaaggaguggaacucaagagcgguuauaaagauuggauccuguggauuucuuuugccaucucaugcuuccugcuuugugucgcacuguugggcuuuauuaugugggccugccagaaggggaacauccgguguaauauaugcauuuga

SEQ ID NO: 141314 - RNA, 1701 nt, Artificial Sequence; identical to SEQ ID NO: 141147
  derived and/or modified CDS sequence (opt3) from hemagglutinin__InfluenzaA__ALE31735

SEQ ID NO: 141315 - RNA, 1701 nt, Artificial Sequence; identical to SEQ ID NO: 141046
  derived and/or modified CDS sequence (opt3) from hemagglutinin__InfluenzaA__ALE31736

SEQ ID NO: 141316 - RNA, 1701 nt, Artificial Sequence; identical to SEQ ID NO: 141046
  derived and/or modified CDS sequence (opt3) from hemagglutinin__InfluenzaA__ALE31737

SEQ ID NO: 141317 - RNA, 1701 nt, Artificial Sequence
  derived and/or modified CDS sequence (opt3) from hemagglutinin__InfluenzaA__ALE31738
augaagaccaucauugcccugagcuacauacucugccuuguguucgcucagaaaauccccggcaacgacaauuccacagcaacucuguguuuggggcaccaugccgucccuaacggaacgauuguuaagaccaucacaaaugauagaauugaggugacuaacgcgaccgaauuaguacaaaauucuucaaucggugagauaugcgacaguccacaccagauccuggauggcgaaaacuguacacuaauugacgcucuccugggggauccgcagugcgacggauuucagaauaaaaagugggaucuuuucguggagaggagcaaagccuauuccaacuguuaccccuaugacgucccugauuacgcaucucugcggucguugguggccucaagcggcacccucgaauuuaauaacgagaguuucaauuggacugguguuacacaaaacgggaccuccucugcuugcauccgccgaagcuccucaaguuucuucagccgucugaauuggcugacgcaucucaacuauaaguacccagcauuaaaugugacuaugcccaacaacgagcaguuugacaagcuguauauuuggggaguccaccauccuggcaccgauaaagaccagaucuuccuuuacgcccagucuuccggcagaauaacagugucaacuaaggggagccaacaggcuguaauuccaaauaucggaaguaggccccggauucgcgauaucccuucuagaaucuccauuuacuggaccauaguuaaaccaggugacaucuugcugauuaacagcacaggcaaucuaaucgccccgaggggguauuuuaagauacggucgggaaaaucuuccauuaugcgcucagacgcgcccaucggcaaguguaagagugaaugcaucaccccuaacgguagcauuccaaaugauaaacccuuccagaacgugaaucgaaucacguacggggcauguccuagauaugucaagcacuccacucucaaacuggccacaggaaugaggaacgugccagagaagcagacccggggcauuuuuggcgcuauagccggguucaucgaaaauggaugggaggguaugguggacggcugguacggguuucgucaccaaaacucugagggacgcggccaggcagcugaucuuaaaagcacucaggccgcgauugaccaaaucaaugguaagcugaacagauugaucgggaaaacaaaugaaaaguuccaucagauugagaaggaauuuucagaggucgaaggcaggauacaggaucucgagaaauauguugaggacaccaagaucgaucuguggaguuacaacgccgaauuacugguggcacucgagaaucagcacacgauugaccuuaccgauuccgaaaugaacaaacuguuugagaagacuaaaaagcaauugcgggaaaacgcugaggacaugggaaauggcugcuucaagaucuaucauaaaugugauaacgccugcauugggagcauccgaaauggaacauacgaccacaacguauaccgcgacgaggcucuaaauaacagauuucagauaaaggguguggaacugaaaucuggcuauaaggauuggauccucuggauuucauucgccaucaguugcuuucugcuuugugucgcacuguugggguucauuaugugggccugccagaaaggaaauaucagguguaacauaugcauuuga

SEQ ID NO: 141318 - RNA, 1701 nt, Artificial Sequence; identical to SEQ ID NO: 140489
  derived and/or modified CDS sequence (opt3) from hemagglutinin__InfluenzaA__ALE31739

SEQ ID NO: 141319 - RNA, 1701 nt, Artificial Sequence
  derived and/or modified CDS sequence (opt3) from hemagglutinin__InfluenzaA__ALE31741
augaagaccaucauugcccugagcuacauacucugccuuguguucgcucagaaacugcccgagaacgacaauuccacagcaacuuuguguuuaggccaccaugccgucccuaacgggacgaucguuaagaccauuacaucugauagaaucgaagugacuaaugcgaccgagcugguacaaaacucaaguauuagcgaaaucugcgacuccccacaccagauacuagaugggaaaaauuguacacucaucgacgcucugcuuggugauccgcagugcgacggcuuucagaacaagaaaugggaucuguucguggagaggucuaaggccuauucgaauuguuaccccuaugacgucccugauuacgcaucauugcggagccucguggccaguuccgggacccuggaauuuaacgacgagucuuucaauugggcuggaguuacucaaaacggcacaagcuccgcaugcauucgcgguucaaauaguagcuuuuucucucgacugaacuggcucacccauuccaauuuuaaguauccagccuuaaacgugacgaugcccaauaacgagcaguucgauaaacuguacaucuggggaguccaccauccuggaacugacaaggaucagauuuuucuuuaugcucagucaagcggccguaucaccgugaguacaaaaagaucucaacaggccguaauaccaaacauuggcuccaggccccggauccgcaauauuccuagcagaaucucgaucuacuggacuauuguuaagccaggggacauauugcugaucaacucuaccggaaaucuaauugcgccgagggguuacuucaaaauccgguccggcaagucaaguauaaugcgcagcgacgcacccauugggaaguguaaauccgaaugcaucacaccuaacggaucuaucccaaaugauaagcccuuucagaacgugaaucgaauuaccuauggcgccuguccuagauacgucaaacagagcacgcucaagcuggcuacugguaugaggaacgugccagagaaacaaacacgggggaucuucggagccauugcaggcuuuauagaaaauggcugggaggggaugaaggacggaugguaugguuuccgucaccagaacucagagggccgcgggcaggcugccgaucuuaaaaguacccaagcggccaucgaccagauuaauggaaagcugaacagauugaucggcaagacuaaugaaaaauuccaccagaucgagaaggaauuuuccgagguggaagguaggauucaggaucucgagaaauacgucgaggacacaaagauagaucuguggagcuauaacgcagaauuacugguugcucucgagaaucaacauaccaucgaccuuacggauucugaaaugaacaaacuguucgagaagaccaagaaacaguugcgggaaaacgccgaggacauggggaauggcugcuuuaagauuuaccacaaaugugauaacgcuugcaucggaucaauucgaaauggcacauaugaccaugacguguaccgcgaugaggcccuaaacaauagauuccagaucaaggggguagaacugaaaaguggauacaaggacuggauacucuggaucagcuuugcaauuuccugcuuccugcuuuguguggcccuguuggguuuuaucaugugggcuugccagaagggcaacauuagguguaauaucugcauauga

SEQ ID NO: 141320 - RNA, 1701 nt, Artificial Sequence
  derived and/or modified CDS sequence (opt3) from hemagglutinin__InfluenzaA__ALE31742
augaagaccaucauugcccugagcuacauacucugccuuggcuucgcucagaaaauccccgggaacgacaauuccacagcaacucuguguuugggacaccaugccgugccuaacgguacgauugucaagaccaucacaaaugauagaauugagguuacuaacgcgaccgaauuagugcaaaauucuucaaucggcgagauaugcgacaguccacaccagauccuggauggggaaaacuguacacuaauugacgcucuccugggagauccgcagugcgacggcuuucagaauaaaaagugggaucuuuucguagagaggagcaaagccuauuccaacuguuaccccuaugacgugccugauuacgcaucucugcggucguuggucgccucaagcgguacccucgaauuuaauaacgagaguuucaauuggacuggggugacacaaaacggaaccuccucugcuugcauccgccgaagcuccucaaguuucuucagccgucugaauuggcugacgcaucucaacuauacuuacccagcauuaaauguuaccaugcccaacaacgagcaguuugacaagcuguauauuuggggcgugcaccauccuggcacagauaaggaccagaucuuccuuuacgcccagucuuccgggagaauaacugucucaaccaaaaggagccaacaggcugugauuccaaauaucggaagucggccccgcauuagagauaucccuucuaggaucuccauuuacuggacaauaguaaagccaggugacaucuugcugauuaacagcaccggcaaucuaaucgccccgcggggguauuuuaaaauacgcucgggaaagucuuccauuaugcgaucagacgcgcccaucggcaaauguaagagugaaugcaucacgccuaacgguagcauuccaaaugauaagcccuuccagaacguuaauagagugacuuacggggcauguccuagguaugucaaacacuccacacucaagcuggccaccggaaugcggaacgugccagagaaacagacucguggcaucuuuggcgcuauugccggguucauagaaaauggaugggaggguaugguggacggcugguacggguuucgccaccaaaacucugagggaagaggccaggcagcugaucuuaagagcacacaggccgcgaucgaccaaauuaaugguaaacugaacagguugaucgggaagaccaaugaaaaauuccaucagaucgagaaggaauuuucagaggucgaaggccggauucaggaucucgagaaguauguugaggacacgaaaauagaucuguggaguuacaacgccgaauuacugguggcacucgagaaucagcacaccaucgaccuuacagauuccgaaaugaacaagcuguuugagaaaacuaagaaacaauugcgagaaaacgcugaggacaugggaaauggcugcuucaagauuuaucauaagugugauaacgccugcaucgggagcauucgcaauggaaccuacgaccacaacguauacagagacgaggcucuaaauaacagguuucagaucaaagguguggaacugaagucuggcuauaaagauuggauacucuggaucucauucgccauuaguugcuuucugcuuugugucgcacuguugggguucaucaugugggccugccagaagggaaauauucgguguaacaucugcauauga

SEQ ID NO: 141321 - RNA, 1701 nt, Artificial Sequence; identical to SEQ ID NO: 141046
  derived and/or modified CDS sequence (opt3) from hemagglutinin__InfluenzaA__ALE31743

SEQ ID NO: 141322 - RNA, 1701 nt, Artificial Sequence; identical to SEQ ID NO: 140489
  derived and/or modified CDS sequence (opt3) from hemagglutinin__InfluenzaA__ALE31744

SEQ ID NO: 141323 - RNA, 1701 nt, Artificial Sequence
  derived and/or modified CDS sequence (opt3) from hemagglutinin__InfluenzaA__ALE31745
augaagaccaucauugcccugagcuacauacucugccuuguguucgcucagaaacugcccggcaacgacaauuccacagcaacuuuguguuuagggcaccaugccgucccuaacggaacgaucguuaagaccauuacaaaugauagaaucgaggugacuaacgcgaccgaacugguacaaaauucuucaauuggugagaucugcgacaguccacaccagauacuagauggcaaaaacuguacacucaucgacgcucugcuuggggauccgcagugcgacggauuucagaauaagaggugggaucuguucguggaacggagcaaagccuauuccaacuguuaccccuaugacgucccugauuacgcaucuuugcgcucgcucguggccucaagcggcacccuggaguuuaaugacgaaaguuucaacugggcugguguuacucaaaaugggacauccucugcaugcauucgaggaagcaacuccucauuuuucagucgucugaauuggcucacccauagcaacuuuaaguauccagccuuaaaugugacgaugcccaacaacgagcaguucgauaagcuguacaucuggggcguccaccauccuggcacugacaaagaucagauuuuucuuuaugcucagucuuccgggagaaucaccgugucaacaaagaggagccaacaggccguaauaccaaauauuggaagucgguugcgcaucagaaacauucccucuaggaucuccaucuacuggacuauuguuaaaccuggugacauacugcuaaucaauagcaccggcaaccucauugcgccacggggguacuucaagauccagucgggaaaaucuuccauaaugcgcucagacgcaccgauuggcaaguguaagagugagugcaucacacccaaugguagcaucccuaacgauaaaccauuucagaaugugaacaagauuaccuauggggccuguccccgauacgucaaacaauccacgcugaaacuugcuacuggaaugagaaaugugccugaaaagcagacaaggggcaucuucggcgccauugcaggguuuauagagaacggaugggaagguaugaaggacggcugguauggguuccggcaccaaaauucugagggacguggccaggcugccgaucugaaaagcacccaggcggccaucgaccagauuaacgguaaguugaaucgccucaucgggaagacuaacgagaaauuccaccagaucgaaaaggaguuuucagaaguggagggcaggauucaagaucuggaaaaauacgucgaggacacaaagauagauuuauggaguuauaaugcagagcugcucguugcucuugaaaaccagcauaccaucgaccugacggauuccgagaugaacaaauuguucgaaaagaccaagaaacagcuaagagagaaugccgaagacaugggaaacggcugcuuuaagauuuaccacaaaugugauaaugcuugcaucgggagcauucggaacggaacauaugaccaugacguguaccgagaugaggcccugaauaaccgcuuccagaucaaggguguagagcucaaaucuggcuacaaggacuggauacuguggaucucauuugcaauuaguugcuuccuucuguguguggccuugcucggguuuaucaugugggcuugccaaaagggaaauauuagauguaacaucugcauauga

SEQ ID NO: 141324 - RNA, 1701 nt, Artificial Sequence
  derived and/or modified CDS sequence (opt3) from hemagglutinin__InfluenzaA__ALE31747
augaagaccaucauugcccugagcuacauacucugccuuguguucgcucagaaacugcccggcaacgacaauuccacagcaacuuuguguuuagggcaccaugccgucccuaacggaacgaucguuaagaccauuacaaaugauagaaucgaggugacuaacgcgaccgaacugguacaaaauucuucaauuggugagaucugcgacaguccacaccagauacuagauggcaaaaacuguacacucaucgacgcucugcuuggggauccgcagugcgacggauuucagaauaagaggugggaucuguucguggaacggagcaaagccuauuccaacuguuaccccuaugacgucccugauuacgcaucuuugcgcucgcucguggccucaagcggcacccuggaguuuaaugacgaaaguuucaacugggcugguguuacucaaaaugggacauccucugcaugcauucgaggaagcaacuccucauuuuucagucgucugaauuggcucacccauagcaacuuuaaguauccagccuuaaaugugacgaugcccaacaacgagcaguucgauaagcuguacaucuggggcguccaccauccuggcacugacaaagaucagauuuuucuuuaugcucagucuuccgggagaaucaccgugucaacaaagaggagccaacaggccguaauaccaaauauuggaagucggccccgcaucagaaacauuccuucuaggaucuccaucuacuggacuauuguuaaaccaggugacauauugcugaucaauagcaccggcaaccuaauugcgccgcggggguacuucaagauccagucgggaaaaucuuccauaaugcgcucagacgcacccauuggcaaguguaagagugagugcaucacaccuaaugguagcaucccaaacgauaaacccuuucagaaugugaaccgaauuaccuauggggccuguccuagauacgucaagcaauccacgcucaaacuggcuacuggaaugaggaaugugccagaaaagcagacacggggcaucuucggcgccauugcaggguuuauagagaacggaugggaagguaugaaagacggcugguauggguuccgucaccaaaauucugagggacgcggccaggcugccgaucuuaagagcacccaggcggccaucgaccagauuaacgguaaacugaauagauugaucgggaagacuaacgagaaguuccaccagaucgaaaaagaguuuucagaaguggagggcaggguccaagaucucgaaaaguacguugaggacacaaaaauugaucuguggaguuauaaugcagaguuacugguggcucucgaaaaccagcauaccauagaccuuacggauuccgagaugaacaagcuguucgagaaaaccaagaagcaguugcgggaaaaugccgaagacaugggaaacggcugcuuuaaaaucuaccacaagugugauaaugcuugcauugggagcauccgaaacggaacauaugaccaugacguauaccgcgaugaggcccuaaauaacagauuccagauuaaagguguggagcugaagucuggcuacaaagacuggauccucuggauaucauuugcaaucaguugcuuccugcuuugugucgcccuguugggguuuauuaugugggcuugccaaaagggaaauaucagguguaacauuugcaucuga

SEQ ID NO: 141325 - RNA, 1701 nt, Artificial Sequence; identical to SEQ ID NO: 141046
  derived and/or modified CDS sequence (opt3) from hemagglutinin__InfluenzaA__ALE31748

SEQ ID NO: 141326 - RNA, 1701 nt, Artificial Sequence; identical to SEQ ID NO: 140489
  derived and/or modified CDS sequence (opt3) from hemagglutinin__InfluenzaA__ALE31749

SEQ ID NO: 141327 - RNA, 1701 nt, Artificial Sequence; identical to SEQ ID NO: 141033
  derived and/or modified CDS sequence (opt3) from hemagglutinin__InfluenzaA__ALE31750

SEQ ID NO: 141328 - RNA, 1701 nt, Artificial Sequence
  derived and/or modified CDS sequence (opt3) from hemagglutinin__InfluenzaA__ALE31751
augaagaccaucauugcccugagcuacauacucugccuuguguucgcucagaaaauccccggcaacgacaauuccacagcaacucuguguuuggggcaccaugccgucccuaacggaacgauuguuaagaccaucacaaaugauagaauugaggugacuaacgcgaccgaauuaguacaaaauucuucaaucggugagauaugcgacaguccacaccagauccuggauggcgaaaacuguacacuaauugacgcucuccugggggauccgcagugcgacggauuucagaauaaaaagugggaucuuuucguggagaggagcaaagccuauuccaacuguuaccccuaugacgucccugauuacgcaucucugcggucguugguggccucaagcggcacccucgaauuuaauaacgagaguuucaauuggacugguguuacacaaaacgggaccuccucugcuugcauccgccgaagcuccucaaguuucuucagccgucugaauuggcugacgcaucucgacuauacuuacccagcauuaaacgugaccaugcccaauaacgagcaguuugauaagcuguauauuuggggaguccaccauccuggcacagacaaggaucagaucuuccuuuacgcccagucuuccggcagaauaacugugucaaccaaaaggagccaacaggcuguaauuccaaacaucgggagucggccccgcauuagagacaucccuucuaggaucuccauuuacuggacaauaguuaagccaggagacaucuugcugauuaauagcaccgguaaccuaaucgccccgcggggcuauuuuaaaauacgcucggggaagucuuccauuaugcgaucagaugcgcccaucggaaaauguaagagugaaugcaucacgccuaauggcagcauuccaaacgacaagcccuuccagaaugugaacagaaucacuuacggugcauguccuagguaugucaaacacuccacacucaagcuggccaccgggaugcggaaugugccagagaaacagacucguggaauuuuuggcgcuauagccggcuucaucgaaaacgggugggagggaaugguggaugguugguacggcuuucgccaccaaaauucugaggggagaggacaggcagcugaccuuaagagcacacaggccgcgauugaucaaaucaacggcaaacugaauagguugaucgguaagaccaacgaaaaauuccaucagauugagaaggaauuuucagaggucgaagggcggauacaggaccucgagaaguauguugaggauacgaaaaucgaccuguggaguuacaaugccgaauuacugguggcacucgagaaccagcacaccauugaucuuacagacuccgaaaugaauaagcuguuugagaaaacuaagaaacaauugcgagaaaacgcugaggauaugggcaacggaugcuucaagaucuaucauaagugugacaaugccugcauuggcagcauccgcaacgggaccuacgaccacaauguauacagagaugaggcucuaaacaauagguuucagauaaaaggaguggaacugaagucugguuauaaagacuggauccucuggauuucauucgccaucaguugcuuucugcuuugugucgcacuguugggcuucauuaugugggccugccagaaggggaacauccgguguaauauaugcauuuga

SEQ ID NO: 141329 - RNA, 1701 nt, Artificial Sequence; identical to SEQ ID NO: 140489
  derived and/or modified CDS sequence (opt3) from hemagglutinin__InfluenzaA__ALE31752

SEQ ID NO: 141330 - RNA, 1701 nt, Artificial Sequence; identical to SEQ ID NO: 141033
  derived and/or modified CDS sequence (opt3) from hemagglutinin__InfluenzaA__ALE31753

SEQ ID NO: 141331 - RNA, 1701 nt, Artificial Sequence; identical to SEQ ID NO: 140489
  derived and/or modified CDS sequence (opt3) from hemagglutinin__InfluenzaA__ALE31754

SEQ ID NO: 141332 - RNA, 1701 nt, Artificial Sequence
  derived and/or modified CDS sequence (opt3) from hemagglutinin__InfluenzaA__ALE31755
augaagaccaucauugcccugagcuacauacucugccuuguguucgcucagaaacugcccgagaacgacaauuccacagcaacuuuguguuuaggccaccaugccgucccuaacgggacgaucguuaagaccauuacaucugaucaaaucgaagugacuaaugcgaccgagcugguacagaacucaaguauuggagaaaucugcgacagcccacaccagauacuagaugguaaaaauuguacacucaucgacgcucugcuuggcgauccgcagugcgacggguuucaaaacaagaaaugggaucuguucguggagagauccaaggccuauucuaauuguuaccccuaugacgucccugauuacgcaucguugaggucacucguggccagcaguggaacccuggaauuuaacgacgaguccuucaauugggcuggcguuacucagaacgguacaucuagcgcaugcauucggggguccaauucaaguuucuuuagccgccugaacuggcucacccauucuaauuuuaaguauccagccuuaaacgugacgaugcccaauaacgagcaguucgauaaacuguacaucuggggaguccaccauccuggcacugacaaggaucagauuuuucuuuaugcucaauccucaggccgaaucaccgugagcacaaaacguagucagcaggccguaauaccaaacauugggucuagacccaggauccggaauauuccuucccgcaucagcaucuacuggacuauuguuaagccaggagacauauugcugaucaacucgaccgguaaucuaauugcgccgagaggcuacuucaaaaucaggucugggaaguccucaauaaugcggagugacgcacccauuggaaaguguaaaagcgaaugcaucacaccuaacggcuccaucccaaaugauaagcccuuucagaacgugaaucgcauuaccuauggugccuguccucgauacgucaaacaaucuacgcucaagcuggcuacugggaugagaaacgugccagagaaacagacaaggggaaucuucggcgccauugcaggcuuuauagaaaaugggugggagggaaugaaggacgguugguauggcuuccggcaccagaacagcgaggggcguggacaagcugccgaucuuaaaucaacccaggcggccaucgaccagauuaauggcaagcugaaccgcuugaucgguaagacuaaugaaaaauuccaccagaucgagaaggaauuuagugagguggaagggaggauucaagaucucgagaaauacgucgaggacacaaagauagaucugugguccuauaacgcagaauuacugguugcucucgagaaucagcauaccaucgaccuuacggauagcgaaaugaacaaacuguucgagaagaccaagaaacaguugagagaaaacgccgaggacaugggcaauggaugcuuuaagauuuaccacaaaugugauaacgcuugcaucggcucuauucggaaugggacauaugaccauaacguguaccgagacgaggcccuaaauaaccgcuuccagaucaagggaguagaacugaaaucagguuacaaggauuggauacucuggaucaguuuugcaauuagcugcuuccugcuuuguguggcccuguugggcuuuaucaugugggcuugccaaaaggggaauauuagauguaacaucugcauauga

SEQ ID NO: 141333 - RNA, 1701 nt, Artificial Sequence; identical to SEQ ID NO: 141033
  derived and/or modified CDS sequence (opt3) from hemagglutinin__InfluenzaA__ALE31756

SEQ ID NO: 141334 - RNA, 1701 nt, Artificial Sequence; identical to SEQ ID NO: 140489
  derived and/or modified CDS sequence (opt3) from hemagglutinin__InfluenzaA__ALE31757

SEQ ID NO: 141335 - RNA, 1701 nt, Artificial Sequence
  derived and/or modified CDS sequence (opt3) from hemagglutinin__InfluenzaA__ALE31758
augaagaccaucauugcccugagcuacauacucugccuuguguucgcucagaaaauccccggcaacgacaauuccacagcaacucuguguuuggggcaccaugccgucccuaacggaacgauuguuaagaccaucacaaaugauagaauugaggugacuaacgcgaccgaauuaguacaaaauucuucaaucggugagauaugcgacaguccacaccagauccuggauggcgaaaacuguacacuaauugacgcucuccugggggauccgcagugcgacggauuucagaauaaaaagugggaucuuuucguggagaggagcaaagccuauuccaacuguuaccccuaugacgucccugauuacgcaucucugcggucguugguggccucaagcggcacccucgaauuuaauaacgagaguuucaauuggacugguguuacacaaaacgggaccuccucugcuugcauccgccgaagcuccucaaguuucuucagccgucugaauuggcugacgcaucucaacuauacuuacccagcauuaaaugugaccaugcccaacaacgagcaguuugacaagcuguauauuuggggaguccaccauccuggcacagauaaggaccagaucuuccuuuacgcccagucuuccggcagaauaacugugucaaccaaaaggagccaacaggcuguaauuccaaauaucgggagucggccccgcauuagagauaucccuucuaggaucuccauuuacuggacaauaguuaagccaggagacaucuugcugauuaacagcaccgguaaucuaguggccccgcggggcuauuuuaaaauccgcucggggaagucuuccauaaugcgaucagacgcgcccauuggaaaauguaagagugaaugcaucacgccuaacggcagcaucccaaaugauaagcccuuccagaacgucaauagaauuacuuacggugcauguccuagguaugugaaacacuccacacucaagcuggccaccgggaugcggaacgugccagagaaacagacucguggaaucuuuggcgcuauugccggcuucauagaaaaugggugggagggaauggucgacgguugguacggcuuucgccaccaaaacucugaggggagaggacaggcagcugaucuuaagagcacacaggccgcgaucgaccaaauuaauggcaaacugaacagguugaucgguaagaccaaugaaaaauuccaucagaucgagaaggaauuuucagagguugaagggcggauucaggaucucgagaaguauguggaggacacgaaaauagaucuguggaguuacaacgccgaauuacugguagcacucgagaaucagcacaccaucgaccuuacagauuccgaaaugaacaagcuguuugagaaaacuaagaaacaauugcgagaaaacgcugaggacaugggcaauggaugcuucaagauuuaucauaagugugauaacgccugcaucggcagcauucgcaaugggaccuacgaccacaacguguacagagacgaggcucuaaauaacagguuucagaucaaaggagucgaacugaagucugguuauaaagauuggauacucuggaucucauucgccauuaguugcuuucugcuuuguguggcacuguugggcuucaucaugugggccugccagaaggggaauauucgguguaacaucugcauauga

SEQ ID NO: 141336 - RNA, 1701 nt, Artificial Sequence
  derived and/or modified CDS sequence (opt3) from hemagglutinin__InfluenzaA__ALE31759
augaagaccaucauugcccugagcuacauacucugccuuguguucgcucagaaacugcccggcaacgacaauuccacagcaacuuuguguuuagggcaccaugccgucccuaacggaacgaucguuaagaccauuacaaaugauagaaucgaggugacuaacgcgaccgaacugguacaaaauucuucaauuggugagaucugcgacaguccacaccagauacuagauggcaaaaacuguacacucaucgacgcucugcuuggggauccgcagugcgacggauuucagaauaagaggugggaucuguucguggaacggagcaaagccuauuccaacuguuaccccuaugacgucccugauuacgcaucuuugcgcucgcucguggccucaagcggcacccuggaguuuaaugacgaaaguuucaacugggcugguguuacucaaaaugggacauccucugcaugcauucgaggaagcaacuccucauuuuucagucgucugaauuggcucacccauagcaacuuuaaguauccagccuuaaaugugacgaugcccaacaacgagcaguucgauaagcuguacaucuggggcguccaccauccuggcacugacaaagaucagauuuuucuuuaugcucagucuuccgggagagugaccguaucaacaaagaggagccaacaggccguuaucccaaauauaggaagucggccccgcauuagaaacaucccuucuaggauuuccaucuacuggacuaucgugaaaccaggugacauuuugcugauaaauagcaccggcaaccuaaucgcgccgcggggguacuucaagauucagucgggaaaaucuuccaucaugcgcucagacgcacccauaggcaaguguaagagugagugcauuacaccuaaugguagcaucccaaacaauaaacccuuucagaacgucaaucgaaucaccuauggggccuguccuagauacgugaagcaauccacgcucaaacuggcuacuggaaugaggaacgugccagaaaagcagacacggggcauuuucggcgccaucgcaggguuuauugagaauggaugggaagguaugaaagauggcugguauggguuccgucaccagaacucugagggacgcggccaagcugccgaccuuaagagcacccaggcggccauagaucagaucaaugguaaacugaacagauugauugggaagacuaaugagaaguuccaccagaucgaaaaagaguuuucagaagucgagggcaggauccaagaccucgaaaaguacguugaggauacaaaaauugaccuguggaguuauaacgcagaguuacugguggcucucgaaaaccagcauaccauagaucuuacggacuccgagaugaauaagcuguucgagaaaaccaagaagcaguugcgggaaaacgccgaagauaugggaaauggcugcuuuaaaaucuaccacaagugugacaacgcuugcauugggagcauccgaaauggaacauaugaucaugacguauaccgcgacgaggcccuaaacaauagauuccagauuaaagguguggagcugaagucuggcuacaaagauuggauccucuggauaucauuugcaaucaguugcuuccugcuuugugucgcccuguugggguuuauuaugugggcuugccaaaagggaaacaucagguguaauauuugcaucuga

SEQ ID NO: 141337 - RNA, 1701 nt, Artificial Sequence
  derived and/or modified CDS sequence (opt3) from hemagglutinin__InfluenzaA__ALE31760
augaagaccaucauugcccugagcuacauacucugccuuguguucgcucagaaaauccccggcaacgacaauuccacagcaacucuguguuuggggcaccaugccgucccuaacggaacgauuguuaagaccaucacaaaugauagaauugaggugacuaacgcgaccgaauuaguacaaaauucuucaaucggugagauaugcgacaguccacaccagauccuggauggcgaaaacuguacacuaauugacgcucuccugggggauccgcagugcgacggauuucagaauaaaaagugggaucuuuucguggagaggagcaaagccuauuccaacuguuaccccuaugacgucccugauuacgcaucucugcggucguugguggccucaagcggcacccucgaauuuaauaacgagaguuucaauuggacugguguuacacaaaacgggaccuccucugcuugcauccgccgaagcuccucaaguuucuucagccgucugaauuggcugacgcaucucaacuauacuuacccagcauuaaaugugaccaugcccaacaacgagcaguuugacaagcuguauauuuggggaguccaccauccuggcacagauaaggaccagaucuuccuuuacgcccagucuuccggcagaauaacugugucaaccaaaaggagccaacaggcuguaauuccaaauaucggguaccggccccgcauuagagauaucccuaguaggaucucuauuuauuggacaauaguuaagccaggagacaucuugcugauuaacuccaccgguaaucuaaucgccccgcggggcuacuuuaaaauacgcagcgggaagucgucuauuaugcgauccgacgcgcccaucggaaaauguaagucagaaugcaucacgccuaacggcaguauuccaaaugauaagcccuuccagaacgugaauagaaucacuuauggugcauguccuagguacgucaaacacagcacacucaagcuggccaccgggaugcggaacgugccagagaaacagacucguggaauuuuuggcgcuauagccggcuucaucgaaaaugggugggagggaaugguggacgguugguauggcuuucgccaccaaaacuccgaggggagaggacaggcagcugaucuuaagucuacacaggccgcgauugaccaaaucaauggcaaacugaacagguugaucgguaagaccaaugaaaaauuccaucagauugagaaggaauuuagcgaggucgaagggcggauacaggaucucgagaaguacguugaggacgccaaaaucgaucuguggucauauaacgcagaauuacugguggcucucgagaaucagcacacgauugaccuuaccgauagugaaaugaacaagcuguuugagaaaacaaagaaacaauugcgagaaaacgccgaggacaugggcaauggaugcuucaagaucuaccauaagugugauaacgcuugcauuggcuccauccgcaaugggacuuacgaccacaacguauauagagacgaggcccuaaauaacagguuucagauaaaaggaguggaacucaagagcgguuacaaagauuggauccuguggauuucuuucgcaaucucaugcuuucugcuuugugucgcccuguugggcuucauuaugugggcuugccagaaggggaauauccgguguaacauaugcauuuga

SEQ ID NO: 141338 - RNA, 1701 nt, Artificial Sequence; identical to SEQ ID NO: 141033
  derived and/or modified CDS sequence (opt3) from hemagglutinin__InfluenzaA__ALE31761

SEQ ID NO: 141339 - RNA, 1701 nt, Artificial Sequence; identical to SEQ ID NO: 140489
  derived and/or modified CDS sequence (opt3) from hemagglutinin__InfluenzaA__ALE31762

SEQ ID NO: 141340 - RNA, 1701 nt, Artificial Sequence; identical to SEQ ID NO: 141095
  derived and/or modified CDS sequence (opt3) from hemagglutinin__InfluenzaA__ALE31763

SEQ ID NO: 141341 - RNA, 1701 nt, Artificial Sequence; identical to SEQ ID NO: 141147
  derived and/or modified CDS sequence (opt3) from hemagglutinin__InfluenzaA__ALE31764

SEQ ID NO: 141342 - RNA, 1701 nt, Artificial Sequence; identical to SEQ ID NO: 140489
  derived and/or modified CDS sequence (opt3) from hemagglutinin__InfluenzaA__ALE31765

SEQ ID NO: 141343 - RNA, 1701 nt, Artificial Sequence
  derived and/or modified CDS sequence (opt3) from hemagglutinin__InfluenzaA__ALE31774
augaagaccaucauugcccugagcuacauacucugccuuguguucgcucagaaaauccccggcaacgacaauuccacagcaacucuguguuuggggcaccaugccgucccuaacggaacgauuguuaagaccaucacaaaugauagaauugaggugacuaacgcgaccgaauuaguacaaaauucuucaaucggugagauaugcgacaguccacaccagauccuggauggcgaaaacuguacacuaauugacgcucuccugggggauccgcagugcgacggauuucagaauaaaaagugggaucuuuucguggagaggagcaaagccuauuccaacuguuaccccuaugacgucccugauuacgcaucucugcggucguugguggccucaagcggcacccucgaauuuaauaacgagaguuucaauuggacugguguuacacaaaacgggaccuccucugcuugcauccgccgaagcuccucaaguuucuucagccgucugaauuggcugacgcaucucaacuauacuuacccagcauuaaaugugaccaugcccaacaacgagcaguuugacaagcuguauauuuggggaguccaccauccuggcacagauaaggaccagguguuccuuuacgcccagucuuccggcagaaucacuguaucaaccaaaaggagccaacaggcuguuauaccaaauauugggagucggccccgcaucagagauauuccuucuaggaucuccaucuacuggacaauugugaagccaggagacauauugcugaucaacagcaccgguaaucuaauugccccgcggggcuauuuuaaaauccgcucggggaagucuuccauaaugcgaucagacgcgcccauuggaaaauguaagagugaaugcaucacgccuaacggcagcaucccaaaugauaagcccuuccagaacgucaauagaauuacuuacggugcauguccuagguaugugaaacacuccacacucaagcuggccaccgggaugcggaacgugccagagaaacagacucguggaaucuuuggcgcuauugccggcuucauagaaaaugggugggagggaauggucgacgguugguacggcuuucgccaccaaaacucugaggggagaggacaggcagcugaucuuaagagcacacaggccgcgaucgaccaaauuaauggcaaacugaacagguugaucgguaagaccaaugaaaaauuccaucagaucgagaaggaauuuucagagguugaagggcggauucaggaucucgagaaguauguggaggacacgaaaauagaucuguggaguuacaacgccgaauuacugguagcacucgagaaucagcacaccaucgaccuuacagauuccgaaaugaacaagcuguuugagaaaacuaagaaacaauugcgagaaaacgcugaggacaugggcaauggaugcuucaagauuuaucauaagugugauaacgccugcaucggcagcauucgcaaugggaccuacgaccacaacguguacagagacgaggcucuaaauaacagguuucagaucaaaggagucgaacugaagucugguuauaaagauuggauacucuggaucucauucgccauuaguugcuuucugcuuuguguggcacuguugggcuucaucaugugggccugccagaaggggaauauucgguguaacaucugcauauga

SEQ ID NO: 141344 - RNA, 1701 nt, Artificial Sequence
  derived and/or modified CDS sequence (opt3) from hemagglutinin__InfluenzaA__ALE31775
augaagaccaucauugcccugagcuacauacucugccuuguguucgcucagaaaauccccggcaacgacaauuccacagcaacucuguguuuggggcaccaugccgucccuaacggaacgauuguuaagaccaucacaaaugauagaauugaggugacuaacgcgaccgaauuaguacaaaauucuucaaucggugagauaugcgacaguccacaccagauccuggauggcgaaaacuguacacuaauugacgcucuccugggggauccgcagugcgacggauuucagaauaaaaagugggaucuuuucguggagaggagcaaagccuauuccaacuguuaccccuaugacgucccugauuacgcaucucugcggucguugguggccucaagcggcacccucgaauuuaauaacgagaguuucaauuggacugguguuacacaaaacgggaccuccucugcuugcauccgcaagagcuccucaaguuucuucagccgacugaauuggcugacgcaucucaacuauacuuacccagcauuaaaugugaccaugcccaacaacgagcaguuugacaagcuguauauuuggggaguccaccauccuggcacagauaaagaccagaucuuccuuuacgcccguucuuccggcagaauaacugugucaaccaagaggagccagcaagcuguaauuccaaauaucgggagucggccccgcauuagagauaucccuucuaggaucuccauuuacuggacaauaguuaaaccaggagacaucuugcugauuaacagcaccgguaaucuaaucgccccgcggggcuauuuuaagauacgcucggggaaaucuuccauuaugcgaucagacgcgcccaucggaaaguguaagagugaaugcaucacgccuaacggcagcauuccaaaugauaaacccuuccagaacgugaauagaaucacuuacggugcauguccuagguaugucaagcacuccacacucaaacuggccaccgggaugcggaacgugccagagaagcagacucguggaauuuuuggcgcuauagccggcuucaucgaaaaugggugggagggaaugguggacgguugguacggcuuucgccaccagaacucugaggggagaggacaagcagcugaucuuaaaagcacacaggccgcgauugaccagaucaauggcaagcugaacagguugaucgguaaaaccaaugaaaaguuccaucaaauugagaaggaauuuucagaggucgaagggcggauacaggaucucgagaaauauguugaggacacgaagaucgaucuguggaguuacaacgccgaauuuuuaguggcacuggagaaucagcacaccauugaccucacagauuccgaaaugaacaaacuuuucgagaagacuaaaaagcagcugcgagaaaacgcugaggacaugggcaauggaugcuuuaagaucuaucauaaaugugauaacgccugcauuggcagcauccgcaaugggaccuacgaccacaacguauacagagacgaggcuuugaauaacagguuccaaauaaagggaguggaacuaaaaucugguuauaaggauuggauccuguggauuucauuugccaucaguugcuuccuccugugugucgcacuucugggcuuuauuaugugggccugccagaaagggaauauccgguguaacauaugcauuuga

SEQ ID NO: 141345 - RNA, 1701 nt, Artificial Sequence
  derived and/or modified CDS sequence (opt3) from hemagglutinin__InfluenzaA__ALE31776
augaagaccaucauugcccugagcuacauacucugccuuguguucgcucagaaacugcccgagaacgacaauuccacagcaacuuuguguuuaggccaccaugccgucccuaacgggacgaucguuaagaccauuacaucugauagaaucgaagugacuaaugcgaccgagcugguacaaaacucaaguauuggagaaaucugcgacagcccacaccagauacuagaugguaaaaauuguacacucaucgacgcucugcuuggcgauccgcagugcgacggguuucagaacaagaaaugggaucuguucguggagagguccaaggccuauucuaauuguuaccccuaugacgucccugauuacgcaucguugcggucacucguggccagcaguggaacccuggaauuuaacgacgaguccuucaauugggcuggcguuacucaaaacgguacaucuagcgcaugcauucgcggguccaauucaaguuucuuuagccgacugaacuggcucacccauucuaauuuuaaguauccagccuuaaacgugacgaugcccaauaacgagcaguucgauaaacuguacaucuggggaguccaccauccuggcacugacaaggaucagauuuuucuuuaugcucaguccucaggccguaucaccgugagcacaaaaagaagucaacaggccguaauaccaaacauugggucuaggccccggauccgcaauauuccuuccagaaucagcaucuacuggacuauuguuaagccaggagacauauugcugaucaacucgaccgguaaucuaauugcgccgaggggcuacuucaaaauccggucugggaaguccucaauaaugcgcagugacgcaagcauuggaaaguguaaauccgaaugcaucacacccaacggcucuaucccuaaugauaagccauuucagaacgugaaucgaauuaccuauggugccugucccagauacgucaaacagagcacgcucaagcuggcuacugggaugaggaacgugccugagaaacaaacacggggaaucuucggcgccauugcaggcuuuauagaaaaugggugggagggaaugaaggacgguugguauggcuuccgucaccagaacucagaggggcgcggacaggcugccgaucuuaaaaguacccaagcggccaucgaccagauuaauggcaagcugaacagauugaucgguaagacuaaugaaaaauuccaccagaucgagaaggaauuuuccgagguggaagggaggauucaggaucucgagaaauacgucgaggacacaaagauagaucuguggagcuauaacgcagaauuacugguugcucucgagaaucaacauaccaucgaccuuacggauucugaaaugaacaaacuguucgagaagaccaagaaacaguugcgggaaaacgccgaggacaugggcaauggaugcuuuaagauuuaccacaaaugugauaacgcuugcaucggcucaauucgaaaugggacauaugaccaugacguguaccgcgaugaggcccuaaacaauagauuccagaucaagggaguagaacugaaaagugguuacaaggacuggauacucuggaucagcuuugcaauuuccugcuuccugcuuuguguggcccuguugggcuuuaucaugugggcuugccagaaggggaacauuagguguaauaucugcauauga

SEQ ID NO: 141346 - RNA, 1701 nt, Artificial Sequence
  derived and/or modified CDS sequence (opt3) from hemagglutinin__InfluenzaA__ALE31777
augaagaccaucauugcccugagcuacauacucugccuuguguucgcucagaaaauccccggcaacgacaauuccacagcaacucuguguuuggggcaccaugccgucccuaacggaacgauuguuaagaccaucacaaaugauagaauugaggugacuaacgcgaccgaauuaguacaaaauucuucaaucggugagauaugcgacaguccacaccagauccuggauggcgaaaacuguacacuaauugacgcucuccugggggauccgcagugcgacggauuucagaauaaaaagugggaucuuuucguggagaggagcaaagccuauuccaacuguuaccccuaugacgucccugauuacgcaucucugcggucguugguggccucaagcggcacccucgaauuuaauaacgagaguuucaauuggacugguguuacacaaaacgggaccuccucugcuugcauccgccgaagcuccucaaguuucuucagccgucugaauuggcugacgcaucucaacuauacuuacccagcauuaaaugugaccaugcccaacaacgagcaguuugacaagcuguauauuuggggaguccaccauccuggcacagauaaggaccagaucuuccuuuacgcccagucuuccggcagaauaacugugucaaccaaaaggagccaacaggcuguaguuccaaauauugggagucggccccgcaucagagauauuccuucuaggaucuccaucuacuggacaauugugaagccaggagacauauugcugaucaacagcaccgguaaucuaauugccccgcggggcuauuuuaaaauccgcucggggaagucuuccauaaugcgaucagacgcgcccauuggaaaauguaagagugaaugcaucacgccuaacggcagcaucccaaaugauaagcccuuccagaacgucaauagaauuacuuacggugcauguccuagguaugugaaacacuccacacucaagcuggccaccgggaugcggaacgugccagagaaacagacucguggaaucuuuggcgcuauugccggcuucauagaaaaugggugggagggaauggucgacgguugguacggcuuucgccaccaaaacucugaggggagaggacaggcagcugaucuuaagagcacacaggccgcgaucgaccaaauuaauggcaaacugaacagguugaucgguaagaccaaugaaaaauuccaucagaucgagaaggaauuuucagagguugaagggcggauucaggaucucgagaaguauguggaggacacgaaaauagaucuguggaguuacaacgccgaauuacugguagcacucgagaaucagcacaccaucgaccuuacagauuccgaaaugaacaagcuguuugagaaaacuaagaaacaauugcgagaaaacgcugaggacaugggcaauggaugcuucaagauuuaucauaagugugauaacgccugcaucggcagcauucgcaaugggaccuacgaccacaacguguacagagacgaggcucuaaauaacagguuucagaucaaaggagucgaacugaagucugguuauaaagauuggauacucuggaucucauucgccauuaguugcuuucugcuuuguguggcacuguugggcuucaucaugugggccugccagaaggggaauauucgguguaacaucugcauauga

SEQ ID NO: 141347 - RNA, 1701 nt, Artificial Sequence; identical to SEQ ID NO: 141095
  derived and/or modified CDS sequence (opt3) from hemagglutinin__InfluenzaA__ALE31778

SEQ ID NO: 141348 - RNA, 1701 nt, Artificial Sequence; identical to SEQ ID NO: 140489
  derived and/or modified CDS sequence (opt3) from hemagglutinin__InfluenzaA__ALE31779

SEQ ID NO: 141349 - RNA, 1701 nt, Artificial Sequence
  derived and/or modified CDS sequence (opt3) from hemagglutinin__InfluenzaA__ALE31780
augaagaccaucauugcccugagcuacauacucugccuuguguucgcucagaaaauccccggcaacgacaauuccacagcaacucuguguuuggggcaccaugccgucccuaacggaacgauuguuaagaccaucacaaaugauagaauugaggugacuaacgcgaccgaauuaguacaaaauucuucaaucggugagauaugcgacaguccacaccagauccuggauggcgaaaacuguacacuaauugacgcucuccugggggauccgcagugcgacggauuucagaauaaaaagugggaucuuuucguggagaggagcaaagcccauuccaacuguuaucccuacgacgucccugauuaugcaucucugcggucguugguggccucaagcggcacccucgaauuuaauaacgagaguuucaauuggacugguguuacacaaaacgggaccuccucugcuugcauccgccgaagcuccucaaguuucuucagccgucugaauuggcugacgcaccucaacuacacuuauccagcauuaaaugugaccaugcccaacaacgagcaguuugacaagcuguacauuuggggaguccaucacccuggcacagauaaggaccagaucuuccuuuaugcccagucuuccggcagaauaacugugucaaccaaaaggagccaacaggcuguaauuccaaauaucgggagucggccccgcauuagagauaucccuucuaggaucuccauuuacuggacaauaguuaagccaggagacaucuugcugauuaacagcaccgguaaucuaaucgccccgcggggcuacuuuaaaauacgcucggggaagucuuccauuaugcgaacggacgcgcccaucggaaaauguaagucagaaugcaucacuccuaacggcaguauuccaaaugauaagcccuuccagaacgugaauagaaucacauauggugcauguccuagguacgucaaacacagcacccucaagcuggccacugggaugcggaacgugccagagaaacagacacguggaauuuuuggcgcuauagccggcuucaucgaaaaugggugggagggaaugguggacgguugguauggcuuucgccaucaaaacuccgaggggagaggacaggcagcugaucuuaagucuacccaggccgcgauugaccaaaucaauggcaaacugaacagguugaucgguaagacgaaugaaaaauuccaccagauugagaaggaauuuagcgaggucgaagggcggauacaggaucucgagaaguacguugaggacaccaaaaucgaucuguggucauauaacgccgaauuacugguggcacucgagaaucagcauacaauugaccuuacugauagugaaaugaacaagcuguuugagaaaaccaagaaacaauugcgagaaaacgcugaggacaugggcaauggaugcuucaagaucuaccacaagugugauaacgccugcauuggcuccauccgcaaugggacauaugaccacaacguauacagagacgaggcucuaaauaacagguuucagauaaaaggaguggaacucaagagcgguuacaaagauuggauccuguggauuucuuucgccaucucaugcuuucugcuuugugucgcacuguugggcuucauuaugugggccugccagaaggggaauauccgguguaacauaugcauuuga

SEQ ID NO: 141350 - RNA, 1701 nt, Artificial Sequence
  derived and/or modified CDS sequence (opt3) from hemagglutinin__InfluenzaA__ALE31781
augaagaccaucauugcccugagcuacauacucugccuuguguucgcucagaaaauccccggcaacgacaauuccacagcaacucuguguuuggggcaccaugccgucccuaacggaacgauuguuaagaccaucacaaaugauagaauugaggugacuaacgcgaccgaauuaguacaaaauucuucaaucggugagauaugcggcaguccacaccagauccuggacggggaaaacuguacacuaauugaugcucuccugggagacccgcagugcgauggcuuucagaauaaaaagugggaccuuuucguggagaggagcaaagccuauuccaacuguuaccccuaugaugucccugacuacgcaucucugcggucguugguggccucaagcgguacccucgaauuuaauaacgagaguuucaauuggacugggguuacacaaaacggaaccuccucugcuugcauccgcaagagcuccucaaguuucuucagcaagcugaauuggcugacgcaucucaacuauacuuacccagcauuaaaugugaccaugcccaacaacgagcaguuugauaaacuguauauuuggggcguccaccauccuggcacagacaaggaucagaucuuccuuuacgcccgaucuuccgggcguauaacugugucaaccaaaagaagccagcaagcuguaauuccaaauaucggaaguaggccccggauucgcgacaucccuucuagaaucuccauuuacuggacaauaguuaagccaggugauaucuugcugauuaacagcaccggcaaucuaaucgccccgaggggguauuuuaaaauacggucgggaaagucuuccauuaugcgcucagacgcgcccaucggcaaguguaaaagugaaugcaucacgccuaacgguagcauuccaaaugacaagcccuuccagaacgugaaucgaaucacuuacggggcauguccuagauaugucaaacacuccacacucaagcuggccaccggaaugaggaacgugccagagaaacagacucggggcauuuuuggcgcuauagccggguucaucgaaaauggaugggaggguaugguggauggcugguacggguuucgucaccagaacucugagggacgcggccaagcagcugaccuuaagagcacacaggccgcgauugaucagaucaaugguaaacugaacagauugaucgggaagaccaaugaaaaguuccaucaaauugagaaagaauuuucagaggucgaaggcaggauacaggaccucgagaaguauguugaggauacgaaaaucgaccuguggaguuacaacgccgaauuacugguggcacucgagaaucagcacaccauugaucuuacagacuccgaaaugaacaagcuguuugagaaaacuaagaagcaguugcgggaaaacgcugaggauaugggaaauggcugcuucaaaaucuaucauaagugugacaacgccugcauugggagcauccgaaauggaaccuacgaucacaacguauaccgcgacgaggcucuaaauaacagauuucaaauaaaagguguggaacugaagucuggcuauaaagacuggauccucuggauuucauucgccaucaguugcuuucugcuuugugucgcacuguugggguucauuaugugggccugccagaagggaaauaucagguguaacauaugcauuuga

SEQ ID NO: 141351 - RNA, 1701 nt, Artificial Sequence
  derived and/or modified CDS sequence (opt3) from hemagglutinin__InfluenzaA__ALE31782
augaagaccaucauugcccugagcuacauacucugccuuguguucgcucagaaaauccccggcaacgacaauuccacagcaacucuguguuuggggcaccaugccgucccuaacggaacgauuguuaagaccaucacaaaugauagaauugaggugacuaacgcgaccgaauuaguacaaaauucuucaaucggugagauaugcgacaguccacaccagauccuggauggcgaaaacuguacacuaauugacgcucuccugggggauccgcagugcgacggauuucagaauaaaaagugggaucuuuucguggagaggagcaaagccuauuccaacuguuaccccuaugacgucccugauuacgugucucugcggucguugguugcaucaagcggcacccucgaauuuaauaacgagaguuucaauuggacuggugugacacaaaacgggaccuccucugccugcauccgccgaagcuccucaaguuucuucagccgucugaauuggcugacgcaucucaacuauacuuacccagcuuuaaaugucaccaugcccaacaacgagcaguuugacaagcuguauauuuggggagugcaccauccuggcacagauaaggaccagaucuuccuuuacgcacagucuuccggcagaauaacuguaucaaccaaaaggagccaacaggccguuauuccaaauaucgggagucggccccgcauuagagauaucccuucuaggaucuccauuuacuggacaauagugaagccaggagacaucuugcugauuaacagcaccgguaaucuaaucgcuccgcggggcuauuuuaaaauacgcucggggaagucuuccauuaugcgaucagacgcccccaucggaaaauguaagagugaaugcaucacgccuaacggcagcauuccaaaugauaagcccuuccagaacgucaauagaaucacuuacggugcguguccuagguaugugaaacaguccacacucaagcuggcaaccgggaugcggaacgugccagagaaacaaacucguggaauuuuuggcgccauagcuggcuucaucgaaaaugggugggagggaauggucgacgguugguacggcuuucgccaccagaacucugaggggagaggacaggccgcagaucuuaagagcacacaagcugccauugaccagaucaauggcaaacugaacagguugaucgguaagaccaaugaaaaauuccaccagauugagaaggaauuuucagagguugaagggcggauacaggaucucgagaaguauguggaggacacgaaaaucgaucuguggaguuacaacgcggaauuacugguagcccucgagaaucaacauaccauugaccuuacagauuccgaaaugaacaagcuguuugagaaaacuaagaaacaguugcgagaaaacgcagaggacaugggcaauggaugcuucaagaucuaucacaagugugauaacgcuugcauuggcagcauccgcaaugggaccuacgaccauaacguguacagagacgaggcccuaaauaacagguuucagauaaaaggagucgaacugaagucugguuauaaagauuggauccucuggauuucauucgcuaucaguugcuuucugcuuuguguggcccuguugggcuucauuaugugggcaugccagaaggggaauauccgguguaacauaugcauuuga

SEQ ID NO: 141352 - RNA, 1701 nt, Artificial Sequence
  derived and/or modified CDS sequence (opt3) from hemagglutinin__InfluenzaA__ALE31783
augaagaccaucauugcccugagcuacauacucugccuuguguucgcucagaaaauccccggcaacgacaauuccacagcaacucuguguuuggggcaccaugccgucccuaacggaacgauuguuaagaccaucacaaaugauagaauugaggugacuaacgcgaccgaauuaguacaaaauucuucaaucggugagauaugcgacaguccacaccagauccuggauggcgaaaacuguacacuaauugacgcucuccugggggauccgcagugcgacggauuucagaauaaaaagugggaucuuuucguggagaggagcaaagccuauuccaacuguuaccccuaugacgucccugauuacgcaucucugcggucguugguggccucaagcggcacccucgaauuuaauaacgagaguuucaauuggacugguguuacacaaaacgggaccuccucugcuugcauccgccgaagcuccucaaguuucuucagccgucugaauuggcugacgcaucucaacuauacuuacccagcauuaaaugugaccguccccaacaacgagcaguuugacaagcuguauauuuggggagugcaccauccuggcacagauaaggaccagaucuuccuuuacgcccagucuuccggcagaauaacuguaucaaccaaaaggagccaacaggcuguuauuccaaauaucgggagucggccccgcauuagagauaucccuucuaggaucuccauuuacuggacaauagugaagccaggagacaucuugcugauuaacagcaccgguaaucuaaucgccccgcggggcuauuuuaaaauacgcucggggaagucuuccauuaugcgaucagacgcgcccaucggaaaauguaagagugaaugcaucacgccuaacggcagcauuccaaaugauaagcccuuccagaacgucaauagaaucacuuacggugcauguccuagguaugugaaacacuccacacucaagcuggccaccgggaugcggaacgugccagagaaacagacucguggaauuuuuggcgcuauagccggcuucaucgaaaaugggugggagggaauggucgacgguugguacggcuuucgccaccaaaacucugaggggagaggacaggcagcugaucuuaagagcacacaggccgcgauugaccaaaucaauggcaaacugaacagguugaucgguaagaccaaugaaaaauuccaucagauugagaaggaauuuucagagguugaagggcggauacaggaucucgagaaguauguggaggacacgaaaaucgaucuguggaguuacaacgccgaauuacugguagcacucgagaaucagcacaccauugaccuuacagauuccgaaaugaacaagcuguuugagaaaacuaagaaacaauugcgagaaaacgcugaggacaugggcaauggaugcuucaagaucuaucauaagugugauaacgccugcauuggcagcauccgcaaugggaccuacgaccacaacguguacagagacgaggcucuaaauaacagguuucagauaaaaggagucgaacugaagucugguuauaaagauuggauccucuggauuucauucgccaucaguugcuuucugcuuuguguggcacuguugggcuucauuaugugggccugccagaaggggaauauccgguguaacauaugcauuuga

SEQ ID NO: 141353 - RNA, 1701 nt, Artificial Sequence; identical to SEQ ID NO: 141105
  derived and/or modified CDS sequence (opt3) from hemagglutinin__InfluenzaA__ALE31784

SEQ ID NO: 141354 - RNA, 1701 nt, Artificial Sequence; identical to SEQ ID NO: 140489
  derived and/or modified CDS sequence (opt3) from hemagglutinin__InfluenzaA__ALE31785

SEQ ID NO: 141355 - RNA, 1701 nt, Artificial Sequence; identical to SEQ ID NO: 141095
  derived and/or modified CDS sequence (opt3) from hemagglutinin__InfluenzaA__ALE31786

SEQ ID NO: 141356 - RNA, 1701 nt, Artificial Sequence; identical to SEQ ID NO: 141147
  derived and/or modified CDS sequence (opt3) from hemagglutinin__InfluenzaA__ALE31787

SEQ ID NO: 141357 - RNA, 1701 nt, Artificial Sequence; identical to SEQ ID NO: 140589
  derived and/or modified CDS sequence (opt3) from hemagglutinin__InfluenzaA__ALE31788

SEQ ID NO: 141358 - RNA, 1701 nt, Artificial Sequence; identical to SEQ ID NO: 140489
  derived and/or modified CDS sequence (opt3) from hemagglutinin__InfluenzaA__ALE31789

SEQ ID NO: 141359 - RNA, 1701 nt, Artificial Sequence; identical to SEQ ID NO: 141104
  derived and/or modified CDS sequence (opt3) from hemagglutinin__InfluenzaA__ALE31790

SEQ ID NO: 141360 - RNA, 1701 nt, Artificial Sequence; identical to SEQ ID NO: 141225
  derived and/or modified CDS sequence (opt3) from hemagglutinin__InfluenzaA__ALE31791

SEQ ID NO: 141361 - RNA, 1701 nt, Artificial Sequence; identical to SEQ ID NO: 141125
  derived and/or modified CDS sequence (opt3) from hemagglutinin__InfluenzaA__ALE31792

SEQ ID NO: 141362 - RNA, 1701 nt, Artificial Sequence
  derived and/or modified CDS sequence (opt3) from hemagglutinin__InfluenzaA__ALE31793
augaagaccaucauugcccugagcuacauacucugccuuguguucgcucagaaaauccccggcaacgacaauuccacagcaacucuguguuuggggcaccaugccgucccuaacggaacgauuguuaagaccaucacaaaugauagaauugaggugacuaacgcgaccgaauuaguacaaaauucuucaaucggugagauaugcgacaguccacaccagauccuggauggcgaaaacuguacacuaauugacgcucuccugggggauccgcagugcgacggauuucagaauaaaaagugggaucuuuucguggagaggagcaaagccuauuccaacuguuaccccuaugacgucccugauuacgcaucucugcggucguugguggccucaagcggcacccucgaauuuaauaacgagaguuucaauuggacugguguuacacaaaacgggaccuccucugcuugcauccgccgaagcuccucaaguuucuucagccgucugaauuggcugacgcaucucaacuauacuuacccagcauuaaaugugaccaugcccaacaacgagcaguuugacaagcuguauauuuggggaguccaccauccuggcacagauaaggaccagaucucucuuuacgcccaguccucaggcagaauaacugugagcaccaaaaggagucaacaggcuguaauuccaaauaucgggucucggccccgcauuagagauaucccuuccaggaucagcauuuacuggacaauaguuaagccaggagacaucuugcugauuaacucgaccgguaaucuaaucgccccgcggggcuauuucaaaauacgcucugggaaguccucaauuaugcgaagugacgcgcccaucggaaaauguaagagcgaaugcaucacgccuaacggcuccauuccaaaugauaagcccuuucagaacgugaauagaaucacuuacggugcauguccuagguaugucaaacacucuacacucaagcuggccaccgggaugcggaacgugccagagaaacagacucguggaauuuucggcgcuauagccggcuuuaucgaaaaugggugggagggaaugguggacgguugguacggcuuccgccaccaaaacagcgaggggagaggacaggcagcugaucuuaagucaacacaggccgcgauugaccaaaucaauggcaaacugaacagguugaucgguaagaccaaugaaaaauuucaucagauugagaaggaauuuagugaggucgaagggcggauacaggaucucgagaaguauguugaggacacgaaaaucgaucugugguccuacaacgccgaauuacugguggcacucgagaaucagcacaccauugaccuuacagauagcgaaaugaacaagcuguucgagaaaacuaagaaacaauugcgagaaaacgcugaggacaugggcaauggaugcuuuaagaucuaucauaagugugauaacgccugcauuggcucuauccgcaaugggaccuacgaccacaacguauacagagacgaggcucuaaauaacagguuccagauaaaaggaguggaacugaagucagguuauaaagauuggauccucuggauuaguuuugccaucagcugcuuccugcuuugugucgcacuguugggcuuuauuaugugggccugccagaaggggaauauccgguguaacauaugcauuuga

SEQ ID NO: 141363 - RNA, 1701 nt, Artificial Sequence; identical to SEQ ID NO: 140489
  derived and/or modified CDS sequence (opt3) from hemagglutinin__InfluenzaA__ALE31794

SEQ ID NO: 141364 - RNA, 1701 nt, Artificial Sequence; identical to SEQ ID NO: 140489
  derived and/or modified CDS sequence (opt3) from hemagglutinin__InfluenzaA__ALE31795

SEQ ID NO: 141365 - RNA, 1701 nt, Artificial Sequence; identical to SEQ ID NO: 140489
  derived and/or modified CDS sequence (opt3) from hemagglutinin__InfluenzaA__ALE31796

SEQ ID NO: 141366 - RNA, 1701 nt, Artificial Sequence; identical to SEQ ID NO: 141147
  derived and/or modified CDS sequence (opt3) from hemagglutinin__InfluenzaA__ALE31797

SEQ ID NO: 141367 - RNA, 1701 nt, Artificial Sequence; identical to SEQ ID NO: 141147
  derived and/or modified CDS sequence (opt3) from hemagglutinin__InfluenzaA__ALE31798

SEQ ID NO: 141368 - RNA, 1701 nt, Artificial Sequence; identical to SEQ ID NO: 140489
  derived and/or modified CDS sequence (opt3) from hemagglutinin__InfluenzaA__ALE31799

SEQ ID NO: 141369 - RNA, 1701 nt, Artificial Sequence; identical to SEQ ID NO: 141095
  derived and/or modified CDS sequence (opt3) from hemagglutinin__InfluenzaA__ALE31800

SEQ ID NO: 141370 - RNA, 1701 nt, Artificial Sequence; identical to SEQ ID NO: 140489
  derived and/or modified CDS sequence (opt3) from hemagglutinin__InfluenzaA__ALE31801

SEQ ID NO: 141371 - RNA, 1701 nt, Artificial Sequence; identical to SEQ ID NO: 140489
  derived and/or modified CDS sequence (opt3) from hemagglutinin__InfluenzaA__ALE31802

SEQ ID NO: 141372 - RNA, 1701 nt, Artificial Sequence; identical to SEQ ID NO: 141095
  derived and/or modified CDS sequence (opt3) from hemagglutinin__InfluenzaA__ALE31803

SEQ ID NO: 141373 - RNA, 1701 nt, Artificial Sequence; identical to SEQ ID NO: 141046
  derived and/or modified CDS sequence (opt3) from hemagglutinin__InfluenzaA__ALE31805

SEQ ID NO: 141374 - RNA, 1701 nt, Artificial Sequence
  derived and/or modified CDS sequence (opt3) from hemagglutinin__InfluenzaA__ALE31806
augaagaccaucauugcccugagcuacauacucugccuuguguucgcucagaaaauccccggcaacgacaauuccacagcaacucuguguuuggggcaccaugccgucccuaacggaacgauuguuaagaccaucacaaaugauagaauugaggugacuaacgcgaccgaauuaguacaaaauucuucaaucggugagauaugcgacaguccacaccagauccuggauggcgaaaacuguacacuaauugacgcucuccugggggauccgcagugcgacggauuucagaauaaaaagugggaucuuuucguggagaggagcaaagccuauuccaacuguuaccccuaugacgucccugauuacgcaucucugcggucguugguggccucaagcggcacccucgaauuuaauaacgagaguuucaauuggacugguguuacacaaaacgggaccuccucugcuugcauccgccgaagcuccucaaguuucuucagccgucugaauuggcugacgcaucucaacuauacuuacccagcauuaaaugugaccaugcccaacaacgagcaguuugacaagcuguauauuuggggaguccaccauccuggcacagauaaggaccagaucuuccuuuacgcccagucuuccggcagaauaacugugucaaccaaaaggagccaacaggcuguaauuccaaauaucgggagucggccccgcauuagagauaucccuucuaggaucuccauuuacuggacaauaguuaagccaggagacaccuugcugaucaacagcacggguaaucuaauugccccgcggggcuauuuuaaaauccgcucggggaagucuuccauaaugcgaucagacgcgcccauuggaaaauguaagagugaaugcaucacuccuaacggcagcaucccaaaugauaagcccuuccagaacgugaauagaauuacauacggugcauguccuagguaugucaaacacuccacccucaagcuggccacugggaugcggaacgugccagagaaacagacacguggaaucuuuggcgcuauugccggcuucauagaaaaugggugggagggaaugguggacgguugguacggcuuucgccaccaaaacucugaggggagaggacaggcagcugaucuuaagagcacccaggccgcgaucgaccaaauuaauggcaaacugaacagguugaucgguaagacgaaugaaaaauuccaucagaucgagaaggaauuuucagaggucgaagggcggauucaggaucucgagaaguauguugaggacaccaaaauagaucuguggaguuacaacgccgaauuacugguggcacucgagaaucagcacacaaucgaccuuacugauuccgaaaugaacaagcuguuugagaaaaccaagaaacaauugcgagaaaacgcugaggacaugggcaauggaugcuucaagauuuaucauaagugugauaacgccugcaucggcagcauucgcaaugggacauacgaccacaacguauacagagacgaggcucuaaauaacagguuucagaucaaaggaguggaacugaagucugguuauaaagauuggauacucuggaucucauucgccauuaguugcuuucugcuuugugucgcacuguugggcuucaucaugugggccugccagaaggggaauauucgguguaacaucugcauauga

SEQ ID NO: 141375 - RNA, 1701 nt, Artificial Sequence
  derived and/or modified CDS sequence (opt3) from hemagglutinin__InfluenzaA__ALE31807
augaagaccaucauugcccugagcuacauacucugccuuguguucgcucagaaacugcccggcaacgacaauuccacagcaacuuuguguuuagggcaccaugccgucccuaacggaacgaucguuaagaccauuacaaaugauagaaucgaggugacuaacgcgaccgaacugguacaaaauucuucaauuggugagaucugcgacaguccacaccagauacuagauggcgaaaacuguacacucaucgacgcucugcuuggggauccgcagugcgacggauuucagaauaaaaagugggaucuguucguggagaggagcaaagccuauuccaacuguuaccccuaugacgucccugauuacgcaucuuugcggucgcucguggccucaagcggcacccuggaauuuaauaacgagaguuucaauuggacugguguuacacaaaacgggaccuccucugcuugcauucgccgaagcuccucaaguuucuuuagccgucugaauuggcucacgcauuuaaacuuuacuuauccagcacugaaugugaccaugcccaacaacgagcaguucgacaagcuguacgucuggggagugcaccauccuggcacagauaaggaccagaucuuuuuguaugcccagucuuccggcagaauuacuguaucaaccaaaaggagccaacaggcuguuaucccaaauauagggagucggccccgcauuagaaacaucccuucuaggauuuccaucuacuggacaaucgugaagccaggagauauucugcuaauaaauagcaccgguaaccucaucgccccgcggggcuacuucaaaauucgcucggggaagucuuccaucaugcgaucagacgcgcccauaggaaaauguaagagugaaugcauuacgccuaauggcagcaucccaaacgacaagcccuuucagaaugucaacagaaucacuuauggugcauguccuagguacgugaaacacuccacacugaaacuugccaccgggaugcggaaugugccagagaagcagacucguggaauuuucggcgcuaucgccggcuuuauugaaaacgggugggagggaauggucgaugguugguauggcuuccgccaccaaaauucugaggggagaggacaggcagcugaccuuaagagcacacaggccgcgauagaucaaaucaacggcaaauugaauaggcucauugguaagaccaacgaaaaauuccaucagaucgagaaggaauuuucagagguugaagggcggauccaggaccuggagaaguacguggaggauacgaaaauugacuuauggaguuauaaugccgaacugcucguagcacuugagaaccagcacaccauagaucugacagacuccgaaaugaacaaguuguucgagaaaacuaagaaacaacuacgagaaaaugcugaggauaugggcaacggaugcuuuaagaucuaccauaagugugacaaugccugcauuggcagcauccgcaacgggaccuaugaucacaauguguacagagacgaggcucugaacaauagguuccagauuaaaggagucgaacucaagucugguuacaaagacuggauccuguggauaucauuugccaucaguugcuuccuucuguguguggcauugcucggcuuuauuaugugggccugccagaaggggaacauccgguguaauauuugcaucuga

SEQ ID NO: 141376 - RNA, 1701 nt, Artificial Sequence
  derived and/or modified CDS sequence (opt3) from hemagglutinin__InfluenzaA__ALE31808
augaagaccaucauugcccugggcuacauacucugccuuguguucgcucagaaaauccccgggaacgacaauagcacagcaacucuguguuugggacaccaugccgucccuaacgguacgauuguuaagaccaucacaaaugauagaauugaggugacuaacgcgaccgaauuaguacaaaauuccucuaucggcgagauaugcgacucaccacacaaaauccuggauggggaaaacuguacacuaauugacgcucuccugggagauccgcagugcgacggcuuucagaauaagaaaugggaucuuuucguggagaggaguaaggccuauagcaacuguuaccccuaugacgucccugauuacgcaucccugcggucuuugguggccucgucagguacccucgaauuuaauaacgagagcuucaauuggacugggguuacacagaacggaaccaguuccgcuugcauccgccgaucuagcuccucauuuuucagucgucugaauuggcugacgcaucucaacuauacuuacccagcauuaaaugugaccaugcccaacaacgagcaauuugacaagcuguauauuuggggcguccaccauccuggcacagauaaagaccagaucuuccuuuacgcccagagcucugggagaauaacuguguccaccaagaggucacagcaagcuguaauuccaaauaucggaagccggccccgcauuagagauaucccuaguaggaucucuauuuacuggacaauaguuaaaccaggugacaucuugcugauuaacuccaccggcaaucuaaucgccccgcggggguauuuuaagauacgcagcggaaaaucgucuauuaugcgauccgacgcgcccaucggcaaguguaagucagaaugcaucacgccuaacgguaguauuccaaaugauaaacccuuccagaacgugaauagaaucacuuacggggcauguccuagguaugucaagcacagcacacucaaacuggccaccggaaugcggaacgugccagagaagcagacucguggcauuuuuggcgcuauagccggguucaucgaaaauggaugggaggguaugguggacggcugguacggguuucgccaccagaacuccgagggaagaggccaagcagcugaucuuaaaucuacacaggccgcgauugaccagaucaaugguaagcugaacagguugaucgggaaaaccaaugaaaaguuccaucaaauugagaaggaguucagcgaagucgaaggccggauacaggaucucgagaaauauguugaggacacgaagaucgaucuguggucauacaacgccgaauuacugguggcacucgagaaucagcacaccauugaccuuacagauagugaaaugaacaaacuguuugagaagacuaaaaagcaguugcgagaaaacgcugaggacaugggaaauggcugcuucaagaucuaucauaaaugugauaacgccugcauuggguccauccgcaauggaaccuacgaccacaacguauacagagacgaggcucuaaauaacagguuucaaauaaaggguguggaacugaaaagcggcuauaaggauuggauccucuggauuucuuucgccaucucaugcuuucugcuuugugucgcacuguugggguucauuaugugggccugccagaaaggaaauauccgguguaacauaugcauuuga

SEQ ID NO: 141377 - RNA, 1701 nt, Artificial Sequence; identical to SEQ ID NO: 140489
  derived and/or modified CDS sequence (opt3) from hemagglutinin__InfluenzaA__ALE31810

SEQ ID NO: 141378 - RNA, 1701 nt, Artificial Sequence; identical to SEQ ID NO: 140489
  derived and/or modified CDS sequence (opt3) from hemagglutinin__InfluenzaA__ALE31812

SEQ ID NO: 141379 - RNA, 1701 nt, Artificial Sequence
  derived and/or modified CDS sequence (opt3) from hemagglutinin__InfluenzaA__ALE31814
augaagaccaucauugcccugagcuacauacucugccuuguguucgcucagaaacugcccggcaacgacaauuccacagcaacuuuguguuuagggcaccaugccgucccuaacggaacgaucguuaagaccauuacaaaugauagaaucgaggugacuaacgcgaccgaacugguacaaaauucuucaauuggugagaucugcgacaguccacaccagauacuagauggcaaaaacuguacacucaucgacgcucugcuuggggauccgcagugcgacggauuucagaauaagaaaugggaucuguucguggaaaggagcaaggcccauuccaacuguuaucccuacgacgucccugauuaugcaucuuugcggucgcucguggccucaagcggcacccuggaguuuaauaacgaaaguuucaauugggcugguguuacucaaaacgggacauccucuagcugcauucgcggauccaauucaaguuucuuuagccgacugaacuggcucacccacuuaaauucuaaguacccagcacugaacgugacgaugcccaacaaugagcaguuugacaaacuuuauaucuggggcguccaucacccuggcacugauaaggaccagauuuucuuguacgcccagccauccgggcguaucaccgugucaacaaaaagaagccaacaggcuguaauacccaacauuggaaguaggccucggauccgcgauauuccaucuagaaucuccaucuauuggacuauuguuaagccgggugacauacugcuaaucaauagcaccggcaaccucauugcccccaggggguacuuuaaaauccggucgggaaagucuuccauaaugcgcucagacgcgccuauuggcaaguguaaaagugagugcaucacaccaaaugguagcauccccaacgauaagccuuuccagaaugugaaccgaauuaccuacggggcauguccaagauaugucaaacaguccacgcugaagcuggccacuggaaugaggaaugugcccgaacggcaaacacguggcaucuuuggcgcuauugccggguucauagagaacggaugggaagguaugguggacggcugguacggguuucgccaccaaaauucugagggaagaggccaggcagcugaucuuaaaagcacccaggccgcgaucgaccagauuaacgguaaguugaauaggcucaucgggaaaacuaacgagaaguuccaucagaucgaaaaggaguucucagaagucgagggccggauucaggaucuggaaaaauauguugaggacacaaagauagauuuauggaguuacaaugccgagcugcucguggcacuugaaaaccaacacaccaucgaccugacggauuccgagaugaacaaauuguuugaaaagaccaaaaagcagcuacgagagaaugcugaagacaugggaaacggcugcuucaagauuuaucauaaaugugauaaugccugcaucgggagcauucgcaacggaacauacgaccacgacguauauagagaugaggcucugaauaacagguuucagaucaaggguguggagcucaaaucuggcuacaaggacuggauacuguggaucucauucgccauuaguugcuuucuucugugugucgcauugcucggguucaucaugugggccugccagaaaggaaauauucgguguaacaucugcauauga

SEQ ID NO: 141380 - RNA, 1701 nt, Artificial Sequence; identical to SEQ ID NO: 141379
  derived and/or modified CDS sequence (opt3) from hemagglutinin__InfluenzaA__ALE31815

SEQ ID NO: 141381 - RNA, 1701 nt, Artificial Sequence; identical to SEQ ID NO: 140489
  derived and/or modified CDS sequence (opt3) from hemagglutinin__InfluenzaA__ALE31818

SEQ ID NO: 141382 - RNA, 1701 nt, Artificial Sequence
  derived and/or modified CDS sequence (opt3) from hemagglutinin__InfluenzaA__ALE31819
augaagaccaucauugcccugagcuacauacucugccuuguguucgcucagaaaauccccggcaacgacaauuccacagcaacucuguguuuggggcaccaugccgucccuaacggaacgauuguuaagaccaucacaaaugauagaauugaggugacuaacgcgaccgaauuaguacaaaauucuucaaucggugagauaugcgacaguccacaccagauccuggauggcgaaaacuguacacuaauugacgcucuccugggggauccgcagugcgacggauuucagaauaaaaagugggaucuuuucguggagaggagcaaagccuauuccaacuguuaccccuaugacgucccugauuacgcaucucugcggucguugguggccucaagcggcacccucgaauuuaauaacgagaguuucaauuggacugguguuacacaaaacgggaccuccucugcuugcauccgcggaagcuccucaaguuucuucagccgacugaauuggcugacgcaucucaacuauacuuacccagcauuaaaugugaccaugcccaacaaggagcaguuugacaagcuguauauuuggggcguccaccauccuggcacagauaaagaccagaucuuccuuuacgcccagucuuccgggcguauaacugugucaaccaagagaagccaacaggcuguaauuccaaacaucggaaguaggccccggauucgcgauaucccuucuagaaucuccauuuacuggacaauaguuaaaccaggugacaucuugcugauuaauagcaccggcaaccuaaucgccccgaggggguauuuuaagauacggucgggaaaaucuuccauuaugcgcucagacgcgcccaucggcaaguguaagagugaaugcaucacgccuaaugguagcauuccaaacgauaaacccuuccagaaugugaaccgaaucacuuacggggcauguccuagauaugucaagcacuccacacucaaacuggccaccggaaugaggaaugugccagagaagcagacucggggcauuuuuggcgcuauagccggguucaucgaaaacggaugggaggguaugguggacggcugguacggguuucgucaccaaaauucugagggacgcggccaggcagcugaucuuaaaagcacacaggccgcgauugaccaaaucaacgguaagcugaauagauugaucgggaaaaccaacgaaaaguuccaucagauugagaaggaauuuucagaggucgaaggcaggauacaggaucucgagaaauauguugaggacacgaagaucgaucuguggaguuacaaugccgaauuacugguggcacucgagaaccagcacaccauugaccuuacagauuccgaaaugaauaaacuguuugagaagacuaaaaagcaauugcgggaaaacgcugaggacaugggaaacggcugcuucaagaucuaucauaaaugugauaaugccugcauugggagcauccgaaacggaaccuacgaccacaauguauaccgcgacgaggcucuaaacaauagauuucagauaaaggguguggaacugaaaucuggcuauaaggauuggauccucuggauuucauucgccaucaguugcuuucugcuuugugucgcacuguugggguucauuaugugggccugccagaaaggaaacaucagguguaauauaugcauuuga

SEQ ID NO: 141383 - RNA, 1701 nt, Artificial Sequence; identical to SEQ ID NO: 141033
  derived and/or modified CDS sequence (opt3) from hemagglutinin__InfluenzaA__ALE31820

SEQ ID NO: 141384 - RNA, 1701 nt, Artificial Sequence
  derived and/or modified CDS sequence (opt3) from hemagglutinin__InfluenzaA__ALE31821
augaagaccaucauugcccugagcuacacacucugccuuguguucgcucagaaaauacccggcaacgacaauuccacugcaacgcuguguuuggggcaccaugccgucccuaacggaaccaucguuaagacaauuacuaaugauagaaucgaggugaccaacgcgacagaauuaguacaaaauucuucaauuggugagaucugcgacaguccacaccagauacuggauggcgaaaacuguacccuaaucgacgcucuccugggggauccgcagugcgacggauuucagaauaaaaagugggaucuuuucguggagaggagcaaagcccauuccaacuguuaucccuacgacgucccugauuaugcaucucugcggucguugguggccucaagcggcacucucgaauuuaauaacgagaguuucaauuggacagguguuacccaaaacgggacguccucugcuugcauucgccgaagcuccucaaguuucuucagccgucugaauuggcugacucaccucaacuacaccuauccagcauuaaaugugacaaugcccaacaacgagcaguuugacaagcuguacaucuggggaguccaucacccuggcacugauaaggaccagauuuuccuuuaugcccagucuuccggcagaaucaccgugucaacaaaaaggagccaacaggcuguaauaccaaauauugggagucggccccgcaucagagauauuccuucuaggaucuccaucuacuggaccauuguuaagccaggagacauauugcugaucaacagcacggguaaucuaauugccccgcggggcuacuuuaaaauccgcucggggaagucuuccauaaugcgaucagacgcgcccauuggaaaauguaagagugaaugcaucacuccuaacggcagcaucccaaaugauaagcccuuccagaacgugaauagaauuacauauggugcauguccuagguacgucaaacacuccacccucaagcuggccacugggaugcggaacgugccagagaaacagacacguggaaucuuuggcgcuauugccggcuucauagaaaaugggugggagggaaugguggacgguugguauggcuuucgccaucaaaacucugaggggagaggacaggcagcugaucuuaagagcacccaggccgcgaucgaccaaauuaauggcaaacugaacagguugaucgguaagacgaaugaaaaauuccaccagaucgagaaggaauuuucagaggucgaagggcggauucaggaucucgagaaguacguugaggacaccaaaauagaucuguggaguuauaacgccgaauuacugguggcacucgagaaucagcauacaaucgaccuuacugauuccgaaaugaacaagcuguuugagaaaaccaagaaacaauugcgagaaaacgcugaggacaugggcaauggaugcuucaagauuuaccacaagugugauaacgccugcaucggcagcauucgcaaugggacauaugaccacaacguauacagagacgaggcucuaaauaacagguuucagaucaaaggaguggaacugaagucugguuacaaagauuggauacucuggaucucauucgccauuaguugcuuucugcuuugugucgcacuguugggcuucaucaugugggccugccagaaggggaauauucgguguaacaucugcauauga

SEQ ID NO: 141385 - RNA, 1701 nt, Artificial Sequence; identical to SEQ ID NO: 141125
  derived and/or modified CDS sequence (opt3) from hemagglutinin__InfluenzaA__ALE31822

SEQ ID NO: 141386 - RNA, 1701 nt, Artificial Sequence; identical to SEQ ID NO: 141033
  derived and/or modified CDS sequence (opt3) from hemagglutinin__InfluenzaA__ALE31823

SEQ ID NO: 141387 - RNA, 1701 nt, Artificial Sequence; identical to SEQ ID NO: 140489
  derived and/or modified CDS sequence (opt3) from hemagglutinin__InfluenzaA__ALE31824

SEQ ID NO: 141388 - RNA, 1701 nt, Artificial Sequence
  derived and/or modified CDS sequence (opt3) from hemagglutinin__InfluenzaA__ALE31825
augaagaccaucauugcccugagcuacauacucugccuuguguucgcucagaaaauccccggcaacgacaauuccacagcaacucuguguuuggggcaccaugccgucccuaacggaacgauuguuaagaccaucacaaaugauagaauugaggugacuaacgcgaccgaauuaguacaaaauucuucaaucggugagauaugcgacaguccacaccagauccuggauggcgaaaacuguacacuaauugacgcucuccugggggauccgcagugcgacggauuucagaauaaaaagugggaucuuuucguggagaggagcaaagccuauuccaacuguuaccccuaugacgucccugauuacgcaucucugcggucguugguggccucaagcggcacccucgaauuuaauaacgagaguuucaauuggacugguguuacacaaaacgggaccuccucugcuugcauccgccgaagcuccucaaguuucuucagccgucugaauuggcugacgcaucucaacuauagauacccagcauuaaaugugacuaugcccaacaacgagcaguuugacaagcuguauauuuggggaguccaccauccuggcaccgauaaggaccagaucuuccuuuacgcccagucuuccggcaggauaacagugucaacuaaacggagccaacaggcuguaauuccaaauaucgggagucgccccagaauuagggauaucccuucucggaucuccauuuacuggaccauaguuaagccaggagacaucuugcugauuaacagcacagguaaucuaaucgccccgcgcggcuauuuuaaaauacgaucggggaagucuuccauuaugagaucagacgcgcccaucggaaaauguaagagugaaugcaucaccccuaacggcagcauuccaaaugauaagcccuuccagaacgugaauaggaucacguacggugcauguccucgguaugucaaacacuccacucucaagcuggccacagggaugcguaacgugccagagaaacagacccgcggaauuuuuggcgcuauagccggcuucaucgaaaaugggugggagggaaugguggacgguugguacggcuuuagacaccaaaacucugaggggaggggacaggcagcugaucuuaagagcacucaggccgcgauugaccaaaucaauggcaaacugaaccgguugaucgguaagacaaaugaaaaauuccaucagauugagaaggaauuuucagaggucgaagggcgaauacaggaucucgagaaguauguugaggacaccaaaaucgaucuguggaguuacaacgccgaauuacugguggcacucgagaaucagcacacgauugaccuuaccgauuccgaaaugaacaagcuguuugagaaaacaaagaaacaauugcgcgaaaacgcugaggacaugggcaauggaugcuucaagaucuaucauaagugugauaacgccugcauuggcagcaucagaaaugggacuuacgaccacaacguauacagggacgaggcucuaaauaaccgguuucagauaaaaggaguggaacugaagucugguuauaaagauuggauccucuggauuucauucgccaucaguugcuuucugcuuugugucgcacuguugggcuucauuaugugggccugccagaaggggaauauccgcuguaacauaugcauuuga

SEQ ID NO: 141389 - RNA, 1701 nt, Artificial Sequence; identical to SEQ ID NO: 140489
  derived and/or modified CDS sequence (opt3) from hemagglutinin__InfluenzaA__ALE31826

SEQ ID NO: 141390 - RNA, 1701 nt, Artificial Sequence; identical to SEQ ID NO: 140489
  derived and/or modified CDS sequence (opt3) from hemagglutinin__InfluenzaA__ALE31827

SEQ ID NO: 141391 - RNA, 1701 nt, Artificial Sequence; identical to SEQ ID NO: 140489
  derived and/or modified CDS sequence (opt3) from hemagglutinin__InfluenzaA__ALE31828

SEQ ID NO: 141392 - RNA, 1701 nt, Artificial Sequence; identical to SEQ ID NO: 141046
  derived and/or modified CDS sequence (opt3) from hemagglutinin__InfluenzaA__ALE31829

SEQ ID NO: 141393 - RNA, 1701 nt, Artificial Sequence
  derived and/or modified CDS sequence (opt3) from hemagglutinin__InfluenzaA__ALE31830
augaagaccaucauugcccugagcuacauacucugccuuguguucgcucagaaaauccccggcaacgacaauuccacagcaacucuguguuuggggcaccaugccgucccuaacggaacgauuguuaagaccaucacaaaugauagaauugaggugacuaacgcgaccgaauuaguacaaaauucuucaaucggugagauaugcgacaguccacaccagauccuggauggcgaaaacuguacacuaauugacgcucuccugggggauccgcagugcgacggauuucagaauaaaaagugggaucuuuucguggagaggagcaaagccuauuccaacuguuaccccuaugacgucccugauuacgcaucucugcggucguugguggccucaagcggcacccucgaauuuaauaacgagaguuucaauuggacugguguuacacaaaacgggaccuccucugcuugcauccgccgaagcuccucaaguuucuucagccgucugaauuggcugacgcaucucaacuauacuuacccagcauuaaaugugaccaugcccaacaacgagcaguuugacaagcuguauauuuggggaguccaccauccuggcacagauaaggaccagaucuuccuuuacgcccagucuuccggcagaauaacugugucaaccaaaaggagccaacaggcuguaauuccaaauaucgggagucggccccgcauuagagauaucccuucuaggaucuccauuuacuggacaauaguuaagccaggagacaucuugcugauuaacagcaccgguaaucuaaucgccccgcggggcuauuuuaaaauacgcucggggaagucuuccauuaugcgaucagacgcgcccaucggaaaauguaagagugaaugcaucacgccuaacggcagcauuccaaaugauaagcccuuccagaacgugaauagaaucacuuacggugcauguccuagguaugucaaacacuccacacucaagcuggccaccgggaugcggaacgugccagagaaacagacucguggaauuuuuggcgcuauagccggcuucaucgaaaaugggugggagggaaugguggacgguugguacggcuuucgccaccaaaacucugaggggagaggacaggcagcugaucuuaagagcacacaggccgcgauugaccaaaucaauggcaaacugaacagguugaucgguaagaccaaugaaaaauuccaucagauugagaaggaauuuucagaggucgaagggcggauacaggaucucgagaaguauguugaggacacgaaaaucgaucuguggaguuacaacgccgaauuacugguggcacucgagaaucagcacaccauugacaucacagauuccgaaaugaacaaacuuuuugagaagacuaagaaacaacugcgagaaaacgcugaggacaugggcaauggaugcuucaagauuuaucauaagugugauaacgccugcaucggcagcauacgcaaugggaccuacgaccacaacguauacagagacgaggcuuugaauaacagguuucagaucaaaggaguggaacuaaagucugguuauaaagauuggauucuguggaucucauucgccauuaguugcuuucuccugugugucgcacuucugggcuucaucaugugggccugccagaaggggaauauacgguguaacauuugcaucuga

SEQ ID NO: 141394 - RNA, 1701 nt, Artificial Sequence
  derived and/or modified CDS sequence (opt3) from hemagglutinin__InfluenzaA__ALE31832
augaagaacaucauugcccugagcuacauacucugccuuguguucgcucagaaaauccccggcaaugacaacuccaccgcaacacuguguuuggggcaccaugccgucccuaauggaacuauuguuaagacgaucaccaacgauagaauugaggugacaaaugcgacugaauuaguacaaaacucuucaaucggugagauaugcgacaguccacaccagauccuggauggcgaaaauuguacccuaauugacgcucuccugggggauccgcagugcgacggauuucagaacaaaaagugggaucuuuucguggagaggagcaaagccuauuccaauuguuaccccuaugacgucccugauuacgcaucucugcggucguugguggccucaagcggcacacucgaauuuaacaaugagaguuucaacuggaccgguguuacucaaaaugggacauccucugcuugcauccgccgaagcaacuccucauuuuucagucgucugaauuggcugacccaucucaacuauacguacccagcauuaaacgugacuaugcccaauaacgagcaguuugacaagcuguauauuuggggaguccaccauccuggcaccgauaaggaccagaucuuccuuuacgcccagagcucuggcagaauaacaguguccacuaaaaggucacaacaggcuguaauuccaaauaucgggagccggccccgcauuagagauaucccuaguaggaucucuauuuacuggaccauaguuaagccaggagacaucuugcugauuaacuccacagguaaucuaaucgccccgcggggcuauuuuaaaauacgcagcgggaagucgucuauuaugcgauccgacgcgcccaucggaaaauguaagucagaaugcaucaccccuaacggcaguauuccaaaugauaagcccuuccagaacgugaauagaaucacguacggugcauguccuagguaugucaaacacagcacucucaagcuggccacagggaugcggaacgugccagagaaacagacccguggaauuuuuggcgcuauagccggcuucaucgaaaaugggugggagggaaugguggacgguugguacggcuuucgccaccaaaacuccgaggggagaggacaggcagcugaucuuaagucuacucaggccgcgauugaccaaaucaauggcaaacugaacagguugaucgguaagacaaaugaaaaauuccaucagauugagaaggaguucagcgaagucgaagggcggauacaggaucucgagaaguauguugaggacaccaaaaucgaucuguggucauacaacgccgaauuacugguggcacucgagaaccagcacacgauugaccuuaccgauagugaaaugaauaagcuguuugagaaaacaaagaaacaauugcgagaaaacgcugaggacaugggcaauggaugcuucaagaucuaucauaagugugauaacgccugcauuggcuccauccgcaaugggacuuacgaccacaacguauacagagacgaggcucuaaauaacagguuucagauaaaaggaguggaacucaagagcgguuauaaagauuggauccuguggauuucuuucgccaucucaugcuuucugcuuugugucgcacuguugggcuucauuaugugggccugccagaaggggaauauccgguguaacauaugcauuuga

SEQ ID NO: 141395 - RNA, 1701 nt, Artificial Sequence
  derived and/or modified CDS sequence (opt3) from hemagglutinin__InfluenzaA__ALE31833
augaagaccaucauugcccugagcuacauacucugccuuguguccgcucagaaaauccccggcaacgacaauucuacagcaacucuguguuuggggcaccaugccgucccuaacggaacgauuguuaagaccaucacaaaugauagaauugaggugacuaacgcgaccgaauuaguacaaaauucaaguaucggugagauaugcaacagcccacaccagauccuggacggcgaaaauuguacacuaauugaugcucuccugggggacccgcagugcgauggauuccagaacaaaaagugggaccuuuuuguggagagguccaaagccuauucuaauuguuaccccuaugaugucccugacuacgcaucgcugcggucauugguggccagcaguggcacccucgaguucaacaaugaauccuuuaacuggacugguguuacacaaaaugggaccucuagcgcuugcauccgccgauccucaaguagcuucuuuucucgucugaacuggcugacgcaucucaauuauacuuacccagcauuaaacgugaccaugcccaacaaugagcaguucgauaagcuguauauuuggggaguccaccauccuggcacagacaaggaucagaucuuucuuuacgcccaguccucaggcagaauaacugugagcaccaaaaggagucaacaggcuguaauuccaaacaucgggucucggccccgcauuagagacaucccuuccaggaucagcauuuacuggacaauaguuaagccaggagauaucuugcugauuaauucgaccgguaaccuaaucgccccgcggggcuauuucaaaauacgcucugggaaguccucaauuaugcgaagugacgcgcccaucggaaaauguaagagcgaaugcaucacgccuaauggcuccauuccaaacgacaagcccuuucagaaugugaacagaaucacuuacggugcauguccuagguaugucaaacacucuacacucaagcuggccaccgggaugcggaaugugccagagaaacagacucguggaauuuucggcgcuauagccggcuuuaucgaaaacgggugggagggaaugguggaugguugguacggcuuccgccaccaaaauagcgaggggagaggacaggcagcugaccuuaagucaacacaggccgcgauugaucaaaucaacggcaaacugaauagguugaucgguaagaccaacgaaaaauuucaucagauugagaaggaguucagugaagucgaagggcggauacaggaccucgagaaguauguugaggauacgaaaaucgaccugugguccuacaaugccgaauuacugguggcacucgagaaccagcacaccauugaucuuacagacagcgaaaugaacaagcuguucgagaaaacuaagaaacaauugcgagaaaaugcugaggauaugggcaacggaugcuuuaagaucuaucauaagugugacaaugccugcauuggcucuauccgcaacgggaccuacgaucacaauguauacagagacgaggcucuaaacaauagguuccagauaaaaggaguggaacugaagucagguuauaaagacuggauccucuggauuaguuuugccaucagcugcuuccugcuuugugucgcacuguugggcuuuauuaugugggccugccagaaggggaacauccgguguaauauaugcauuuga

SEQ ID NO: 141396 - RNA, 1701 nt, Artificial Sequence
  derived and/or modified CDS sequence (opt3) from hemagglutinin__InfluenzaA__ALE31834
augaagaccaucauugcccugagcuacauacucugccuuguguucgcucagaaacugcccggcaacgacaauuccacagcaacuuuguguuuagggcaccaugccgucccuaacggaacgaucguuaagaccauuacaaaugauagaaucgaggugacuaacgcgaccgaacugguacaaaauucuucaauuggugagaucugcgacaguccacaccagauacuagauggcgaaaacuguacacucaucgacgcucugcuuggggauccgcagugcgacggauuucagaauaaaaagugggaucuguucguggagaggagcaaagcccauuccaacuguuaucccuacgacgucccugauuaugcaucuuugcggucgcucguggccucaagcggcacccuggaauuuaauaacgagaguuucaauugggcugguguuacucaaaacgggacauccucuagcugcauucgcggauccaauucaaguuucuucagccgacugaacuggcucacccacuuaaauucuaaguacccagcacugaacgugacgaugcccaacaaugagcaguuugacaaacuuuauaucuggggcguccaucacccuggcacugauaaggaccagauuuucuuguacgcccaguccucagggcguaucaccgugagcacaaagagaagucaacaggcuguaauaccaaacauuggaucuaggccccggauccgcgauauuccuuccagaaucagcaucuauuggacuauuguuaaaccaggugacauacugcuaaucaauucgaccggcaaccucauugccccgaggggguacuuuaagauccggucuggaaaauccucaauaaugcgcagugacgcgcccauuggcaaguguaagagcgaaugcaucacaccuaaugguuccaucccaaacgauaaacccuuccagaaugugaaccgaauuaccuacggggcauguccuagauaugucaagcagucuacgcugaaacuugccacuggaaugaggaaugugccagagaagcaaacacggggcaucuuuggcgcuauugccggguucauagaaaacggaugggaggguaugguggacggcugguacggguuucgucaccagaauagcgagggacgcggccaggcagcugaucugaaaucaacccaagccgcgaucgaccagauuaacgguaaguugaauagacucaucgggaaaacuaacgaaaaguuccaucagaucgagaaggaauuuagugaggucgaaggcaggauucaggaucuggagaaauauguugaggacacaaagauagauuuaugguccuacaaugccgaacugcucguggcacuugagaaccaacacaccaucgaccugacggauagcgaaaugaacaaauuguuugagaagaccaaaaagcagcuacgggaaaaugcugaggacaugggaaacggcugcuucaagauuuaucauaaaugugauaaugccugcaucgggucuauucgaaacggaacauacgaccacgacguauaucgcgaugaggcucugaauaacagauuucagaucaaggguguggaacucaaaucaggcuacaaggacuggauacuguggaucaguuucgccauuagcugcuuucuucugugugucgcauugcucggguucaucaugugggccugccagaaaggaaauauuagguguaacaucugcauauga

SEQ ID NO: 141397 - RNA, 1701 nt, Artificial Sequence; identical to SEQ ID NO: 141147
  derived and/or modified CDS sequence (opt3) from hemagglutinin__InfluenzaA__ALE31835

SEQ ID NO: 141398 - RNA, 1701 nt, Artificial Sequence; identical to SEQ ID NO: 140489
  derived and/or modified CDS sequence (opt3) from hemagglutinin__InfluenzaA__ALE31836

SEQ ID NO: 141399 - RNA, 1701 nt, Artificial Sequence
  derived and/or modified CDS sequence (opt3) from hemagglutinin__InfluenzaA__ALE31837
augaagaccaucauugcccugagcuacauacucugccuuguguaugcucagaaaauccccggcaacgacaauuccacagcaacucuguguuuggggcaccaugccgucccuaacggaacgauuguuaagaccaucacaaaugauagaauugaggugacuaacgcgaccgaauuaguacaaaauucuucaaucggugagauaugcgacaguccacaccagauccuggauggcgaaaacuguacacuaauugacgcucuccugggggauccgcagugcgacggauuccagaauaaaaagugggaucuuuuuguggagaggagcaaagccuacuccaacuguuaucccuacgacgucccugauuaugcaucucugcggucguugguggccucaagcggcacccucgaguucaauaacgaaaguuuuaauuggacugguguuacacaaaacgggaccuccucugcuugcauccgccgaagcuccucaaguuucuuuagccgucugaauuggcugacgcaucucaacuacacuuauccagcauuaaaugugaccaugcccaacaacgagcaguucgacaagcuguacauuuggggaguccaccauccuggcacagauaaggaccagaucuuucuuuacgcccagucuuccggcagaauaacugugucaaccaaaaggagccaacaggcuguaauuccaaauaucgggagucggccccgcauuagagauaucccuucuaggaucuccauuuauuggacaauaguuaagccaggagacaucuugcugauuaacagcaccgguaaucuaaucgccccgcggggcuacuucaaaauacgcucggggaagucuuccauuaugcgaucagacgcgcccaucggaaaauguaagagugaaugcaucacgccuaacggcagcauuccaaaugauaagcccuuucagaacgugaauagaaucacuuauggugcauguccuagguacgucaaacacuccacacucaagcuggccaccgggaugcggaacgugccagagaaacagacucguggaauuuucggcgcuauagccggcuuuaucgaaaaugggugggagggaaugguggacgguugguauggcuuccgccaccaaaacucugaggggagaggacaggcagcugaucuuaagagcacacaggccgcgauugaccaaaucaauggcaaacugaacagguugaucgguaagaccaaugaaaaauuucaucagauugagaaggaguucucagaagucgaagggcggauacaggaucucgagaaguacguugaggacacgaaaaucgaucuguggaguuauaacgccgaauuacugguggcacucgagaaucagcacaccauugaccuuacagauuccgaaaugaacaagcuguucgagaaaacuaagaaacaauugcgagaaaacgcugaggacaugggcaauggaugcuuuaagaucuaccauaagugugauaacgccugcauuggcagcauccgcaaugggaccuacgaccacaacguauauagagacgaggcucuaaauaacagguuccagauaaaaggaguggaacugaagucugguuacaaagauuggauccucuggauuucauuugccaucaguugcuuccugcuuugugucgcacuguugggcuuuauuaugugggccugccagaaggggaauauccgguguaacauaugcauuuga

SEQ ID NO: 141400 - RNA, 1701 nt, Artificial Sequence; identical to SEQ ID NO: 140489
  derived and/or modified CDS sequence (opt3) from hemagglutinin__InfluenzaA__ALE31838

SEQ ID NO: 141401 - RNA, 1701 nt, Artificial Sequence; identical to SEQ ID NO: 140489
  derived and/or modified CDS sequence (opt3) from hemagglutinin__InfluenzaA__ALE31839

SEQ ID NO: 141402 - RNA, 1701 nt, Artificial Sequence
  derived and/or modified CDS sequence (opt3) from hemagglutinin__InfluenzaA__ALE31840
augaagaccaucauugcccugagcuacauacucugccuuguguucgcucagaaaauccccggcaacgacaauuccacagcaacucuguguuuggggcaccaugccgucccuaacggaacgauuguuaagaccaucacaaaugauagaauugaggugacuaacgcgaccgaauuaguacaaaauucuucaaucggugagauaugcgacaguccacaccagauccuggauggcgaaaacuguacacuaauugacgcucuccugggggauccgcagugcgacggauuucagaauaaaaagugggaucuuuucguggagaggagcaaagccuauuccaacuguuaccccuaugacgucccugauuacgcaucucugcggucguugguggccucaagcggcacccucgaauuuaauaacgagaguuucaauuggacugguguuacacaaaacgggaccuccucugcuugcauccgccgaagcuccucaaguuucuucagccgucugaauuggcugacgcaucucaacuauacuuacccagcauuaaaugugaccaugcccaacaacgagcaguuugacaagcuguauauuuggggaguccaccauccuggcacagauaaggaccagaucuuccuuuacgcccagucuuccggcagaauaacugugucaaccaaaaggagccaacaggcuguaauuccaaauaucgggagucgguugcgcauuagagauauccccucuaggaucuccauuuacuggacaauaguuaagccuggagacauccugcuaauuaacagcaccgguaaucucaucgccccacggggcuauuuuaaaauacgcucggggaagucuuccauuaugcgaucagacgcgccgaucggaaaauguaagagugaaugcaucacgcccaacggcagcauuccuaaugauaagccauuccagaacgugaauagaaucacuuacggugcaugucccagguaugucaaacacuccacacugaagcuggccaccgggaugcggaacgugccugagaaacagacucguggaauuuuuggcgcuauagccggcuucaucgaaaaugggugggagggaaugguggacgguugguacggcuuucgccaccaaaacucugaggggagaggacaggcagcugaucuuaagagcacacaggccgcgauugaccaaaucaauggcaaauugaacaggcucaucgguaagaccaaugaaaaauuccaucagauugagaaggaauuuucagaggucgaagggcggauacaggaucuggagaaguauguugaggacacgaaaaucgauuuauggaguuacaacgccgaacugcucguggcacuugagaaucagcacaccauugaccugacagauuccgaaaugaacaaguuguuugagaaaacuaagaaacaacuacgagaaaacgcugaggacaugggcaauggaugcuucaagaucuaucauaagugugauaacgccugcauuggcagcauccgcaaugggaccuacgaccacaacguauacagagacgaggcucugaauaacagguuucagauaaaaggaguggaacucaagucugguuauaaagauuggauccuguggauuucauucgccaucaguugcuuucuucugugugucgcauugcucggcuucauuaugugggccugccagaaggggaauauccgguguaacauaugcauuuga

SEQ ID NO: 141403 - RNA, 1701 nt, Artificial Sequence; identical to SEQ ID NO: 140489
  derived and/or modified CDS sequence (opt3) from hemagglutinin__InfluenzaA__ALE31842

SEQ ID NO: 141404 - RNA, 1701 nt, Artificial Sequence
  derived and/or modified CDS sequence (opt3) from hemagglutinin__InfluenzaA__ALE31843
augcagaccaucauugcccugagcuacauacucugccuuguguucgcucaaaagauccccggcaacgacaauuccacagcaacucuguguuuggggcaccaugccgucccuaacggaacgauuguuaaaaccaucacaaaugauagaauugaggugacuaacgcgaccgaauuaguacaaaauucuucaaucggugagauaugcgacaguccacaccagauccuggauggcgaaaacuguacacuaauugacgcucuccugggggauccgcagugcgacggauuucagaauaagaaaugggaucuuuucguggagaggagcaaggccuauuccaacuguuaccccuaugacgucccugauuacgcaucucugcggucguugguggccucaagcggcacccucgaauuuaauaacgagaguuucaauuggacugguguuacacagaacgggaccuccucugcuugcauccgcaaaagcuccucaaguuucuucagccgacugaauuggcugacgcaucucaacuauacuuacccagcauuaaaugugaccaugcccaacaacgagcaguuugacaagcuguauauuuggggaguccaccauccuggcacagauaaggaccagaucuuccuuuacgcccaaucuuccggccguauaacugugucaaccaaaagaagccagcaggcuguaauuccaaauaucgggaguaggccccggauucgcgauaucccuucuagaaucuccauuuacuggacaauaguuaagccaggagacaucuugcugauuaacagcaccgguaaucuaaucgccccgaggggcuauuuuaaaauacucucggggaagucuuccauuaugcggucagacgcgcccaucggaaaauguaagagugaaugcaucacgccuaacggcagcauuccaaaugauaagcccuuccagaacgugaaucgcaucacuuacggugcauguccucgauaugucaaacacuccacacugaagcuggccaccgggaugagaaacgugccagagaaacaaacuaggggaauuuuuggcgcuauagccggcuucaucgaaaaugggugggagggaaugguggacgguugguacggcuuucggcaccagaacucugaggggcguggacaggcagcugaucuuaagagcacacaagccgcgauugaccagaucaauggcaaauugaaccgccucaucgguaagaccaaugaaaaauuccaucagauugagaaggaauuuucagaggucgaagggagaauacaggaucuggagaaguauguugaggacacgaaaaucgauuuauggaguuacaacgccgaacugcucguggcacuugagaaucaacacaccauugaccugacagauuccgaaaugaacaaguuguuugagaaaacuaagaaacagcuaagggaaaacgcugaggacaugggcaauggaugcuucaagaucuaucauaagugugauaacgccugcauuggcagcauccggaaugggaccuacgaccacaacguauaccgagacgaggcucugaauaaccgcuuucagauaaaaggaguggaacucaagucugguuauaaagauuggauccuguggauuucauucgccaucaguugcuuucuucugugugucgcauugcucggcuucauuaugugggccugccagaaggggaauaucagauguaacauaugcauuuga

SEQ ID NO: 141405 - RNA, 1701 nt, Artificial Sequence; identical to SEQ ID NO: 141046
  derived and/or modified CDS sequence (opt3) from hemagglutinin__InfluenzaA__ALE31844

SEQ ID NO: 141406 - RNA, 1701 nt, Artificial Sequence; identical to SEQ ID NO: 141022
  derived and/or modified CDS sequence (opt3) from hemagglutinin__InfluenzaA__ALE31846

SEQ ID NO: 141407 - RNA, 1701 nt, Artificial Sequence; identical to SEQ ID NO: 140489
  derived and/or modified CDS sequence (opt3) from hemagglutinin__InfluenzaA__ALE31847

SEQ ID NO: 141408 - RNA, 1701 nt, Artificial Sequence; identical to SEQ ID NO: 140489
  derived and/or modified CDS sequence (opt3) from hemagglutinin__InfluenzaA__ALE31848

SEQ ID NO: 141409 - RNA, 1701 nt, Artificial Sequence
  derived and/or modified CDS sequence (opt3) from hemagglutinin__InfluenzaA__ALE31850
augaagaccaucauugcccugagcuacauacucugccuuguguucgcucagaaacugcccggcaacgacaauuccacagcaacuuuguguuuagggcaccaugccgucccuaacggaacgaucguuaagaccauuacaaaugauagaaucgaggugacuaacgcgaccgaacugguacaaaauucuucaauuggugagaucugcgacaguccacaccagauacuagauggcgaaaacuguacacucaucgacgcucugcuuggggauccgcagugcgacggauuucagaauaaaaagugggaucuguucguggagaggagcaaagccuauuccaacuguuaccccuaugacgucccugauuacgcaucuuugcggucgcucguggccucaagcggcacccuggaauuuaauaacgagaguuucaauugggcugguguuacucaaaacgggacauccucuagcugcauucgcggauccaauucaaguuucuucagccgacugaacuggcucacccauuuaaauucuaaguauccagcacugaacgugacgaugcccaacaaugagcaguuugacaagcuguacaucuggggcguccaccauccuggcacugauaaagaccagauuuucuuguaugcccagccauccgggcguaucaccgugucaacaaagagaagccaacaggcuguaauacccaacauuggaaguaggccucggauccgcgauauuccaucuagaaucuccaucuacuggacuauuguuaaaccgggugacauacugcuaaucaauagcaccggcaaccucauugcccccaggggguacuuuaagauccggucgggaaaaucuuccauaaugcgcucagacgcgccuauuggcaaguguaagagugaaugcaucacaccaaaugguagcauccccaacgauaaaccuuuccagaaugugaaccgagucaccuauggggcauguccaagauacgugaagcaguccacgcugaaacuugccacuggaaugaggaaugugcccgagcggcaaacacguggcauuuuuggcgcuaucgccggguucauugaaaacggaugggaggguauggucgacggcugguauggguuucgccaccaaaauucugagggaagaggccaggcagcugaucuuaagagcacccaggccgcgauagaccagaucaacgguaaauugaauaggcucauugggaagacuaacgaaaaauuccaccagaucgagaaggaauuuucagagguugaaggccggauccaggaucuggagaaguacguggaggacacaaaaauugauuuauggaguuauaaugccgaacugcucguagcacuugagaaccaacauaccauagaccugacggauuccgaaaugaacaaguuguuugagaaaaccaagaaacagcuacgagaaaaugcugaggacaugggaaacggcugcuucaagaucuaccacaagugugauaaugccugcauugggagcauccgcaacggaacauaugaccaugacguguacagagaugaggcucugaauaacagguuucagauuaaaggugucgaacucaagucuggcuacaaagacuggauccuguggauaucauucgccaucaguugcuuucuucuguguguggcauugcucggguucauuaugugggccugccagaagggaaauauccgguguaacauuugcaucuga

SEQ ID NO: 141410 - RNA, 1701 nt, Artificial Sequence
  derived and/or modified CDS sequence (opt3) from hemagglutinin__InfluenzaA__ALE31851
augaagaccaucauugcccugagcuacauacucugccuuguguucgcucagaaaauccccggcaacgacaauuccacagcaacucuguguuuggggcaccaugccgucccuaacggaacgauuguuaagaccaucacaaaugauagaauugaggugacuaacgcgaccgaauuaguacaaaauucuucaaucggugagauaugcgacaguccacaccagauccuggauggcgaaaacuguacacuaauugacgcucuccugggggauccgcagugcgacggauuucagaauaaaaagugggaucuuuucguggagaggagcaaagccuauuccaacuguuaccccuaugacgucccugauuacgcaucucugcggucguugguggccucaagcggcacccucgaauuuaauaacgagaguuucaauuggacugguguuacacaaaacgggaccuccucugcuugcauccgcaagagcuccucaaguuucuucagccgacugaauuggcugacgcaucucaacuauacuuacccagcauuaaaugugaccaugcccaacaacgagcaguuugacaagcuguauauuuggggaguccaccauccuggcacagauaaagaccagaucuuccuuuacgcccguucuuccggcagaauaacugugucaaccaagaggagccagcaagcuguaauuccaaauaucgggagucggccccgcauuagagauaucccuucuaggaucuccauuuacuggacaauaguuaaaccaggagacaucuugcugauuaacagcaucgguaaucuaauagccccgcggggcuauuuuaagauucgcucggggaaaucuuccaucaugcgaucagacgcgcccaucggaaaguguaagagugaaugcauuaccccuaacggcagcaucccaaaugauaaacccuuccagaacgugaauagaauuacguacggugcauguccuagguaugucaagcacuccacucucaaacuggccacagggaugcggaacgugccagagaagcagacccguggaauauuuggcgcuaucgccggcuucauugaaaaugggugggagggaaugguggacgguugguacggcuuucgccaccagaacucugaggggagaggacaagcagcugaucuuaaaagcacucaggccgcgaucgaccagaucaauggcaagcugaacagguugauugguaaaacaaaugaaaaguuccaucaaauagagaaggaauuuucagaggucgaagggcggauccaggaucucgagaaauauguugaggacaccaagauugaucuguggaguuacaacgccgaauuacugguggcacucgagaaucagcacacgaucgaccuuaccgauuccgaaaugaacaaacuguuugagaagacuaaaaagcaguugcgagaaaacgcugaggacaugggcaauggaugcuucaagauuuaucauaaaugugauaacgccugcaucggcagcauacgcaaugggacauacgaccacaacguauacagagacgaggcucuaaauaacagguuucaaaucaagggaguggaacugaaaucugguuauaaggauuggauucucuggaucucauucgccauuaguugcuuucugcuuugugucgcacuguugggcuucaucaugugggccugccagaaagggaauauacgguguaacauuugcaucuga

SEQ ID NO: 141411 - RNA, 1701 nt, Artificial Sequence; identical to SEQ ID NO: 141033
  derived and/or modified CDS sequence (opt3) from hemagglutinin__InfluenzaA__ALE31852

SEQ ID NO: 141412 - RNA, 1701 nt, Artificial Sequence
  derived and/or modified CDS sequence (opt3) from hemagglutinin__InfluenzaA__ALE31853
augaagaccaucauugcccugagcuacauacucugccuuguguucacacagaaaauccccggcaacgacaauuccacugcuacgcuguguuuggggcaccaugcagucccuaacggaaccauuguuaagacaaucacuaaugauagaauugaggugaccaacgccacagaauuaguacaaaauucuucaaucggugagauaugcgacaguccacaccagauccuggauggcgaaaacuguacccuaauugacgcgcuccugggggauccgcagugcgacggauuucagaauaaaaagugggaucuuuucguggagaggagcaaggcuuauuccaacuguuaccccuaugacgucccugauuacgccucucugcggucguugguggcaucaagcggcacucucgaauuuaauaacgagaguuucaauuggacagguguuacccaaaacgggacguccucugccugcauccgccgaagcuccucaaguuucuucagccgucugaauuggcugacucaucucaacuauaccuacccagcuuuaaaugugacaaugcccaacaacgagcaguuugacaaacuguauauuuggggaguccaccauccuggcacugauaaggaccagaucuuccuuuacgcacagucuuccggcagaauaaccgugucaacaaaaaggagccaacaggccguaauuccaaauaucgggagucggccccgcauuagagauaucccuucuaggaucuccauuuacuggaccauaguuaagccaggagacaucuugcugauuaacagcacggguaaucuaaucgcuccgcggggcuauuuuaaaauacgcucggggaagucuuccauuaugcgaucagacgcccccaucggaaaauguaagagugaaugcaucacuccuaacggcagcauuccaaaugauaagcccuuccagaacgugaauagaaucacauacggugcguguccuagguaugucaaacacuccacccucaagcuggcaacugggaugcggaacgugccagagaaacagacacguggaauuuuuggcgccauagcuggcuucaucgaaaaugggugggagggaaugguggacgguugguacggcuuucgccaccaaaacucugaggggagaggacaggccgcagaucuuaagagcacccaggcugccauugaccaaaucaauggcaaacugaacagguugaucgguaagacgaaugaaaaauuccaucagauugagaaggaauuuucagaggucgaagggcggauacaggaucucgagaaguauguugaggacaccaaaaucgaucuguggaguuacaacgcggaauuacugguggcccucgagaaucagcacacaauugaccuuacugauuccgaaaugaacaagcuguuugagaaaaccaagaaacaauugcgagaaaacgcagaggacaugggcaauggaugcuucaagaucuaucauaagugugauaacgcuugcauuggcagcauccgcaaugggacauacgaccacaacguauacagagacgaggcccuaaauaacagguuucagauaaaaggaguggaacugaagucugguuauaaagauuggauccucuggauuucauucgcuaucaguugcuuucugcuuugugucgcccuguugggcuucauuaugugggcaugccagaaggggaauauccgguguaacauaugcauuuga

SEQ ID NO: 141413 - RNA, 1701 nt, Artificial Sequence
  derived and/or modified CDS sequence (opt3) from hemagglutinin__InfluenzaA__ALE31854
augaagaccaucauugcccugagcuacauacucugccuuguguucgcucagaaaauccccggcaacgacaauuccacagcaacucuguguuuggggcaccaugccgucccuaacggaacgauuguuaagaccaucacaaaugauagaauugaggugacuaacgcgaccgaauuaguacaaaauucuucaaucggugagauaugcgacaguccacaccagauccuggauggcgaaaacuguacacuaauugacgcucuccugggggauccgcagugcgacggauuucagaauaaaaagugggaucuuuucguggagaggagcaaagccuauuccaacuguuaccccuaugacgucccugauuacgcaucucugcggucguugguggccucaagcggcacccucgaauuuaauaacgagaguuucaauuggacugguguuacacaaaacgggaccuccucugcuugcauccgccgaagcuccucaaguuucuucagccgucugaauuggcugacgcaucucaacuauacuuacccagcauuaaaugugaccaugcccaacaacgagcaguuugacaagcuguauauuuggggaguccaccauccuggcacagauaaggaccagaucuuccuuuacgccagaucuuccggcaggauaacugugucaaccaaagggagccagcaagcuguaauuccaaauaucggaagucggccccgcauuagagauaucccuucuaggaucuccauuuacuggacaauaguuaagccaggugacaucuugcugauuaacagcaccggcaaucuaaucgccccgcggggguauuuuaaaauacgcucgggaaagucuuccauuaugcgaucagacgcgcccaucggcagauguaaaagugaaugcaucacgccuaacgguagcauuccaaaugauaagcccuuccagaacgugaauaggaucacuuacggggcauguccucgguaugucaagcacuccacacucaaacuggccaccggaaugcguaacgugccagagaagcagacucgcggcauuuuuggcgcuauagccggguucaucgaaaauggaugggaggguaugguggacggcugguacggguuuagacaccagaacucugagggaaggggccaagcagcugaucuuaaaagcacacaggccgcgauugaccagaucaaugguaagcugaaccgguugaucgggaaaaccaaugaaaaguuccaucaaauugagaaagaauuuucagaggucgaaggccgaauacaggaucucgagaaguauguugaggacacgaagaucgaucuguggaguuacaacgccgaauuacugguggcacucgagaaucagcacaccauugaccuuacagauuccgaaaugaacaaacuguuugagaagacuaaaaagcaguugcgcgaaaacgcugaggacaugggaaauggcugcuucaaaaucuaucauaagugugauaacgccugcauugggagcaucagaaauggaaccuacgaccacaacguauacagggacgaggcucuaaauaaccgguuucaaauaaaggguguggaacugaaaucuggcuauaaggauuggauccucuggauuucauucgccaucaguugcuuucugcuuugugucgcacuguugggguucauuaugugggccugccagaaaggaaauauccgcuguaacauaugcauuuga

SEQ ID NO: 141414 - RNA, 1701 nt, Artificial Sequence; identical to SEQ ID NO: 141175
  derived and/or modified CDS sequence (opt3) from hemagglutinin__InfluenzaA__ALE31855

SEQ ID NO: 141415 - RNA, 1701 nt, Artificial Sequence; identical to SEQ ID NO: 140489
  derived and/or modified CDS sequence (opt3) from hemagglutinin__InfluenzaA__ALE31856

SEQ ID NO: 141416 - RNA, 1701 nt, Artificial Sequence; identical to SEQ ID NO: 140489
  derived and/or modified CDS sequence (opt3) from hemagglutinin__InfluenzaA__ALE31857

SEQ ID NO: 141417 - RNA, 1701 nt, Artificial Sequence
  derived and/or modified CDS sequence (opt3) from hemagglutinin__InfluenzaA__ALE31858
augaagaccaucauugcccugagcuacauacucugccuuguguucgcucagaaaauccccggcaacgacaauuccacagcaacucuguguuuggggcaccaugccgucccuaacggaacgauuguuaagaccaucacaaaugauagaauugaggugacuaacgcgaccgaauuaguacaaaauucuucaaucggugagauaugcgacaguccacaccagauccuggauggcgaaaacuguacacuaauugacgcucuccugggggauccgcagugcgacggauuucagaauaaaaagugggaucuuuucguggagaggagcaaagccuauuccaacuguuaccccuaugacgucccugauuacgcaucucugcggucguugguggccucaagcggcacccucgaauuuaauaacgagaguuucaauuggacugguguuacacaaaacgggaccuccucugcuugcauccgccgaagcuccucaaguuucuucagccgucugaauuggcugacgcaucucaaguauacuuacccagcauuaaacgugaccaugcccaauaacgagcaguuugacaagcuguauauuuggggaguccaccauccuggcacagauaaagaccagaucuuccuuuacgcccagucuuccggcagaauaacugugucaaccaagaggagccaacaggcuguaauuccaaacaucgggagucggccccgcauuagagauaucccuucuaggaucuccauuuacuggacaauaguuaaaccaggagacaucuugcugauuaauagcaccgguaaccuaaucgccccgcggggcuauuuuaagauacgcucggggaaaucuuccauuaugcgaucagacgcgcccaucggaaaguguaagagugaaugcaucacgccuaauggcagcauuccaaacgauaaacccuuccagaaugugaacagaaucacuuacggugcauguccuagguaugucaagcacuccacacucaaacuggccaccgggaugcggaaugugccagagaagcagacucguggaauuuuuggcgcuauagccggcuucaucgaaaacgggugggagggaaugguggacgguugguacggcuuucgccaccaaaauucugaggggagaggacaggcagcugaucuuaaaagcacacaggccgcgauugaccaaaucaacggcaagcugaauagguugaucgguaaaaccaacgaaaaguuccaucagauugagaaggaauuuucagaggucgaagggcggauacaggaucucgagaaauauguugaggacacgaagaucgaucuguggaguuacaaugccgaauuacugguggcacucgagaaccagcacaccauugaccuuacagauuccgaaaugaauaaacuguuugagaagacuaaaaagcaauugcgagaaaacgcugaggacaugggcaacggaugcuucaagaucuaucauaaaugugauaaugccugcauuggcagcauccgcaacgggaccuacgaccacaauguauacagagacgaggcucuaaacaauagguuucagauaaagggaguggaacugaaaucugguuauaaggauuggauccucuggauuucauucgccaucaguugcuuucugcuuugugucgcacuguugggcuucauuaugugggccugccagaaagggaacauccgguguaauauaugcauuuga

SEQ ID NO: 141418 - RNA, 1701 nt, Artificial Sequence
  derived and/or modified CDS sequence (opt3) from hemagglutinin__InfluenzaA__ALE31859
augaagaccaucauugcccugagcuacauacucugccuuguguucgcucagaaaauccccggcaacgacaauuccacagcaacucuguguuuggggcaccaugccgucccuaacggaacgauuguuaagaccaucacaaaugauagaauugaggugacuaacgcgaccgaauuaguacaaaauucuucaaucggugagauaugcgacaguccacaccagauccuggauggcgaaaacuguacacuaauugacgcucuccugggggauccgcagugcgacggauuucagaauaaaaagugggaucuuuucguggagaggagcaaagccuauuccaacuguuaccccuaugacgucccugauuacgcaucucugcggucguugguggccucaagcggcacccucgaauuuaauaacgagaguuucaauuggacugguguuacacaaaacgggaccuccucugcuugcacgcgccgaagcuccucaaguuucuucagccgucugaauuggcugacucaucucaacuauaccuacccagcauuaaaugugacaaugcccaacaacgagcaguuugacaagcuguauaucuggggaguccaccauccuggcacugauaaggaccagauuuuccuuuacgcccagucuuccggcagaaucaccgugucaacaaaaaggagccaacaggcuguaauaccaaauauugggagucggccccgcaucagagauauuccuucuaggaucuccaucuacuggaccauuguuaagccaggagacauguugcugauaaacagcacggguaaucuaaucgccccgcggggcuauuuuaaaauucgcucggggaagucuuccaucaugcgaucagacgcgcccauaggaaaauguaagagugaaugcauuacuccuaacggcagcaucccaaaugauaagcccuuccagaacgugaauagaaucacauacggugcauguccuagguaugucaaacacuccacccucaagcuggccacugggaugcggaacgugccagagaaacagacacguggaauuuuuggcgcuaucgccggcuucauugaaaaugggugggagggaaugguggacgguugguacggcuuucgccaccaaaacucugaggggagaggacaggcagcugaucuuaagagcacccaggccgcgauagaccaaaucaauggcaaacugaacagguugauugguaagacgaaugaaaaauuccaucagaucgagaaggaauuuucagaggucgaagggcggauccaggaucucgagaaguauguugaggacaccaaaauugaucuguggaguuacaacgccgaauuacugguggcacucgagaaucagcacacaauagaccuuacugauuccgaaaugaacaagcuguuugagaaaaccaagaaacaauugcgagaaaacgcugaggacaugggcaauggaugcuucaagaucuaucauaagugugauaacgccugcauuggcagcauccgcaaugggacauacgaccacaacguauacagagacgaggcucuaaauaacagguuucagauuaaaggaguggaacugaagucugguuauaaagauuggauccucuggauaucauucgccaucaguugcuuucugcuuugugucgcacuguugggcuucauuaugugggccugccagaaggggaauauccgguguaacauuugcaucuga

SEQ ID NO: 141419 - RNA, 1701 nt, Artificial Sequence
  derived and/or modified CDS sequence (opt3) from hemagglutinin__InfluenzaA__ALE31860
augaagaccaucauugcccugagcuacauacucugccuuguguucgcucagaaaauccccggcaacgacaauuccacagcaacucuguguuuggggcaccaugccgucccuaacggaacgauuguuaagaccaucacaaaugauagaauugaggugacuaacgcgaccgaauuaguacaaaauucuucaaucgguaaaauaugcgacaguccacaccagauccuggauggcgagaacuguacacuaauugacgcucuccugggggauccgcagugcgacggauuucagaauaagaaaugggaucuuuucguggaaaggagcaaggccuauuccaacuguuaccccuaugacgucccugauuacgcaucucugcggucguugguggccucaagcggcacccucgaguuuaauaacgaaaguuucaauuggacugguguuacacaaaacgggaccuccucugcuugcauccgccgaagcuccucaaguuucuucagccgucugaauuggcugacgcaucucaacuauacuuacccagcauuaaaugugaccaugcccaacaacgagcaguuugacaagcuguauauuuggggaguccaccauccuggcacagauaaagaccagaucuuccuuuacgcccagucuuccggcagaauaacugugucaaccaagaggagccaacaggcuguaauuccaaauaucgggagucggccccgcauuagagauaucccuucuaggaucuccauuuacuggacaauaguuaaaccaggagacaucuugcugauuaacagcaccgguaaucuaaucgccccgcggggcuauuuuaagauacgcucgggggagucuuccauuaugcgaucagacgcgcccaucggaaaauguaagagugaaugcaucacgccuaacggcagcauuccaaaugauaagcccuuccagaacgugaauagaaucacuuacggugcauguccuagguaugucaaacacuccacacucaagcuggccaccgggaugcggaacgugccagagaaacagacucguggaauuuuuggcgcuauagccggcuucaucgaaaaugggugggagggaaugguggacgguugguacggcuuucgccaccaaaacucugaggggagaggacaggcagcugaucuuaagagcacacaggccgcgauugaccaaaucaauggcaaacugaacagguugaucgguaagaccaaugaaaaauuccaucagauugagaaggaauuuucagaggucgaagggcggauacaggaucucgagaaguauguugaggacacgaaaaucgaucuguggaguuacaacgccgaauuacugguggcacucgagaaucagcacaccauugaccuuacagauuccgaaaugaacaagcuguuugagaaaacuaagaaacaauugcgagaaaacgcugaggacaugggcaauggaugcuucaagaucuaucauaagugugauaacgccugcauuggcagcauccgcaaugggaccuacgaccacaacguauacagagacgaggcucuaaauaacagguuucagauaaaaggaguggaacugaagucugguuauaaagauuggauccucuggauuucauucgccaucaguugcuuucugcuuugugucgcacuguugggcuucauuaugugggccugccagaaggggaauauccgguguaacauaugcauuuga

SEQ ID NO: 141420 - RNA, 1701 nt, Artificial Sequence; identical to SEQ ID NO: 140489
  derived and/or modified CDS sequence (opt3) from hemagglutinin__InfluenzaA__ALE31861

SEQ ID NO: 141421 - RNA, 1701 nt, Artificial Sequence
  derived and/or modified CDS sequence (opt3) from hemagglutinin__InfluenzaA__ALE31862
augaagaugaucauugcccugagcuacauacucugccuuguguucgcucagaaaauccccggcaacgacaauuccaccgcaacacuguguuuggggcaccaugccgucccuaacggaacuauuguuaagacgaucaccaaugauagaauugaggugacaaacgcgacugaauuaguacaaaauucuucaaucggugagauaugcgacaguccacaccagauccuggauggcgaaaacuguacccuaauugacgcucuccugggggauccgcagugcgacggauuucagaauaaaaagugggaucuuuucguggagaggagcaaagccuauuccaacuguuaccccuaugacgucccugauuacgcaucucugcggucguugguggccucaagcggcacacucgaauuuaauaacgagaguuucaauuggaccgguguuacucaaaacgggacauccucugcuugcauccgcaagagcuccucaaguuucuucagccgacugaauuggcugacccaucucaacuauacguacccagcauuaaaugugacuaugcccaacaacgagcaguuugacaagcuguauauuuggggaguccaccauccuggcaccgauaaagaccagaucuuccuuuacgcccguucuuccggcagaauaacagugucaacuaagaggagccagcaagcuguaauuccaaauaucgggagucggccccgcauuagagauaucccuucuaggaucuccauuuacuggaccauaguuaaaccaggagacaucuugcugauuaacagcacagguaaucuaaucgccccgcggggcuauuuuaagauacgcucggggaaaucuuccauuaugcgaucagacgcgcccaucggaaaguguaagagugaaugcaucaccccuaacggcagcauuccaaaugauaaacccuuccagaacgugaauagaaucacguacggugcauguccuagguaugucaagcacuccacucucaaacuggccacagggaugcggaacgugccagagaagcagacccguggaauuuuuggcgcuauagccggcuucaucgaaaaugggugggagggaaugguggacgguugguacggcuuucgccaccagaacucugaggggagaggacaagcagcugaucuuaaaagcacucaggccgcgauugaccagaucaauggcaagcugaacagguugaucgguaaaacaaaugaaaaguuccaucaaauugagaaggaauuuucagaggucgaagggcggauacaggaucucgagaaauauguugaggacaccaagaucgaucuguggaguuacaacgccgaauuuuuaguggcacuggagaaucagcacacgauugaccucaccgauuccgaaaugaacaaacuuuucgagaagacuaaaaagcagcugcgagaaaacgcugaggacaugggcaauggaugcuuuaagaucuaucauaaaugugauaacgccugcauuggcagcauccgcaaugggacauacgaccacaacguauacagagacgaggcuuugaauaacagguuccaaauaaagggaguggaacuaaaaucugguuauaaggauuggauccuguggauuucauuugccaucaguugcuuccuccugugugucgcacuucugggcuuuauuaugugggccugccagaaagggaauauccgguguaacauaugcauuuga

SEQ ID NO: 141422 - RNA, 1701 nt, Artificial Sequence; identical to SEQ ID NO: 141147
  derived and/or modified CDS sequence (opt3) from hemagglutinin__InfluenzaA__ALE31863

SEQ ID NO: 141423 - RNA, 1701 nt, Artificial Sequence; identical to SEQ ID NO: 141147
  derived and/or modified CDS sequence (opt3) from hemagglutinin__InfluenzaA__ALE31865

SEQ ID NO: 141424 - RNA, 1701 nt, Artificial Sequence; identical to SEQ ID NO: 141147
  derived and/or modified CDS sequence (opt3) from hemagglutinin__InfluenzaA__ALE31866

SEQ ID NO: 141425 - RNA, 1701 nt, Artificial Sequence
  derived and/or modified CDS sequence (opt3) from hemagglutinin__InfluenzaA__ALE31867
augaagaccaucauugcccugagcuacauacucugccuuguguucgcucagaaaauccccggcaacgacaauuccacagcaacucuguguuuggggcaccaugccgucccuaacggaacgauuguuaagaccaucacaaaugauagaauugaggugacuaacgcgaccgaauuaguacaaaauucuucaaucggugagauaugcgacaguccacaccagauccuggauggcgaaaacuguacacuaauugacgcucuccugggggauccgcagugcgacggauuucagaauaaaaagugggaucuuuucguggagaggagcaaagccuauuccaacuguuaccccuaugacgucccugauuacgcaucucugcggucguugguggccucaagcggcacccucgaauuuaauaacgagaguuucaauuggacugguguuacacaaaacgggaccuccucugcuugcauccgcaagagcuccucaaguuucuucagccgacugaauuggcugacgcaucucaacuauacuuacccagcauuaaaugugaccaugcccaacaacgagcaguuugacaagcuguauauuuggggaguccaccauccuggcacagauaaagaccagaucuuccuuuacgcccguucuuccggcagaauaacugugucaaccaagaggagccagcaagcuguaauuccaaauaucgggagucggccccgcauuagagauaucccuucuaggaucuccauuuacuggacaauaguuaaaccaggagacaucuugcugauuaacagcaccgguaaucuaaucgccccgcggggcuauuuuaagauacgcucggggaaaucuuccauuaugcgaucagacgcgcccaucggaaaguguaagagugaaugcaucacgccuaacggcagcauuccaaaugauaaacccuuccagaacgugaauagaaucacuuacggugcauguccuagguaugucaagcacuccacacucaaacuggccaccgggaugcggaacgugccagagaagcagacucguggaauuuuuggcgcuauagccggcuucaucgaaaaugggugggagggaaugguggacgguugguacggcuuucgccaccagaacucugaggggagaggacaagcagcugaucuuaaaagcacacaggccgcgauugaccagaucaauggcaagcugaacagguugaucgguaaaaccaaugaaaaguuccaucaaauugagaaggaauuuucagaggucgaagggcggauacaggaucucgagaaauauguugaggacacgaagaucgaucuguggaguuacaacgccgaauuacugguggcacucgagaaucagcacaccauugaccuuacagauuccgaaaugaacaaacuguuugagaagacuaaaaagcaguugcgagaaaacgcugaggacaugggcaauggaugcuucaagaucuaucauaaaugugauaacgccugcauuggcagcauccgcaaugggaccuacgaccacaacguauacagagacgaggcucuaaauaacagguuucaaauaaagggaguggaacugaaaucugguuauaaggauuggauccucuggauuucauucgccaucaguugcuuucugcuuugugucgcacuguugggcuucauuaugugggccugccagaaugggaacauccgguguaauauaugcauuuga

SEQ ID NO: 141426 - RNA, 1701 nt, Artificial Sequence; identical to SEQ ID NO: 140489
  derived and/or modified CDS sequence (opt3) from hemagglutinin__InfluenzaA__ALE31868

SEQ ID NO: 141427 - RNA, 1701 nt, Artificial Sequence; identical to SEQ ID NO: 141425
  derived and/or modified CDS sequence (opt3) from hemagglutinin__InfluenzaA__ALE31869

SEQ ID NO: 141428 - RNA, 1701 nt, Artificial Sequence; identical to SEQ ID NO: 141425
  derived and/or modified CDS sequence (opt3) from hemagglutinin__InfluenzaA__ALE31870

SEQ ID NO: 141429 - RNA, 1701 nt, Artificial Sequence
  derived and/or modified CDS sequence (opt3) from hemagglutinin__InfluenzaA__ALE31871
augaagaccaucauugcccugagcuacauacucugccuuguguucgcucagaaaauccccggcaacgacaauuccacagcaacucuguguuuggggcaccaugccgucccuaacggaacgauuguuaagaccaucacaaaugauagaauugaggugacuaacgcgaccgaauuaguacaaaauucuucaaucggugagauaugcaacaguccacaccagauccuggacggcgaaaauuguacacuaauugaugcucuccugggggacccgcagugcgauggauuucagaacaaaaagugggaccuuuucguggagaggagcaaagccuauuccaauuguuaccccuaugaugucccugacuacgcaucucugcggucguugguggccucaagcggcacccucgaauuuaacaaugagaguuucaacuggacugguguuacacaaaaugggaccuccucugcuugcauccgcaagagcuccucaaguuucuucagccgacugaacuggcugacgcaucucaauuauacuuacccagcauuaaacgugaccaugcccaacaaugagcaguuugauaagcuguauauuuggggaguccaccauccuggcacagacaaagaucagaucuuccuuuacgcccguucuuccggcagaauaacugugucaaccaagaggagccagcaagcuguaauuccaaacaucgggagucggccccgcauuagagacaucccuucuaggaucuccauuuacuggacaauaguuaaaccaggagauaucuugcugauuaauagcaccgguaaccuaaucgccccgcggggcuauuuuaagauacgcucggggaaaucuuccauuaugcgaucagacgcgcccaucggaaaguguaagagugaaugcaucacgccuaauggcagcauuccaaacgacaaacccuuccagaaugugaacagaaucacuuacggugcauguccuagguaugucaagcacuccacacucaaacuggccaccgggaugcggaaugugccagagaagcagacucguggaauuuuuggcgcuauagccggcuucaucgaaaacgggugggagggaaugguggaugguugguacggcuuucgccaccaaaauucugaggggagaggacaggcagcugaccuuaaaagcacacaggccgcgauugaucagaucaacggcaagcugaauagguugaucgguaaaaccaacgaaaaguuccaucaaauugagaaggaauuuucagaggucgaagggcggauacaggaccucgagaaauauguugaggauacgaagaucgaccuguggaguuacaaugccgaauuacugguggcacucgagaaccagcacaccauugaucuuacagacuccgaaaugaacaaacuguuugagaagacuaaaaagcaguugcgagaaaaugcugaggauaugggcaacggaugcuucaagaucuaucauaaaugugacaaugccugcauuggcagcauccgcaacgggaccuacgaucacaauguauacagagacgaggcucuaaacaauagguuucaaauaaagggaguggaacugaaaucugguuauaaggacuggauccucuggauuucauucgccaucaguugcuuucugcuuugugucgcacuguugggcuucauuaugugggccugccagaaagggaacauccgguguaauauaugcauuuga

SEQ ID NO: 141430 - RNA, 1701 nt, Artificial Sequence; identical to SEQ ID NO: 140475
  derived and/or modified CDS sequence (opt3) from hemagglutinin__InfluenzaA__ALE31872

SEQ ID NO: 141431 - RNA, 1701 nt, Artificial Sequence; identical to SEQ ID NO: 140489
  derived and/or modified CDS sequence (opt3) from hemagglutinin__InfluenzaA__ALE31873

SEQ ID NO: 141432 - RNA, 1701 nt, Artificial Sequence
  derived and/or modified CDS sequence (opt3) from hemagglutinin__InfluenzaA__ALE31874
augaagaccaucauugcccugagcuacauacucugccuuguguucgcucagaaacugcccggcaacgacaauuccgcagccacauuguguuuagggcaccaugcggucccuaacggaacuaucguuaagacgauuaccaaugauagaaucgaggugacaaacgcuacugaacugguacaaaauucuucaauuggugagaucugcgacaguccacaccagauacuagauggcgaaaacuguacccucaucgacgcccugcuuggggauccgcagugcgacggauuucagaauaaaaagugggaucuguucguggagaggagcaaagcacauuccaacuguuaucccuacgacgucccugauuaugccucuuugcggucgcucguggcuucaagcggcacacuggaauuuaauaacgagaguuucaauugggccgguguuacccaaaacgggacuuccucuagcugcauucgcggauccaauucaaguuucuucagccgacugaacuggcucacacacuuaaauucuaaguacccagcacugaacgugaccaugcccaacaaugagcaguuugacaaacuuuauaucuggggcguccaucacccuggcacggauaaggaccagauuuucuuguacgcucaguccucagggcguaucacugugagcaccaagagaagucaacaggccguaauaccaaacauuggaucuaggccccggauccgcgauauuccuuccagaaucagcaucuauuggacaauuguuaaaccaggugacauacugcuaaucaauucgacuggcaaccucauugcgccgaggggguacuuuaagauccggucuggaaaauccucaauaaugcgcagugacgcacccauuggcaaguguaagagcgaaugcaucaccccuaaugguuccaucccaaacgauaaacccuuccagaaugugaaccgaauuacauacggggccuguccuagauaugucaagcagucuacccugaaacuugcuacgggaaugaggaaugugccagagaagcaaacucggggcaucuuuggcgccauugcaggguucauagaaaacggaugggaggguaugguggacggcugguacggguuucgucaccagaauagcgagggacgcggccaggcugccgaucugaaaucaacacaagcggccaucgaccagauuaacgguaaguugaauagacucaucgggaaaaccaacgaaaaguuccaucagaucgagaaggaauuuagugaggucgaaggcaggauucaggaucuggagaaauauguugaggacacuaagauagauuuaugguccuacaaugcagaacugcucguggcucuugagaaccaacacacaaucgaccugaccgauagcgaaaugaacaaauuguuugagaagacgaaaaagcagcuacgggaaaaugccgaggacaugggaaacggcugcuucaagauuuaucauaaaugugauaaugcuugcaucgggucuauucgaaacggaaccuacgaccacgacguauaucgcgaugaggcccugaauaacagauuucagaucaaggguguggaacucaaaucaggcuacaaggacuggauacuguggaucaguuucgcaauuagcugcuuucuucugugugucgccuugcucggguucaucaugugggcuugccagaaaggaaauauuagguguaacaucugcauauga

SEQ ID NO: 141433 - RNA, 1701 nt, Artificial Sequence; identical to SEQ ID NO: 141432
  derived and/or modified CDS sequence (opt3) from hemagglutinin__InfluenzaA__ALE31875

SEQ ID NO: 141434 - RNA, 1701 nt, Artificial Sequence; identical to SEQ ID NO: 141432
  derived and/or modified CDS sequence (opt3) from hemagglutinin__InfluenzaA__ALE31876

SEQ ID NO: 141435 - RNA, 1701 nt, Artificial Sequence
  derived and/or modified CDS sequence (opt3) from hemagglutinin__InfluenzaA__ALE31877
augaagaccaucauugcccugagcuacauacucugccuuguguucgcucagaaacugcccgagaacgacaauuccacagcaacuuuguguuuaggccaccaugccgucccuaacgggacgaucguuaagaccauuacaucugauagaaucgaagugacuaaugcgaccgagcugguacaaaacucaaguauuggagaaaucugcgacagcccacaccagauacuagaugguaaaaauuguacacucaucgacgcucugcuuggcgauccgcagugcgacggguuucagaacaagaaaugggaucuguucguggagagguccaaggccuauucuaauuguuaccccuaugacgucccugauuacgcaucguugcggucacucguggccagcaguggaacccuggaauuuaacgacgaguccuucaauugggcuggcguuacucaaaacgguacaucuagcgcaugcauucgcggguccaauucaaguuucuuuagccgacugaacuggcucacccauucuaauuuuaaguauccagccuuaaacgugacgaugcccaauaacgagcaguucgauaaacuguacaucuggggaguccaccauccuggcacugacaaggaucagauuuuucuuuaugcucaguccucaggccguaucaccgugagcacaaaaagaagucaacaggccguaauaccaaacauugggucuaggccccggauccgcaauauuccuuccagaaucagcaucuacuggacuauuguuaagccaggagacauauugcugaucaacucgaccgguaaucuaauugcgccgaggggcuacuucaaaauccggucugggaaguccucaauaaugcgcagugacgcacccauuggaaaguguaaaagcgaaugcaucacaccuaacggcuccaucccaaaugauaagcccuuucagaacgugaaucgaauuaccuauggugccuguccuagauacgucaaacagucuacgcucaagcuggcuacugggaugaggaacgugccagagaaacaaacacggggaaucuucggcgccauugcaggcuuuauagaaaaugggugggagggaaugaaggacgguugguauggcuuccgucaccagaacagcgaggggcgcggacaggcugccgaucuuaaaucaacccaagcggccaucgaccagauuaauggcaagcugaacagauugaucgguaagacuaaugaaaaauuccaccagaucgagaaggaauuuagugagguggaagggaggauucaggaucucgagaaauacgucgaggacacaaagauagaucugugguccuauaacgcagaauuacugguugcucucgagaaucaacauaccaucgaccuuacggauagcgaaauuaacaaacuguucgagaagaccaagaaacaguugcgggaaaacgccgaggacaugggcaauggaugcuuuaagaucuaccacaaaugugauaacgcuugcauuggcucuauccgaaaugggacauaugaccaugacguguaccgcgaugaggcccuaaacaauagauuccagauaaagggaguagaacugaaaucagguuacaaggacuggauccucuggauuaguuuugcaaucagcugcuuccugcuuuguguggcccuguugggcuuuauuaugugggcuugccagaaggggaacaucagguguaauauaugcauuuga

SEQ ID NO: 141436 - RNA, 1701 nt, Artificial Sequence; identical to SEQ ID NO: 140489
  derived and/or modified CDS sequence (opt3) from hemagglutinin__InfluenzaA__ALE31878

SEQ ID NO: 141437 - RNA, 1701 nt, Artificial Sequence; identical to SEQ ID NO: 140489
  derived and/or modified CDS sequence (opt3) from hemagglutinin__InfluenzaA__ALE31879

SEQ ID NO: 141438 - RNA, 1701 nt, Artificial Sequence; identical to SEQ ID NO: 140489
  derived and/or modified CDS sequence (opt3) from hemagglutinin__InfluenzaA__ALE31880

SEQ ID NO: 141439 - RNA, 1701 nt, Artificial Sequence
  derived and/or modified CDS sequence (opt3) from hemagglutinin__InfluenzaA__ALE31881
augaagaccaucauugcccugagccacauacucugccuuguguucgcucagaaaauccccggcaacgacaauuccacagcaacucuguguuuggggcaucacgccgucccuaacggaacgauuguuaagaccaucacaaaugauagaauugaggugacuaacgcgaccgaauuaguacaaaauucuucaaucggugagauaugcgacaguccacaucagauccuggauggcgaaaacuguacacuaauugacgcucuccugggggauccgcagugcgacggauuucagaauaaaaagugggaucuuuucguggagaggagcaaagccuacuccaacuguuaucccuacgacgucccugauuaugcaucucugcggucguugguggccucaagcggcacccucgaauuuaauaacgagaguuucaauuggacugguguuacacaaaacgggaccuccucugcuugcauccgccgaagcuccucaaguuucuucagccgucugaauuggcugacgcaccucaacuacacuuauccagcauuaaaugugaccaugcccaacaacgagcaguuugacaagcuguacauuuggggaguccaucacccuggcacagauaaggaccagaucuuccuuuaugcccagucuuccggcagaauaacugugucaaccaaaaggagccaacaggcuguaauuccaaauaucgggagucggccccgcauuagagauaucccuucuaggaucuccauuuacuggacaauaguuaagccaggagacaucuugcugauuaacagcaccgguaaucuaguggccccgcggggcuacuuuaaaauccgcucggggaagucuuccauaaugcgaucagacgcgcccauuggaaaauguaagagugaaugcaucacgccuaacggcagcaucccaaaugauaagcccuuccagaacgucaauagaauuacuuauggugcauguccuagguacgugaaacacuccacacucaagcuggccaccgggaugcggaacgugccagagaaacagacucguggaaucuuuggcgcuauugccggcuucauagaaaaugggugggagggaauggucgacgguugguauggcuuucgccaucaaaacucugaggggagaggacaggcagcugaucuuaagagcacacaggccgcgaucgaccaaauuaauggcaaacugaacagguugaucgguaagaccaaugaaaaauuccaccagaucgagaaggaauuuucagagguugaagggcggauucaggaucucgagaaguacguggaggacacgaaaauagaucuguggaguuauaacgccgaauuacugguagcacucgagaaucagcauaccaucgaccuuacagauuccgaaaugaacaagcuguuugagaaaacuaagaaacaauugcgagaaaacgcugaggacaugggcaauggaugcuucaagauuuaccacaagugugauaacgccugcaucggcagcauucgcaaugggaccuaugaccacaacguguacagagacgaggcucuaaauaacagguuucagaucaaaggaauagaacugaagucugguuacaaagauuggauccucuggauuucauucgccaucaguugcuuucugcuuugugucgcacuguugggcuucauuaugugggccugccagaaggggaauauccgguguaacauaugcauuuga

SEQ ID NO: 141440 - RNA, 1701 nt, Artificial Sequence; identical to SEQ ID NO: 140489
  derived and/or modified CDS sequence (opt3) from hemagglutinin__InfluenzaA__ALE31882

SEQ ID NO: 141441 - RNA, 1701 nt, Artificial Sequence; identical to SEQ ID NO: 140489
  derived and/or modified CDS sequence (opt3) from hemagglutinin__InfluenzaA__ALE31888

SEQ ID NO: 141442 - RNA, 1701 nt, Artificial Sequence; identical to SEQ ID NO: 140489
  derived and/or modified CDS sequence (opt3) from hemagglutinin__InfluenzaA__ALE31889

SEQ ID NO: 141443 - RNA, 1701 nt, Artificial Sequence; identical to SEQ ID NO: 141147
  derived and/or modified CDS sequence (opt3) from hemagglutinin__InfluenzaA__ALE31890

SEQ ID NO: 141444 - RNA, 1701 nt, Artificial Sequence; identical to SEQ ID NO: 141147
  derived and/or modified CDS sequence (opt3) from hemagglutinin__InfluenzaA__ALE31891

SEQ ID NO: 141445 - RNA, 1701 nt, Artificial Sequence; identical to SEQ ID NO: 140489
  derived and/or modified CDS sequence (opt3) from hemagglutinin__InfluenzaA__ALE31892

SEQ ID NO: 141446 - RNA, 1701 nt, Artificial Sequence; identical to SEQ ID NO: 140489
  derived and/or modified CDS sequence (opt3) from hemagglutinin__InfluenzaA__ALE31893

SEQ ID NO: 141447 - RNA, 1701 nt, Artificial Sequence; identical to SEQ ID NO: 141095
  derived and/or modified CDS sequence (opt3) from hemagglutinin__InfluenzaA__ALE31894

SEQ ID NO: 141448 - RNA, 1701 nt, Artificial Sequence; identical to SEQ ID NO: 140475
  derived and/or modified CDS sequence (opt3) from hemagglutinin__InfluenzaA__ALE31895

SEQ ID NO: 141449 - RNA, 1701 nt, Artificial Sequence; identical to SEQ ID NO: 140489
  derived and/or modified CDS sequence (opt3) from hemagglutinin__InfluenzaA__ALE31896

SEQ ID NO: 141450 - RNA, 1701 nt, Artificial Sequence; identical to SEQ ID NO: 140489
  derived and/or modified CDS sequence (opt3) from hemagglutinin__InfluenzaA__ALE31897

SEQ ID NO: 141451 - RNA, 1701 nt, Artificial Sequence; identical to SEQ ID NO: 140489
  derived and/or modified CDS sequence (opt3) from hemagglutinin__InfluenzaA__ALE31898

SEQ ID NO: 141452 - RNA, 1701 nt, Artificial Sequence
  derived and/or modified CDS sequence (opt3) from hemagglutinin__InfluenzaA__ALE31899
augaagaccaucauugcccugagcuacauacucugccuuguguucgcucagaaaauccccggcaacgacaauuccacagcaacucuguguuuggggcaccaugccgucccuaacggaacgauuguuaagaccaucacaaaugauagaauugaggugacuaacgcgaccgaauuaguacaaaauucuucaaucggugagauaugcgacaguccacaccagauccuggauggcgaaaacuguacacuaauugacgcucuccugggggauccgcagugcgacggauuucagaauaaaaagugggaucuuuucguggagaggagcaaagccuauuccaacuguuaccccuaugacgucccugauuacgcaucucugcggucguugguggccucaagcggcacccucgaauuuaauaacgagaguuucaauuggacugguguuacacaaaacgggaccuccucugcuugcauccgcaagagcuccucaaguuucuucagccgacugaauuggcugacgcaucucaacuauacuuacccagcauuaaaugugaccaugcccaacaacgagcaguuugacaagcuguauauuuggggaguccaccauccuggcacagauaaagaccagaucuuccuuuacgcccguucuuccggcagaauaacugugucaaccaagaggagccagcaagcuguaauuccaaauaucgggagucggccccgcauuagagauaucccuucuaggaucuccauuuacuggacaauaguuaaaccaggagacaucuugcugauuaacagcaccgguaaucuaaucgccccgcggggcuauuuuaagauacgcucggggaaaucuuccaugaugcgaucagacgcgcccauuggaaaguguaagagugaaugcaucacgccuaacggcagcaucccaaaugauaaacccuuccagaacgugaauagaauuacuuacggugcauguccuagguaugucaagcacuccacacucaaacuggccaccgggaugcggaacgugccagagaagcagacucguggaaucuuuggcgcuauugccggcuucauagaaaaugggugggagggaaugguggacgguugguacggcuuucgccaccagaacucugaggggagaggacaagcagcugaucuuaaaagcacacaggccgcgaucgaccagauuaauggcaagcugaacagguugaucgguaaaaccaaugaaaaguuccaucaaaucgagaaggaauuuucagaggucgaagggcggauucaggaucucgagaaauauguugaggacacgaagauagaucuguggaguuacaacgccgaauuacugguggcacucgagaaucagcacaccaucgaccuuacagauuccgaaaugaacaaacuguuugagaagacuaaaaagcaguugcgagaaaacgcugaggacaugggcaauggaugcuucaagauuuaucauaaaugugauaacgccugcaucggcagcauucgcaaugggaccuacgaccacaacguauacagagacgaggcucuaaauaacagguuucaaaucaagggaguggaacugaaaucugguuauaaggauuggauacucuggaucucauucgccauuaguugcuuucugcuuugugucgcacuguugggcuucaucaugugggccugccagaaagggaauauucgguguaacaucugcauauga

SEQ ID NO: 141453 - RNA, 1701 nt, Artificial Sequence; identical to SEQ ID NO: 141095
  derived and/or modified CDS sequence (opt3) from hemagglutinin__InfluenzaA__ALE31901

SEQ ID NO: 141454 - RNA, 1701 nt, Artificial Sequence
  derived and/or modified CDS sequence (opt3) from hemagglutinin__InfluenzaA__ALE31902
augaagaccaucauugcccugagcuacauacucugccuuguguucgcucagaaaauccccggcaacgacaauuccacagcaacucuguguuuggggcaccaugccgucccuaacggaacgauuguuaagaccaucacaaaugauagaauugaggugacuaacgcgaccgaauuaguacaaaauucuucaaucggugagauaugcgacaguccacaccagauccuggauggcgaaaacuguacacuaauugacgcucuccugggggauccgcagugcgacggauuucagaauaaaaagugggaucuuuucguggagaggagcaaagccuauuccaacuguuaccccuaugacgucccugauuacgcaucucugcggucguugguggccucaagcggcacccucgaauuuaauaacgagaguuucaauuggacugguguuacacaaaacgggaccuccucugcuugcauccgccgaagcuccucaaguuucuucagccgucugaauuggcugacgcaucucaacuauacuuacccagcauuaaaugugaccaugcccaacaacgagcaguuugacaagcuguauauuuggggaguccaccauccuggcacagauaaggaccagaucuuccuuuacgcccagucuuccggcagaauaacugugucaaccaaaaggagccaacaggcuguaauuccaaauaucgggagucggccccgcauuagagauaucccuucuaggaucuccauuuacuggacaauaguuaagccaggagacaucuugcugauuaacagcaccgguaaucuaaucgccccgcggggcuauuuuaaaauacgcucggggaagucuuccauuaugcgaucagacgcgcccaucggaaaauguaagagugaaugcaucacgccuaacggcagcauuccaaaugauaagcccuuccagaacgugaauagaaucacuuacggugcauguccuagguaugucaaacacuccacacucaagcuggccaccgggaugcggaacgugccagagaaacagacucguggaauuuuuggcgcuauagccggcuucaucgaaaaugggugggagggaaugguggacgguugguacggcuuucgccaccaaaacucugaggggagaggacaggcagcugaucuuaagagcacacaggccgcgauugaccaaaucaauggcaaacugaacagguugaucgguaagaccaaugaaaaauuccaucagauugagaaggaauuuucagaggucgaagggcggauacaggaucucgagaaguauguugaggacacgaaaaucgaucuguggaguuacaacgccgaauuacugguggcacucgagaaucagcacaccauugaccuuacagauuccgaaaugaacaagcuguuugagcgaacuaaaaagcaauugcgcgaaaacgcugaggacaugggcaauggaugcuucaaaaucuaucauaagugugauaacgccugcauuggcagcaucagaaaugggaccuacgaccacaacguauacagggacgaggcucuaaauaaccgguuucagauaaagggaguggaacugaaaucugguuauaaggauuggauccucuggauuucauucgccaucaguugcuuucugcuuugugucgcacuguugggcuucauuaugugggccugccagaaagggaauauccgcuguaacauaugcauuuga

SEQ ID NO: 141455 - RNA, 1701 nt, Artificial Sequence; identical to SEQ ID NO: 140489
  derived and/or modified CDS sequence (opt3) from hemagglutinin__InfluenzaA__ALE31903

SEQ ID NO: 141456 - RNA, 1701 nt, Artificial Sequence; identical to SEQ ID NO: 140489
  derived and/or modified CDS sequence (opt3) from hemagglutinin__InfluenzaA__ALE31904

SEQ ID NO: 141457 - RNA, 1701 nt, Artificial Sequence
  derived and/or modified CDS sequence (opt3) from hemagglutinin__InfluenzaA__ALE31905
augaagaccaucauugcccugggcuacauacucugccuuggguucgcucagaaaauccccggaaacgacaauagcacagcaacucuguguuugggucaccaugccgugccuaacggcacgauugucaagaccaucacaaaugauagaauugagguuacuaacgcgaccgaauuagugcaaaauuccucuaucggggagauaugcgacucaccacacaaaauccuggauggagaaaacuguacacuaauugacgcucuccugggcgauccgcagugcgacgguuuucagaauaagaaaugggaucuuuucguagagaggaguaaggccuauagcaacuguuaccccuaugacgugccugauuacgcaucccugcggucuuuggucgccucgucagggacccucgaauuuaauaacgagagcuucaauuggacuggagugacacagaacggcaccaguuccgcuugcauccgccgaucuagcuccucauuuuucagucgucugaauuggcugacgcaucucaacuauacuuacccagcauuaaauguuaccaugcccaacaacgagcaauuugacaagcuguauauuuggggcgugcaccauccugggacagauaaagaccagaucuuccuuuacgcccagagcucuggaagaauaacugucuccaccaagaggucacagcaagcugugauuccaaauaucgguagccggccccgcauuagagauaucccuaguaggaucucuauuuacuggacaauaguaaaaccaggcgacaucuugcugauuaacuccaccgggaaucuaaucgccccgcggggauauuuuaagauacgcagcggcaaaucgucuauuaugcgauccgacgcgcccaucgguaaguguaagucagaaugcaucacgccuaacgggaguauuccaaaugauaaacccuuccagaacguuaauagaaucacuuacggagcauguccuagguaugugaagcacagcacacucaaacuggccaccggcaugcggaacgucccagagaagcagacucguggcauuuuuggggcuauagccggauucaucgaaaaugguugggagggcaugguggacgggugguacggauuucgccaccagaacuccgagggcagaggucaagcagcugaucuuaaaucuacacaggccgcgauugaccagaucaaugggaagcugaacagguugaucggcaaaaccaaugaaaaguuccaucaaauugagaaggaguucagcgaaguggaaggacggauacaggaucucgagaaauaugucgaggacacgaagaucgaucuguggucauacaacgccgaauuacugguugcacucgagaaucagcacaccauugaccuuacagauagugaaaugaacaaacuguuugagaagacuaaaaagcaguugcgagaaaacgcugaggacaugggcaaugggugcuucaagaucuaucauaaaugugauaacgccugcauuggauccauccgcaaugguaccuacgaccacaacguguacagagacgaggcucuaaauaacagguuucaaauaaagggcguagaacugaaaagcggguauaaggauuggauccucuggauuucuuucgccaucucaugcuuucugcuuuguguggcacuguugggauucauuaugugggccugccagaaaggcaauauccgguguaacauaugcauuuga

SEQ ID NO: 141458 - RNA, 1701 nt, Artificial Sequence; identical to SEQ ID NO: 140489
  derived and/or modified CDS sequence (opt3) from hemagglutinin__InfluenzaA__ALE31906

SEQ ID NO: 141459 - RNA, 1701 nt, Artificial Sequence
  derived and/or modified CDS sequence (opt3) from hemagglutinin__InfluenzaA__ALE31907
augaagaccaucauugcccugagcuacauacucugccuuguguucgcucagaaaauccccggcaacgacaauuccacagcaacucuguguuuggggcaccaugccgucccuaacggaacgauuguuaagaccaucacaaaugauagaauugaggugacuaacgcgaccgaauuaguacaaaauucuucaaucggugagauaugcgacaguccacaccagauccuggauggcgaaaacuguacacuaauugacgcucuccugggggauccgcagugcgacggauuucagaauaaaaagugggaucuuuucguggagaggagcaaagccuauuccaacuguuaccccuaugacgucccugauuacgcaucucugcggucguugguggccucaagcggcacccucgaauuuaauaacgagaguuucaauuggacugguguuacacaaaacgggaccuccucugcuugcauccgccgaagcuccucaaguuucuucagccgucugaauuggcugacgcaucucaacuauaaguacccagcauuaaaugugacuaugcccaacaacgagcaguuugacaagcuguauauuuggggaguccaccauccuggcaccgauaaagaccagaucuuccuuuacgcccagucuuccggcagaauaacagugucaacuaagaggagccaacaggcuguaauuccaaauaucgggagucggccccgcauuagagauaucccuucuaggaucuccauuuacuggaccauaguuaaaagcggagacaucuugcugauuaacucgacagguaaucuaaucgccccacggggcuauuuuaagauacgcucugggaaauccucaauuaugcgaagugacgcgccgaucggaaaguguaagagcgaaugcaucacccccaacggcuccauuccuaaugauaaaccauuccagaacgugaauagaaucacguacggugcaugucccagguaugucaagcacucuacucucaaacuggccacagggaugcggaacgugccugagaagcagacccguggaauuuuuggcgcuauagccggcuucaucgaaaaugggugggagggaaugguggacgguugguacggcuuucgccaccaaaacagcgaggggagaggacaggcagcugaucuuaaaucaacucaggccgcgauugaccaaaucaauggcaagcugaacagguugaucgguaaaacaaaugaaaaguuccaucagauugagaaggaauuuagugaggucgaagggcggauacaggaucucgagaaauauguugaggacaccaagaucgaucugugguccuacaacgccgaauuacugguggcacucgagaaucagcacacgauugaccuuaccgauagcgaaaugaacaaacuguuugagaagacuaaaaagcaauugcgagaaaacgcugaggacaugggcaauggaugcuucaagaucuaucauaaaugugauaacgccugcauuggcucuauccgcaaugggacauacgaccacaacguauacagagacgaggcucuaaauaacagguuucagauaaagggaguggaacugaaaucagguuauaaggauuggauccucuggauuaguuucgccaucagcugcuuucugcuuugugucgcacuguugggcuucauuaugugggccugccagaaagggaauauccgguguaacauaugcauuuga

SEQ ID NO: 141460 - RNA, 1701 nt, Artificial Sequence; identical to SEQ ID NO: 140489
  derived and/or modified CDS sequence (opt3) from hemagglutinin__InfluenzaA__ALE31908

SEQ ID NO: 141461 - RNA, 1701 nt, Artificial Sequence
  derived and/or modified CDS sequence (opt3) from hemagglutinin__InfluenzaA__ALE31909
augaagaccaucauugcccugagcuacauacucugccuuguguucgcucagaaaauccccggcaacgacaauuccacagcaacucuguguuuggggcaccaugccgucccuaacggaacgauuguuaagaccaucacaaaugauagaauugaggugacuaacgcgaccgaauuaguacaaaauucuucaaucggugagauaugcgacaguccacaccagauccuggauggcgaaaacuguacacuaauugacgcucuccugggggauccgcagugcgacggauuucagaauaaaaagugggaucuuuucguggagaggagcaaagccuauuccaacuguuaccccuaugacgucccugauuacgcaucucugcggucguugguggccucaagcggcacccucgaauuuaauaacgagaguuucaauuggacugguguuacacaaaacgggaccuccucugcuugcauccgccgaagcuccucaaguuucuucagccgucugaauuggcugacgcaucucaacuauacuuacccagcauuaaaugugaccaugcccaacaacgagcaguuugacaagcuguauauuuggggaguccaccauccuggcacagauaaggaccagaucuuccuuuacgcccagucuuccggcagaauaacugugucaaccaaaaggagccaacaggcuguaauuccaaauaucgggagucggccccgcauuagagauaucccuucuaggaucuccauuuacuggacaauaguuaagagcggagacaucuugcugauuaacucgaccgguaaucuaaucgccccacggggcuauuuuaaaauacgcucugggaaguccucaauuaugcgaagugacgcgccgaucggaaaauguaagagcgaaugcaucacgcccaacggcuccauuccuaaugauaagccauuccagaacgugaauagaaucacuuacggugcaugucccagguaugucaaacacucuacacucaagcuggccaccgggaugcggaacgugccugagaaacagacucguggaauuuuuggcgcuauagccggcuucaucgaaaaugggugggagggaaugguggacgguugguacggcuuucgccaccaaaacagcgaggggagaggacaggcagcugaucuuaagucaacacaggccgcgauugaccaaaucaauggcaaacugaacagguugaucgguaagaccaaugaaaaauuccaucagauugagaaggaauuuagugaggucgaagggcggauacaggaucucgagaaguauguugaggacacgaaaaucgaucugugguccuacaacgccgaauuacugguggcacucgagaaucagcacaccauugaccuuacagauagcgaaaugaacaagcuguuugagaaaacuaagaaacaauugcgagaaaacgcugaggacaugggcaauggaugcuucaagaucuaucauaagugugauaacgccugcauuggcucuauccgcaaugggaccuacgaccacaacguauacagagacgaggcucuaaauaacagguuucagauaaaaggaguggaacugaagucagguuauaaagauuggauccucuggauuaguuucgccaucagcugcuuucugcuuugugucgcacuguugggcuucauuaugugggccugccagaaggggaauauccgguguaacauaugcauuuga

SEQ ID NO: 141462 - RNA, 1701 nt, Artificial Sequence; identical to SEQ ID NO: 140489
  derived and/or modified CDS sequence (opt3) from hemagglutinin__InfluenzaA__ALE31910

SEQ ID NO: 141463 - RNA, 1701 nt, Artificial Sequence; identical to SEQ ID NO: 141412
  derived and/or modified CDS sequence (opt3) from hemagglutinin__InfluenzaA__ALE31912

SEQ ID NO: 141464 - RNA, 1701 nt, Artificial Sequence
  derived and/or modified CDS sequence (opt3) from hemagglutinin__InfluenzaA__ALE31913
augaagaccaucauugcccugggcuacauacucugccuuguguucgcucagaaaauccccgggaacgacaauagcacagcaacucuguguuugggacaccaugccgucccuaacgguacgauuguuaagaccaucacaaaugauagaauugaggugacuaacgcgaccgaauuaguacaaaauuccucuaucggcgagauaugcgacucaccacacaaaauccuggauggggaaaacuguacacuaauugacgcucuccugggagauccgcagugcgacggcuuucagaauaagaaaugggaucuuuucguggagaggaguaaggccuauagcaacuguuaccccuaugacgucccugauuacgcaucccugcggucuuugguggccucgucagguacccucgaauuuaauaacgagagcuucaauuggacugggguuacacagaacggaaccaguuccgcuugcauccgccgaucuagcuccucauuuuucagucgucugaauuggcugacgcaucucaacuauacuuacccagcauuaaaugugaccaugcccaacaacgagcaauuugacaagcuguauauuuggggcguccaccauccuggcacagauaaagaccagaucuuccuuuacgcccagagcucugggagaauaacuguguccaccaagaggucacagcaagcuguaauuccaaauaucggaagccggccccgcauuagagauaucccuaguaggaucucuauuuacuggacaauaguuaaaccaggugacaucuugcugauuaacuccaccggcaaucuaaucgccccgcggggguauuuuaagauacgcagcggaaaaucgucuauuaugcgauccgacgcgcccaucggcaaguguaagucagaaugcaucacgccuaacgguaguauuccaaaugauaaacccuuccagaacgugaauagaaucacuuacggggcauguccuagguaugucaagcacagcacacucaaacuggccaccggaaugcggaacgugccagagaagcagacucguggcauuuuuggcgcuauagccggguucaucgaaaauggaugggaggguaugguggacggcugguacggguuucgccaccagaacuccgagggaagaggccaagcagcugaucuuaaaucuacacaggccgcgauugaccagaucaaugguaagcugaacagguugaucgggaaaaccaaugaaaaguuccaucaaauugagaaggaguucagcgaagucgaaggccggauacaggaucucgagaaauauguugaggacacgaagaucgaucuguggucauacaacgccgaauuacugguggcacucgagaaucagcacaccauugaccuuacagauagugaaaugaacaaacuguuugagaagacuaaaaagcaguugcgagaaaacgcugaggacaugggaaauggcugcuucaagaucuaucauaaaugugauaacgccugcauugaguccauccgcaaugggaccuacgaccacaacguauacagagacgaagcucuaaauaacagguuucaaauaaagggaguggagcugaaaagcgguuauaaggauuggauccucuggauuucuuucgccaucucaugcuuucugcuuugugucgcacuguugggcuucauuaugugggccugccagaaagggaauauccgguguaacauaugcauuuga

SEQ ID NO: 141465 - RNA, 1701 nt, Artificial Sequence; identical to SEQ ID NO: 140489
  derived and/or modified CDS sequence (opt3) from hemagglutinin__InfluenzaA__ALE31914

SEQ ID NO: 141466 - RNA, 1701 nt, Artificial Sequence
  derived and/or modified CDS sequence (opt3) from hemagglutinin__InfluenzaA__ALE31915
augaagaccaucauugcccugagcuacauacucugccuuguguucgcucagaaaauccccggcaacgacaauuccacagcaacucuguguuuggggcaccaugccgucccuaacggaacgauuguuaagaccaucacaaaugauagaauugaggugacuaacgcgaccgaauuaguacaaaauucuucaaucggugagauaugcgacaguccacaccagauccuggauggcgaaaacuguacacuaauugacgcucuccugggggauccgcagugcgacggauuucagaauaaaaagugggaucuuuucguggagaggagcaaagccuauuccaacuguuaccccuaugacgucccugaauacgcaucucugcggucguugguggccucaagcggcacccucgaguuuaauaacgagaguuucaauuggacugguguuacacaaaacgggaccuccucugcuugcauccgccgaagcuccucaaguuucuuuagccgucugaauuggcugacgcaucucaacuauacuuacccagcauuaaaugugaccaugcccaacaacgaacaguuugauaagcuguauauuuggggaguccaccauccuggcacagacaaggaucagaucuuccuuuacgcccagucuuccggcagaauaacugugucaaccaaaaggagccaacaggcuguaauuccaaauaucgggagucggccccgcauuagagacaucccuucuaggaucuccauuuacuggacaauaguuaagccaggagauaucuugcugauuaacagcaccgguaaucuaaucgccccgcggggcuauuuuaaaauacgcucggggaagucuuccauuaugcgaucagacgcgcccaucggaaaauguaagagugagugcaucacgccuaacggcagcauuccaaaugacaagcccuuccagaacgugaauagaaucacuuacggugcauguccuagguaugucaaacacuccacacucaagcuggccaccgggaugcggaacgugccagaaaaacagacucguggaauuuuuggcgcuauagccggcuucaucgagaaugggugggagggaaugguggaugguugguacggcuuucgccaccaaaacucugaagggagaggacaggcagcugaccuuaagagcacacaggccgcgauugaucaaaucaauggcaaacugaacagguugaucgguaagaccaaugagaaauuccaucagauugaaaaggaguucucagaagucgaggggcggauacaggaccucgagaaguauguugaagauacgaaaaucgaccuguggaguuacaacgccgaguuacugguggcacucgaaaaucagcacaccauugaucuuacagacuccgagaugaacaagcuguuugagaaaacuaagaaacaauugcgagaaaacgcugaggauaugggcaauggaugcuucaagaucuaucauaagugugacaacgccugcauuggcagcauccgcaaugggaccuacgaucacaacguauacagagacgaagcucuaaauaacagguuucagauaaaaggaguggagcugaagucugguuauaaagacuggauccucuggauuucauucgccaucaguugcuuucugcuuugugucgcacuguugggcuucauuaugugggccugccagaaggggaauauccgguguaacauaugcauuuga

SEQ ID NO: 141467 - RNA, 1701 nt, Artificial Sequence; identical to SEQ ID NO: 140489
  derived and/or modified CDS sequence (opt3) from hemagglutinin__InfluenzaA__ALE31916

SEQ ID NO: 141468 - RNA, 1701 nt, Artificial Sequence; identical to SEQ ID NO: 140489
  derived and/or modified CDS sequence (opt3) from hemagglutinin__InfluenzaA__ALE31917

SEQ ID NO: 141469 - RNA, 1701 nt, Artificial Sequence; identical to SEQ ID NO: 141022
  derived and/or modified CDS sequence (opt3) from hemagglutinin__InfluenzaA__ALE31918

SEQ ID NO: 141470 - RNA, 1701 nt, Artificial Sequence; identical to SEQ ID NO: 141147
  derived and/or modified CDS sequence (opt3) from hemagglutinin__InfluenzaA__ALE31920

SEQ ID NO: 141471 - RNA, 1701 nt, Artificial Sequence; identical to SEQ ID NO: 140489
  derived and/or modified CDS sequence (opt3) from hemagglutinin__InfluenzaA__ALE31921

SEQ ID NO: 141472 - RNA, 1701 nt, Artificial Sequence; identical to SEQ ID NO: 140489
  derived and/or modified CDS sequence (opt3) from hemagglutinin__InfluenzaA__ALE31922

SEQ ID NO: 141473 - RNA, 1701 nt, Artificial Sequence; identical to SEQ ID NO: 141033
  derived and/or modified CDS sequence (opt3) from hemagglutinin__InfluenzaA__ALE31923

SEQ ID NO: 141474 - RNA, 1701 nt, Artificial Sequence; identical to SEQ ID NO: 140489
  derived and/or modified CDS sequence (opt3) from hemagglutinin__InfluenzaA__ALE31924

SEQ ID NO: 141475 - RNA, 1701 nt, Artificial Sequence; identical to SEQ ID NO: 140489
  derived and/or modified CDS sequence (opt3) from hemagglutinin__InfluenzaA__ALE31925

SEQ ID NO: 141476 - RNA, 1701 nt, Artificial Sequence
  derived and/or modified CDS sequence (opt3) from hemagglutinin__InfluenzaA__ALE31926
augaagaccaucauugcccugagcuacauacucugccuuguguucgcucagaaaauccccggcaacgacaauuccacagcaacucuguguuuggggcaccaugccgucccuaacggaacgauuguuaagaccaucacaaaugauagaauugaggugacuaacgcgaccgaauuaguacaaaauucuucaaucggugagauaugcgacaguccacaccagauccuggauggcgaaaacuguacacuaauugacgcucuccugggggauccgcagugcgacggauuucagaauaaaaagugggaucuuuucguggagaggagcaaagccuauuccaacuguuaccccuaugacgucccugauuacgcaucucugcggucguugguggccucaagcggcacccucgaauuuaauaacgaggguuucaauuggacugggguuacacaaaacggaaccaguuccgcuugcauccgccgaucuagcuccucauuuuucagucgucugaauuggcugacgcaucucaacuauaaguacccagcauuaaaugugacuaugcccaacaacgagcaguuugacaagcuguauauuuggggcguccaccauccuggcaccgauaaagaccagaucuuccuuuacgcccagagcucugggagaauaacaguguccacuaagaggucacaacaggcuguaauuccaaauaucggaagccggccccgcauuagagauaucccuaguaggaucucuauuuacuggaccauaguuaaaccaggugacaucuugcugauuaacuccacaggcaaucuaaucgccccgcggggguauuuuaagauacgcagcggaaaaucgucuauuaugcgauccgacgcgcccaucggcaaguguaagucagaaugcaucaccccuaacgguaguauuccaaaugauaaacccuuccagaacgugaauagaaucacguacggggcauguccuagguaugucaagcacagcacucucaaacuggccacaggaaugcggaacgugccagagaagcagacccguggcauuuuuggcgcuauagccggguucaucgaaaauggaugggaggguaugguggacggcugguacggguuucgccaccaaaacuccgagggaagaggccaggcagcugaucuuaaaucuacucaggccgcgauugaccaaaucaaugguaagcugaacagguugaucgggaaaacaaaugaaaaguuccaucagauugagaaggaguucagcgaagucgaaggccggauacaggaucucgagaaauauguugaggacaccaagaucgaucuguggucauacaacgccgaauuacugguggcacucgagaaucagcacacgauugaccuuaccgauagugaaaugaacaaacuguuugagaagacuaaaaagcaauugcgagaaaacgcugaggacaugggaaauggcugcuucaagaucuaucauaaaugugauaacgccugcauuggguccauccgcaauggaacauacgaccacaacguauacagagacgaggcucuaaauaacagguuucagauaaaggguguggaacugaaaagcggcuauaaggauuggauccucuggauuucuuucgccaucucaugcuuucugcuuugugucgcacuguugggguucauuaugugggccugccagaaaggaaauauccgguguaacauaugcauuuga

SEQ ID NO: 141477 - RNA, 1701 nt, Artificial Sequence; identical to SEQ ID NO: 140489
  derived and/or modified CDS sequence (opt3) from hemagglutinin__InfluenzaA__ALE31927

SEQ ID NO: 141478 - RNA, 1701 nt, Artificial Sequence
  derived and/or modified CDS sequence (opt3) from hemagglutinin__InfluenzaA__ALE31928
augaagaccaucauugcccugagcuacauacucugccuuguguucgcucagaaacugcccggcaacgacaauuccacagcaacuuuguguuuagggcaccaugccgucccuaacggaacgaucguuaagaccauuacaaaugauagaaucgaggugacuaacgcgaccgaacugguacaaaauucuucaauuggugagaucugcgacaguccacaccagauacuagauggcgaaaacuguacacucaucgacgcucugcuuggggauccgcagugcgacggauuucagaauaaaaagugggaucuguucguggagaggagcaaagccuauuccaacuguuaccccuaugacgucccugauuacgcaucuuugcggucgcucguggccucaagcggcacccuggaauuuaauaacgagaguuucaauugggcugguguuacucaaaacgggacauccucugcaugcauucgcggaagcaauuccucauuuuucagucgacugaacuggcucacccauagcaauuuuaaguauccagccuuaaacgugacgaugcccaacaaugagcaguucgacaagcuguacaucuggggcguccaccauccuggcacugauaaagaccagauuuuucuuuaugcucagucuuccgggcguaucaccgugucaacaaagagaagccaacaggccguaauaccaaacauuggaaguaggccccggauccgcgauauuccuucuagaaucuccaucuacuggacuauuguuaaaccaggugacauauugcugaucaauagcaccggcaaccuaauugcgccgaggggguacuucaagauccggucgggaaaaucuuccauaaugcgcucagacgcacccauuggcaaguguaagagugaaugcaucacaccuaaugguagcaucccaaacgauaaacccuuucagaaugugaaccgaauuaccuauggggccuguccuagauacgucaagcaguccacgcucaaacuggcuacuggaaugaggaaugugccagagaagcaaacacggggcaucuucggcgccauugcaggguuuauagaaaacggaugggaggguaugguggacggcugguauggguuccgucaccaaaauucugagggacgcggccaggcugccgaucuuaaaagcacccaggcggccaucgaccagauuaacgguaagcugaauagauugaucgggaaaacuaacgaaaaguuccaccagaucgagaaggaauuuucagaggucgaaggcaggauucaggaucucgagaaauacguugaggacacaaagauagaucuguggaguuauaaugcagaauuacugguggcucucgagaaccaacauaccaucgaccuuacggauuccgaaaugaacaaacuguucgagaagaccaaaaagcaguugcgggaaaaugccgaggacaugggaaacggcugcuuuaagauuuaccacaaaugugauaaugcuugcaucgggagcauucgaaacggaacauaugaccaugacguauaccgcgaugaggcccuaaauaacagauuccagaucaaggguguggaacugaaaucuggcuacaaggacuggauacucuggaucucauuugcaauuaguugcuuccugcuuugugucgcccuguugggguuuaucaugugggcuugccagaaaggaaauauuagguguaacaucugcauauga

SEQ ID NO: 141479 - RNA, 1701 nt, Artificial Sequence; identical to SEQ ID NO: 141125
  derived and/or modified CDS sequence (opt3) from hemagglutinin__InfluenzaA__ALE31930

SEQ ID NO: 141480 - RNA, 1701 nt, Artificial Sequence; identical to SEQ ID NO: 140489
  derived and/or modified CDS sequence (opt3) from hemagglutinin__InfluenzaA__ALE31931

SEQ ID NO: 141481 - RNA, 1701 nt, Artificial Sequence; identical to SEQ ID NO: 140489
  derived and/or modified CDS sequence (opt3) from hemagglutinin__InfluenzaA__ALE31932

SEQ ID NO: 141482 - RNA, 1701 nt, Artificial Sequence
  derived and/or modified CDS sequence (opt3) from hemagglutinin__InfluenzaA__ALE31933
augaagaccaucauugcccugagcuacauacucugccuuguguaugcucagaaaauccccggcaacgacaauuccacagcaacucuguguuuggggcaccaugccgucccuaacggaacgauuguuaagaccaucacaaaugauagaauugaggugacuaacgcgaccgaauuaguacaaaauucuucaaucggugagauaugcgacaguccacaccagauccuggauggcgaaaacuguacacuaauugacgcucuccugggggauccgcagugcgacggauuccagaauaaaaagugggaucuuuuuguggagaggagcaaagccuacuccaacuguuaucccuacgacgucccugauuaugcaucucugcggucguugguggccucaagcggcacccucgaguucaauaacgaaaguuuuaauuggacugguguuacacaaaacgggaccuccucugcuugcauccgccgaagcuccucaaguuucuuuagccgucugaauuggcugacgcaucucaaguacacuuauccagcauuaaacgugaccaugcccaauaacgagcaguucgacaagcuguacauuuggggaguccaccauccuggcacagauaaagaccagaucuuucuuuacgcccagucuuccggcagaauaacugugucaaccaagaggagccaacaggcuguaauuccaaacaucgggagucggccccgcauuagagauaucccuucuaggaucuccauuuauuggacaauaguuaaaccaggagacaucuugcugauuaauagcaccgguaaccuaaucgccccgcggggcuacuucaagauacgcucggggaaaucuuccauuaugcgaucagacgcgcccaucggaaaguguaagagugaaugcaucacgccuaauggcagcauuccaaacgauaaacccuuucagaaugugaacagaaucacuuauggugcauguccuagguacgucaagcacuccacacucaaacuggccaccgggaugcggaaugugccagagaagcagacucguggaauuuucggcgcuauagccggcuuuaucgaaaacgggugggagggaaugguggacgguugguauggcuuccgccaccaaaauucugaggggagaggacaggcagcugaucuuaaaagcacacaggccgcgauugaccaaaucaacggcaagcugaauagguugaucgguaaaaccaacgaaaaguuucaucagauugagaaggaguucucagaagucgaagggcggauacaggaucucgagaaauacguugaggacacgaagaucgaucuguggaguuauaaugccgaauuacugguggcacucgagaaccagcacaccauugaccuuacagauuccgaaaugaauaaacuguucgagaagacuaaaaagcaauugcgagaaaacgcugaggacaugggcaacggaugcuuuaagaucuaccauaaaugugauaaugccugcauuggcagcauccgcaacgggaccuacgaccacaauguauauagagacgaggcucuaaacaauagguuccagauaaagggaguggaacugaaaucugguuacaaggauuggauccucuggauuucauuugccaucaguugcuuccugcuuugugucgcacuguugggcuuuauuaugugggccugccagaaagggaacauccgguguaauauaugcauuuga

SEQ ID NO: 141483 - RNA, 1701 nt, Artificial Sequence
  derived and/or modified CDS sequence (opt3) from hemagglutinin__InfluenzaA__ALE31934
augaagaccaucauugcccugagcuacauacucugccuuguguucgcucagaaaauccccggcaacgacaauuccacagcaacucuguguuuggggcaccaugccgucccuaacggaacgauuguuaagaccaucacaaaugauagaauugaggugacuaacgcgaccgaauuaguacaaaauucuucaaucggugagauaugcgacaguccacaccagauccuggauggcgaaaacuguacacuaauugacgcucuccugggggauccgcagugcgacggauuucagaauaaaaagugggaucuuuucguggagaggagcaaagccuauuccaacuguuaccccuaugacgucccugauuacgcaucucugcggucguugguggccucaagcggcacccucgaauuuaauaacgagaguuucaauuggacugguguuacacaaaacgggaccuccucugcuugcauccgcaagagcuccucaaguuucuucagccgacugaauuggcugacgcaucucaacuauacuuaccaggcauuaaaugugaccaugccaaacaacgagcaguuugacaagcuguauauuuggggaguccaccaucccggcacagauaaagaccagaucuuccuuuacgcccguucuuccggcagaauaacugugucaaccaagaggagccaacaggcuguaauuccuaauaucgggagucggccacgcauuagagauauccccucuaggaucuccauuuacuggacaauaguuaaaccuggagacaucuugcugauuaacagcaccgguaaucuaaucgccccacggggcuauuuuaagauacgcucggggaaaucuuccauuaugcgaucagacgcgccgaucggaaaguguaagagugaaugcaucacgcccaacggcagcauuccuaaugauaaaccauuccagaacgugaauagaaucacuuacggugcaugucccagguaugucaagcacuccacacucaaacuggccaccgggaugcggaacauuccugagaagcagacucguggaauauuuggcgcuaucgccggcuucauugaaaaugggugggagggaaugguggacgguugguacggcuuucgccaccaaaacucugaggggagaggacaggcagcugaucuuaaaagcacacaggccgcgaucgaccaaaucaauggcaagcugaacagguugauugguaaaaccaaugaaaaguuccaucagauagagaaggaauuuucagagguggaagggcggauccaggaucucgagaaauaugucgaggacacgaagauugaucuguggaguuacaacgccgaauuacugguugcacucgagaaucagcacaccaucgaccuuacagauuccgaaaugaacaaacuguuugagaagacuaaaaagcaauugcgagaaaacgcugaggacaugggcaauggaugcuucaagauuuaucauaaaugugauaacgccugcaucggcagcauacgcaaugggaccuacgaccacaacguguacagagacgaggcucuaaauaacagguuucagaucaagggaguagaacugaaaucugguuauaaggauuggauucucuggaucucauucgccauuaguugcuuucugcuuuguguggcacuguugggcuucaucaugugggccugccagaaagggaauauacgguguaacauuugcaucuga

SEQ ID NO: 141484 - RNA, 1701 nt, Artificial Sequence; identical to SEQ ID NO: 140489
  derived and/or modified CDS sequence (opt3) from hemagglutinin__InfluenzaA__ALE31935

SEQ ID NO: 141485 - RNA, 1701 nt, Artificial Sequence; identical to SEQ ID NO: 141271
  derived and/or modified CDS sequence (opt3) from hemagglutinin__InfluenzaA__ALE31936

SEQ ID NO: 141486 - RNA, 1701 nt, Artificial Sequence
  derived and/or modified CDS sequence (opt3) from hemagglutinin__InfluenzaA__ALE31937
augaagaccaucauugcccugagcuacauacucugccuuguguucgcucagaaacugcccgagaacgacaauuccacagcaacuuuguguuuaggccaccaugccgucccuaacgggacgaucguuaagaccauuacaaaugauagaaucgaagugacuaacgcgaccgagcugguacaaaauucuucaauuggagaaaucugcgacaguccacaccagauacuagauggugagaacuguacacucaucgacgcucugcuuggcgauccgcagugcgacggguuucagaauaaaaagugggaucuguucguggaaaggagcaaagccuauuccaacuguuaccccuaugacgucccugauuacgcaucuuugcggucgcucguggccucaagcggaacccuggaguuuaauaacgagaguuucaauugggcuggcguuacucaaaacgguacauccucuagcugcauucgcggguccaauucaaguuucuuuagccgacugaacuggcucacccauuuaaauucuaaguauccagcacugaacgugacgaugcccaacaaugaacaguuugacaaacuuuacaucuggggaguccaccauccuggcacugauaaagaccagauuuucuuguaugcccagccauccggccguaucaccgugucaacaaagagaagccaacaggcuguaauacccaacauugggaguaggccucggauccgcgauauuccaucuagaaucuccaucuacuggacuauuguuaaaccgggagacauacugcuaaucaauagcaccgguaaccucauugcccccaggggcuacuuuaagauccggucggggaaaucuuccauaaugcgcucagacgcgccuauuggaaaguguaagagugagugcaucacaccaaauggcagcauccccaacgauaaaccuuuccagaaugugaaccgaauuaccuauggugcauguccaagauacgucaagcaguccacgcugaaacuugccacugggaugaggaaugugcccgaacggcaaacacguggaaucuuuggcgcuauugccggcuucauagagaacgggugggagggaaugguggacgguugguauggcuuucgccaccagaauagcgaagggagaggacaggcagcugaucugaagucuacccaagccgcgaucgaccagauuaacggcaaauugaauaggcucaucgguaagacuaacgagaaauuccaccagaucgaaaaggaguucucagaagucgaggggcggauucaggaucuggagaaguacguugaagacacaaaaauagauuuauggaguuauaaugccgagcugcucguggcacuugaaaaccaacauaccaucgaccugacggauuccgagaugaacaaguuguuugaaaagaccaagaaacagcuacgagagaaugcugaggacaugggcaacggaugcuucaagauuuaccacaagugugauaaugccugcaucggcagcauucgcaacgggacauaugaccaugacguauacagagaugaagcucugaauaacagguuucagaucaaaggaguggagcucaagucugguuacaaagacuggauacuguggaucucauucgccauuaguugcuuucuucugugugucgcauugcucggcuucaucaugugggccugccagaaggggaauauucgguguaacaucugcauauga

SEQ ID NO: 141487 - RNA, 1701 nt, Artificial Sequence; identical to SEQ ID NO: 140489
  derived and/or modified CDS sequence (opt3) from hemagglutinin__InfluenzaA__ALE31938

SEQ ID NO: 141488 - RNA, 1701 nt, Artificial Sequence; identical to SEQ ID NO: 141095
  derived and/or modified CDS sequence (opt3) from hemagglutinin__InfluenzaA__ALE31939

SEQ ID NO: 141489 - RNA, 1701 nt, Artificial Sequence; identical to SEQ ID NO: 140489
  derived and/or modified CDS sequence (opt3) from hemagglutinin__InfluenzaA__ALE31941

SEQ ID NO: 141490 - RNA, 1701 nt, Artificial Sequence; identical to SEQ ID NO: 141046
  derived and/or modified CDS sequence (opt3) from hemagglutinin__InfluenzaA__ALE31943

SEQ ID NO: 141491 - RNA, 1701 nt, Artificial Sequence
  derived and/or modified CDS sequence (opt3) from hemagglutinin__InfluenzaA__ALE31944
augaagaccaucauugcccugagcuacauacucugccuuguguucgcucagaaacugcccgagaacgacaauuccacagcaacuuuguguuuaggccaccaugccgucccuaacgggacgaucguuaagaccauuacaucugauagaaucgaagugacuaaugcgaccgagcugguacaaaacucaaguauuggagaaaucugcgacagcccacaccagauacuagaugguaaaaauuguacacucaucgacgcucugcuuggcgauccgcagugcgacggguuucagaacaagaaaugggaucuguucguggagagguccaaggccuauucuaauuguuaccccuaugacgucccugauuacgcaucguugcggucacucguggccagcaguggaacccuggaauuuaacgacgaguccuucaauugggcuggcguuacucaaaacgguacaucuagcgcaugcauucgcggguccaauucaaguuucuuuagccgacugaacuggcucacccauucuaauuuuaaguauccagccuuaaacgugacgaugcccaauaacgagcaguucgauaaacuguacaucuggggaguccaccauccuggcacugacaaggaucagauuuuucuuuaugcucaguccucaggccguaucaccgugagcacaaaaagaagucaacaggccguaauaccaaacauugggucuaggccccggauccgcgacauuccuuccagaaucagcaucuacuggacuauuguuaagccaggagacauauugcugaucaauucgaccgguaaccuaauugcgccgaggggcuacuucaaaauccggucugggaaguccucaauaaugcgcagugaugcacccauuggaaaguguaaaagcgaaugcaucacaccuaauggcuccaucccaaacgacaagcccuuucagaaugugaaccgaauuaccuauggugccuguccuagauacgucaaacagucuacgcucaagcuggcuacugggaugaggaaugugccagagaaacaaacacggggaaucuucggcgccauugcaggcuuuauagaaaacgggugggagggaaugaaggaugguugguauggcuuccgucaccagaauagcgaggggcgcggacaggcugccgaccuuaaaucaacccaagcggccaucgaucagauuaacggcaagcugaauagauugaucgguaagacuaacgaaaaauuccaccagaucgagaaggaauuuagugagguggaagggaggauucaggaccucgagaaauacgucgaggauacaaagauagaccugugguccuauaaugcagaauuacugguugcucucgagaaccaacauaccaucgaucuuacggacagcgaaaugaauaaacuguucgagaagaccaagaaacaguugcgggaaaacgccgaggauaugggcaacggaugcuuuaagauuuaccacaaaugugacaaugcuugcaucggcucuauucgaaacgggacauaugaccaugauguguaccgcgacgaggcccuaaauaacagauuccagaucaagggaguagaacugaaaucagguuacaaggauuggauacucuggaucaguuuugcaauuagcugcuuccugcuuuguguggcccuguugggcuuuaucaugugggcuugccagaaggggaauauuagguguaacaucugcauauga

SEQ ID NO: 141492 - RNA, 1701 nt, Artificial Sequence
  derived and/or modified CDS sequence (opt3) from hemagglutinin__InfluenzaA__ALE31945
augaagaccaucauugcccugagcuacauacucugccuuguguucgcucagaaaauccccggcaacgacaauuccacagcaacucuguguuuggggcaccaugccgucccuaacggaacgauuguuaagaccaucacaaaugauagaauugaggugacuaacgcgaccgaauuaguacaaaauucuucaaucggugagauaugcgacaguccacaccagauccuggauggcgaaaacuguacacuaauugacgcucuccugggggauccgcagugcgacggauuucagaauaaaaagugggaucuuuucguggagaggagcaaagccuauuccaacuguuaccccuaugacgucccugauuacgcaucucugcggucguugguggccucaagcggcacccucgaauuuaauaacgagaguuucaauuggacugguguuacacaaaacgggaccuccucugcuugcauccgccgaagcuccucaaguuucuucagccgucugaauuggcugacgcaucucaacuauacuuacccagcauuaaaugugaccaugcccaacaacgagcaguuugacaagcuguauauuuggggaguccaccauccuggcacagauaaggaccagaucuuccuuuacgcccagucuuccggcagaauaacugugucaaccaaagggagccaacaggcuguaauuccaaauguuggaaguaggccccggauccgcgauauuccuucuagaaucuccaucuacuggacaauugugaagccaggugacauauugcugaucaacagcaccggcaaucuaauugccccgaggggguauuuuaaaauccggucgggaaagucuuccauaaugcgcucagacgcgcccauuggcaaauguaagagugaaugcaucacgccuaacgguagcaucccaaaugauaagcccuuccagaacgucaaucgaauuacuuacggggcauguccuagauaugugaaacacuccacacucaagcuggccaccggaaugaggaacgugccagagaaacagacucggggcaucuuuggcgcuauugccggguucauagaaaauggaugggaggguauggucgacggcugguacggguuucgucaccaaaacucugagggacgcggccaggcagcugaucuuaagagcacacaggccgcgaucgaccaaauuaaugguaaacugaacagauugaucgggaagaccaaugaaaaauuccaucagaucgagaaggaauuuucagagguugaaggcaggauucaggauauagagaaguauguggaggacacgaaaaucgaucucuggaguuacaacgccgaacuguuaguagcacuggagaaucagcacaccauugaccucacagauuccgaaaugaacaaacuuuuugagaagacuaagaaacaacugcgggaaaacgcugaggacaugggaaauggcugcuucaagaucuaucauaagugugauaacgccugcauugggagcauccgaaauggaaccuacgaccacaacguguaccgcgacgaggcuuugaauaacagauuucagauaaaaggugucgaacuaaagucuggcuauaaagauuggauccuguggauuucauucgccaucaguugcuuucuccuguguguggcacuucugggguucauuaugugggccugccagaagggaaauaucagguguaacauaugcauuuga

SEQ ID NO: 141493 - RNA, 1701 nt, Artificial Sequence; identical to SEQ ID NO: 141147
  derived and/or modified CDS sequence (opt3) from hemagglutinin__InfluenzaA__ALE31946

SEQ ID NO: 141494 - RNA, 1701 nt, Artificial Sequence; identical to SEQ ID NO: 141147
  derived and/or modified CDS sequence (opt3) from hemagglutinin__InfluenzaA__ALE31947

SEQ ID NO: 141495 - RNA, 1701 nt, Artificial Sequence
  derived and/or modified CDS sequence (opt3) from hemagglutinin__InfluenzaA__ALE31948
augaagaccaucauugcccugagcuacauacucugccuuguguucgcucagaaaauccccggcaacgacaauuccacagcaacucuguguuuggggcaccaugccgucccuaacggaacgauuguuaagaccaucacaaaugauagaauugaggugacuaacgcgaccgaauuaguacaaaauucuucaaucggugagauaugcgacaguccacaccagauccuggauggcgaaaacuguacacuaauugacgcucuccugggggauccgcagugcgacggauuucagaauaaaaagugggaucuuuucguggagaggagcaaagccuauuccaacuguuaccccuaugacgucccugauuacgcaucucugcggucguugguggccucaagcggcacccucgaauuuaauaacgagaguuucaauuggacugguguuacacaaaacgggaccuccucugcuugcauccgcaagagcuccucaaguuucuucagccgacugaauuggcugacgcaucucaacuauacuuacccagcauuaaaugugaccaugcccaacaacgagcaguuugacaagcuguauauuuggggaguccaccauccuggcacagauaaagaccagaucuuccuuuacgcccguucuuccggcagaauaacugugucaaccaagaggagccagcaagcuguaauuccaaauaucgggagucggccccgcauuagagauaucccuucuaggaucuccauuuacuggacaauaguuaaaccaggagacaucuugcugauuaacagcaccgguaaucuaaucgccccgcggggcuauuuuaagauacgcucggggaaaucuuccauuaugcgaucagacgcgcccaucggaaaguguaagagugaaugcaucacgccuaacggcagcauuccaaaugauaaacccuuccagaacgugaauagaaucacuuacggugcauguccuagguaugucaagcacuccacacucaaacuggccaccgggaugcggaacgugccagagaagcagacucguggaauuuuuggcgcuauagccggcuucaucgaaaaugggugggagggaaugguggacgguugguacggcuuucgccaccagaacucugaggggagaggacaagcagcugaucuuaaaagcacacaggccgcgauugaccagaucaauggcaagcugaacagguuggucgguaaaaccaaugaaaaguuccaucaaaucgagaaggaauuuucagagguugaagggcggauucaggaucucgagaaauauguggaggacacgaagauagaucuguggaguuacaacgccgaauuuuuaguagcacuggagaaucagcacaccaucgaccucacagauuccgaaaugaacaaacuuuucgagaagacuaaaaagcagcugcgagaaaacgcugaggacaugggcaauggaugcuuuaagauuuaucauaaaugugauaacgccugcaucggcagcauucgcaaugggaccuacgaccacaacguguacagagacgaggcuuugaauaacagguuccaaaucaagggagucgaacuaaaaucugguuauaaggauuggauacuguggaucucauuugccauuaguugcuuccuccuguguguggcacuucugggcuuuaucaugugggccugccagaaagggaauauucgguguaacaucugcauauga

SEQ ID NO: 141496 - RNA, 1701 nt, Artificial Sequence; identical to SEQ ID NO: 141147
  derived and/or modified CDS sequence (opt3) from hemagglutinin__InfluenzaA__ALE31949

SEQ ID NO: 141497 - RNA, 1701 nt, Artificial Sequence; identical to SEQ ID NO: 140489
  derived and/or modified CDS sequence (opt3) from hemagglutinin__InfluenzaA__ALE31950

SEQ ID NO: 141498 - RNA, 1701 nt, Artificial Sequence; identical to SEQ ID NO: 141033
  derived and/or modified CDS sequence (opt3) from hemagglutinin__InfluenzaA__ALE31951

SEQ ID NO: 141499 - RNA, 1701 nt, Artificial Sequence; identical to SEQ ID NO: 140489
  derived and/or modified CDS sequence (opt3) from hemagglutinin__InfluenzaA__ALE31952

SEQ ID NO: 141500 - RNA, 1701 nt, Artificial Sequence
  derived and/or modified CDS sequence (opt3) from hemagglutinin__InfluenzaA__ALE31953
augaagaccaucauugcccugagcuacauacucugccuuguguucgcucagaaaauccccggcaacgacaauuccacagcaacucuguguuuggggcaccaugccgucccuaacggaacgauuguuaagaccaucacaaaugauagaauugaggugacuaacgcgaccgaauuaguacaaaauucuucaaucggugagauaugcgacaguccacaccagauccuggauggcgaaaacuguacacuaauugacgcucuccugggggauccgcagugcgacggauuucagaauaaaaagugggaucuuuucguggagaggagcaaagccuauuccaacuguuaccccuaugacgucccugauuacgcaucucugcggucguugguggccucaagcggcacccucgaauuuaauaacgagaguuucaauuggacugguguuacacaaaacgggaccuccucugcuugcauccgcaagagcuccucaaguuucuuuagccgacugaauuggcugacgcaucucaacuauacuuacccagcauuaaaugugaccaugcccaacaacgagcaguuugacaagcuguauauuuggggaguccaccauccuggcacagauaaagaccagaucuuccuuuuugcccguucuuccggcagaauaacugugucaaccaagaggagccagcaagcuguaauuccaaauaucgggagucggccccgcauuagagauaucccuucuaggaucuccauuuacuggacaauaguuaaaccaggagacaucuugcugauuaacagcaccgguaaucuaaucgccccgcggggcuacuucaagauacgcucggggaaaucuuccauuaugcgaucagacgcgcccaucggaaaguguaagagugaaugcaucacgccuaacggcagcauuccaaaugauaaacccuuucagaacgugaauagaaucacuuauggugcauguccuagguacgucaagcacuccacacucaaacuggccaccgggaugcggaacgugccagagaagcagacucguggaauuuucggcgcuauagccggcuuuaucgaaaaugggugggagggaaugguggacgguugguauggcuuccgccaccagaacucugaggggagaggacaagcagcugaucuuaaaagcacacaggccgcgauugaccagaucaauggcaagcugaacagguugaucgguaaaaccaaugaaaaguuccaucaaauugagaaggaauuuucagaggucgaagggcggauacaggaucucgagaaauacguugaggacacgaagaucgaucuguggaguuauaacgccgaauuacugguggcacucgagaaucagcacaccauugaccuuacagauuccgaaaugaacaaacuguucgagaagacuaaaaagcaguugcgagaaaacgcugaggacaugggcaauggaugcuuuaagaucuaccauaaaugugauaacgccugcauuggcagcauccgcaaugggaccuaugaccacaacguauacagagacgaggcucuaaauaacagguuccaaauaaagggaguggaacugaaaucugguuacaaggauuggauccucuggauuucauuugccaucaguugcuuccugcuuugugucgcacuguugggcuuuauuaugugggccugccagaaagggaauauccgguguaacauaugcauuuga

SEQ ID NO: 141501 - RNA, 1701 nt, Artificial Sequence
  derived and/or modified CDS sequence (opt3) from hemagglutinin__InfluenzaA__ALE31954
augaagaccaucauugcccugagcuacauacucugccuuguguucgcucagaaacugcccggcaacgacaauuccacagcaacuuuguguuuagggcaccaugccgucccuaacggaacgaucguuaagaccauuacaaaugauagaaucgaggugacuaacgcgaccgaacugguacaaaauucuucaauuggugagaucugcgacaguccacaccagauacuagauggcaaaaacuguacacucaucgacgcucugcuuggggauccgcagugcgacggauuucagaauaagaggugggaucuguucguggaacggagcaaagccuauuccaacuguuaccccuaugacgucccugauuacgcaucuuugcgcucgcucguggccucaagcggcacccuggaguuuaaugacgaaaguuucaacugggcugguguuacucaaaaugggacauccucugcaugcauucgaggaagcaacuccucauuuuucagucgucugaauuggcucacccauagcaacuuuaaguauccagccuuaaaugugacgaugcccaacaacgagcaguucgauaagcuguacaucuggggcguccaccauccuggcacugacaaagaucagauuuuucuuuaugcucacucuuccgggagaaucaccgugucaacaaagaggagccagcaagccguaauaccaaauguuggaagucggccccgcauuagaaacaucccuucuaggauuuccaucuacuggacuaucgugaaaccaggugacauuuugcugauaaauagcaccggcaaccuaaucgcgccgcggggguacuucaagauucagucgggaaaaucuuccaucaugcgcucagacgcacccauaggcaaguguaagagugagugcauuacaccuaaugguagcaucccaaacgauaaacccuuucagaaugucaaccgaaucaccuauggggccuguccuagauacgugaagcaguccacgcucaaacuggcuacuggaaugaggaaugugccagaaaagcaaacacggggcauuuucggcgccaucgcaggguuuauugagaacggaugggaagguaugaaagacggcugguauggguuccgucaccaaaauucugagggacgcggccaggcugccgaucuuaagagcacccaggcggccauagaccagaucaacgguaaacugaauagauuggucgggaagacuaacgagaaguuccaucagauugaaaaagaguuuucagaaguugagggcaggauccaggaucucgaaaaguacguggaggacacaaaaaucgaucuguggaguuauaaugcagaguuacugguagcucucgaaaaccaacacaccauugaccuuacggauuccgagaugaacaagcuguucgagaaaaccaagaagcaguugcgggaaaaugccgaagacaugggaaacggcugcuuuaaaauauaccauaagugugauaaugcuugcaucgggagcauucgaaacggaacauaugaccacuacguguaccgcgacgaggcccuaaauaacagauuccagaucaaaggugucgagcugaagucuggcuauaaagauuggauucucuggaucucauuugcaauaaguugcuuccugcuuuguguggcccuguugggguuuaucaugugggcuugccagaagggaaauauuagguguaacaucugcauuuga

SEQ ID NO: 141502 - RNA, 1701 nt, Artificial Sequence; identical to SEQ ID NO: 140489
  derived and/or modified CDS sequence (opt3) from hemagglutinin__InfluenzaA__ALE31955

SEQ ID NO: 141503 - RNA, 1701 nt, Artificial Sequence
  derived and/or modified CDS sequence (opt3) from hemagglutinin__InfluenzaA__ALE31956
augaagaccaucauugcccugagcuacauacucugccuuguguucgcucagaaaauccccggcaacgacaauuccacagcaacucuguguuuggggcaccaugccgucccuaacggaacgauuguuaagaccaucacaaaugauagaauugaggugacuaacgcgaccgaauuaguacaaaauucuucaaucggugagauaugcaacaguccacaccagauccuggacggcgaaaauuguacacuaauugaugcucuccugggggacccgcagugcgauggauuucagaacaaaaagugggaccuuuucguggagaggagcaaagccuauuccaauuguuaccccuaugaugucccugacuacgcaucucugcggucguugguggccucaagcggcacccucgaauuuaacaaugagaguuucaacuggacugguguuacacaaaaugggaccuccucugcuugcauccgccgaagcuccucaaguuucuucagccgucugaacuggcugacgcaucucaauuauacuuacccagcauuaaacgugaccaugcccaacaaugagcaguuugauaagcuguauauuuggggaguccaccauccuggcacagacaaggaucagaucuuccuuuacgcccagucuuccggcagaauaacugugucaaccaaaaggagccaacaggcuguaauuccaaacaucgggagucggccccgcauuagagacaucccuucuaggaucuccauuuacuggacaauaguuaagccaggagauaucuugcugauuaauagcaccgguaaccuaaucgccccgcggggcuauuuuaaaauacgcucggggaagucuuccauuaugcgaucagacgcgcccaucggaaaauguaagagugaaugcaucacgccuaauggcagcauuccaaacgacaagcccuuccagaaugugaacagaaucacuuacggugcauguccuagguaugucaaacacuccacacucaagcuggccaccgggaugcggaaugugccagagaaacagacucguggaauuuuuggcgcuauagccggcuucaucgaaaacgggugggagggaaugguggaugguugguacggcuuucgccaccaaaauucugaggggagaggacaggcagcugaccuuaagagcacacaggccgcgauugaucaaaucaacggcaaacugaauagguugaucgguaagaccaacgaaaaauuccaucagauugagaaggaauuuucagaggucgaagggcggauacaggaccucgagaaguauguugaggauacgaaaaucgaccuguggaguuacaaugccgaauuacugguggcacucgagaaccagcacaccauugaucuuacagacuccgaaaugaacaagcuguuugagaaaacuaagaaacaauugcgagaaaaugcugaggauaugggcaacggaugcuucaagaucuaucauaagugugacaaugccugcauuggcagcauccgcaacgggaccuacgaucacaauguauacagagacgaggcucuaaacaauagguuucagauaaaaggaguggaacugaagucugguuauaaagacuggauccucuggauuucauucgccaucaguugcuuucugcuuugugucgcacuguugggcuucauuaugugggccugccagaaggggaacauccgguguaauauaugcauuuga

SEQ ID NO: 141504 - RNA, 1701 nt, Artificial Sequence; identical to SEQ ID NO: 141095
  derived and/or modified CDS sequence (opt3) from hemagglutinin__InfluenzaA__ALE31957

SEQ ID NO: 141505 - RNA, 1701 nt, Artificial Sequence
  derived and/or modified CDS sequence (opt3) from hemagglutinin__InfluenzaA__ALE31958
augaagaccaucauugcccugagcuacauacucugccuuguguucgcucagaaaauccccggcaacgacaauuccacagcaacucuguguuuggggcaccaugccgucccuaacggaacgauuguuaagaccaucacaaaugauagaauugaggugacuaacgcgaccgaauuaguacaaaauucuucaaucggugagauaugcgacaguccacaccagauccuggauggcgaaaacuguacacuaauugacgcucuccugggggauccgcagugcgacggauuucagaauaaaaagugggaucuuuucguggagaggagcaaagccuauuccaacuguuaccccuaugacgucccugauuacgcaucucugcggucguugguggccucaagcggcacccucgaauuuaauaacgagaguuucaauuggacugguguuacacaaaacgggaccuccucugcuugcauccgccgaagcuccucaaguuucuucagccgucugaauuggcugacgcaucucaacuauacuuacccagcauuaaaugugaccaugcccaacaacgagcaguuugacaagcuguauauuuggggaguccaccauccuggcacagauaaggaccagaucuuccuuuacgcccagucuuccggcagaauaacugugucaaccaaaaggagccaacaggcuguaauuccaaauaucgggaguaagccccggauucgcgauaucccuucuagaaucuccauuuacuggacaauaguuaaaccaggagacaucuugcugauuaacagcaccgguaaucuaaucgccccgaggggcuauuuuaagauacggucggggaaaucuuccauuaugcgcucagacgcgcccaucggaaaguguaagagugaaugcaucacgccuaacggcagcauuccaaaugauaaacccuuccagaacgugaaucgaaucacuuacggugcauguccuagauaugucaagcacuccacacucaaacuggccaccgggaugaggaacgugccagagaagcagacucggggaauuuuuggcgcuauagccggcuucaucgaaaaugggugggagggaaugguggacgguugguacggcuuucgucaccaaaacucugaggggcgcggacaggcagcugaucuuaaaagcacacaggccgcgauugaccaaaucaauggcaagcugaacagauugaucgguaaaaccaaugaaaaguuccaucagauugagaaggaauuuucagaggucgaagggaggauacaggaucucgagaaauauguugaggacacgaagaucgaucuguggaguuacaacgccgaauuacugguggcacucgagaaucagcacaccauugaccuuacagauuccgaaaugaacaaacuguuugagaagacuaaaaagcaauugcgggaaaacgcugaggacaugggcaauggaugcuucaagaucuaucauaaaugugauaacgccugcauuggcagcauccgaaaugggaccuacgaccacaacguauaccgcgacgaggcucuaaauaacagauuucagauaaagggaguggaacugaaaucugguuauaaggauuggauccucuggauuucauucgccaucaguugcuuucugcuuugugucgcacuguugggcuucauuaugugggccugccagaaagggaauaucagguguaacauaugcauuuga

SEQ ID NO: 141506 - RNA, 1701 nt, Artificial Sequence
  derived and/or modified CDS sequence (opt3) from hemagglutinin__InfluenzaA__ALE31959
augaagaccaucauugcccugagcuacauacucugccuuguguucgcucagaaaauccccggcaacgacaauuccacagcaacucuguguuuggggcaccaugccgucccuaacggaacgauuguuaagaccaucacaaaugauagaauugaggugacuaacgcgaccgaauuaguacaaaauucuucaaucggugagauaugcgacaguccacaccagauccuggauggcgaaaacuguacacuaauugacgcucuccugggggauccgcagugcgacggauuucagaauaaaaagugggaucuuuucguggagaggagcaaagccuauuccaacuguuaccccuaugacgucccugauuacgcaucucugcggucguugguggccucaagcggcacccucgaauuuaauaacgagaguuucaauuggacugguguuacacaaaacgggaccuccucugcuugcauccgcaagagcuccucaaguuucuucagccgacugaauuggcugacgcaucucaacuaugcauacccagccuuaaaugugacuaugcccaacaacgagcaguuugacaagcuguauauuuggggaguccaccauccuggcaccgauaaagaccagaucuuccuuuacgcucguucuuccggcagaauaacagugucaacuaagaggagccagcaagccguaauuccaaauaucgggagucggccccgcauuagagauaucccuucuaggaucuccauuuacuggaccauaguuaaaccaggagacaucuugcugauuaacagcacagguaaucuaaucgcgccgcggggcuauuuuaagauacgcucggggaaaucuuccauuaugcgaucagacgcacccaucggaaaguguaagagugaaugcaucaccccuaacggcagcauuccaaaugauaaacccuuccagaacgugaauagaaucacguacggugccuguccuagguaugucaagcacuccacucucaaacuggcuacagggaugcggaacgugccagagaagcagacccguggaauuuuuggcgccauagcaggcuucaucgaaaaugggugggagggaaugguggacgguugguacggcuuucgccaccagaacucugaggggagaggacaagcugccgaucuuaaaagcacucaggcggccauugaccagaucaauggcaagcugaacagguugaucgguaaaacaaaugaaaaguuccaucaaauugagaaggaauuuucagaggucgaagggcggauacaggaucucgagaaauauguugaggacaccaagaucgaucuguggaguuacaacgcagaauuacugguggcucucgagaaucagcacacgauugaccuuaccgauuccgaaaugaacaaacuguuugagaagacuaaaaagcaguugcgagaaaacgccgaggacaugggcaauggaugcuucaagaucuaucauaaaugugauaacgcuugcauuggcagcauccgcaaugggacauacgaccacaacguauacagagacgaggcccuaaauaacagguuucaaauaaagggaguggaacugaaaucugguuauaaggauuggauccucuggauuucauucgcaaucaguugcuuucugcuuugugucgcccuguugggcuucauuaugugggcuugccagaaagggaauauccgguguaacauaugcauuuga

SEQ ID NO: 141507 - RNA, 1701 nt, Artificial Sequence; identical to SEQ ID NO: 140489
  derived and/or modified CDS sequence (opt3) from hemagglutinin__InfluenzaA__ALE31960

SEQ ID NO: 141508 - RNA, 1701 nt, Artificial Sequence; identical to SEQ ID NO: 140678
  derived and/or modified CDS sequence (opt3) from hemagglutinin__InfluenzaA__ALE31961

SEQ ID NO: 141509 - RNA, 1701 nt, Artificial Sequence
  derived and/or modified CDS sequence (opt3) from hemagglutinin__InfluenzaA__ALE31962
augaagaccaucauugcccugagcuacauacucugccuuguguucgcucagaaaauccccggcaacgacaauuccacagcaacucuguguuuggggcaccaugccgucccuaacggaacgauuguuaagaccaucacaaaugauagaauugaggugacuaacgcgaccgaauuaguacaaaauucuucaaucggugagauaugcgacaguccacaccagauccuggauggcgaaaacuguacacuaauugacgcucuccugggggauccgcagugcgacggauuucagaauaaaaagugggaucuuuucguggagaggagcaaagccuauuccaacuguuaccccuaugacgucccugauuacgcaucucugcggucguugguggccucaagcggcacccucgaauuuaauaacgagaguuucaauuggacugguguuacacaaaacgggaccuccucugcuugcauccgccgaagcuccucaaguuucuucagccgucugaauuggcugacgcaucucaacuauacuuacccagcauuaaaugugaccaugcccaacaacgagcaguuugacaagcuguauauuuggggaguccaccauccuggcacagauaaggaccagaucuuccuuuacgcccagucuuccggcagaauaacugugucaaccaaaaggagccaacaggcuguaauuccaaauaucgggagucggccccgcauuagagauaucccuucuaggauguccaucuacuggacaauuguuaagccaggagacauauugcugaucaacagcaccgguaaucuaauugccccgcggggcuauuuuaaaauccgcucggggaagucuuccauaaugcgaucagacgcgcccauuggaaaauguaagagugaaugcaucacgccuaacggcagcaucccaaaugauaagcccuuccagaacgugaauagaauuacuuacggugcauguccuagguaugucaaacacuccacacucaagcuggccaccgggaugcggaacgugccagagaaacagacucguggaaucuuuggcgcuauugccggcuucauagaaaaugggugggagggaaugguggacgguugguacggcuuucgccaccaaaacucugaggggagaggacaggcagcugaucuuaagagcacacaggccgcgaucgaccaaauuaauggcaaacugaacagguugaucgguaagaccaaugaaaaauuccaucagaucgagaaggaauuuucagaggucgaagggcggauucaggaucucgagaaguauguugaggacacgaaaauagaucuguggaguuacaacgccgaauuacugguggcacucgagaaucagcacaccaucgaccuuacagauuccgaaaugaacaagcuguuugagaaaacuaagaaacaauugcgagaaaacgcugaggacaugggcaauggaugcuucaagauuuaucauaagugugauaacgccugcaucggcagcauucgcaaugggaccuacgaccacaacguauacagagacgaggcucuaaauaacagguuucagaucaaaggaguggaacugaagucugguuauaaagauuggauacucuggaucucauucgccauuaguugcuuucugcuuugugucgcacuguugggcuucaucaugugggccugccagaaggggaauauucgguguaacaucugcauauga

SEQ ID NO: 141510 - RNA, 1701 nt, Artificial Sequence
  derived and/or modified CDS sequence (opt3) from hemagglutinin__InfluenzaA__ALE31963
augaagaccaucauugcccugagcuacauacucugccuuguguucgcucagaaaauccccggcaacgacaauuccacagcaacucuguguuuggggcaccaugccgucccuaacggaacgauuguuaagaccaucacaaaugauagaauugaggugacuaacgcgaccgaauuaguacaaaauucuucaaucggugagauaugcgacaguccacaccagauccuggauggcgaaaacuguacacuaauugacgcucuccugggggauccgcagugcgacggauuucagaauaaaaagugggaucuuuucguggagaggagcaaagccuauuccaacuguuaccccuaugacgucccugauuacgcaucucugcggucguugguggccucaagcggcacccucgaauuuaauaacgagaguuucaauuggacugguguuacacaaaacgggaccuccucugcuugcauccgccgaagcuccucaaguuucuucagccgucugaauuggcugacgcaucucaacuauacuuacccagcauuaaaugugaccaugcccaacaacgagcaguuugacaagcuguauauuuggggaguccaccauccuggcacagauaaggaccagacuuuccuuuacgcccagucuuccggcagaaucaccgugucaacaaaaaggagccaacaggcuguaauaccaaauauugggagucggccccgcaucagagauauuccuucuaggaucuccaucuacuggaccauuguuaagccaggagacauauugcugaucaacagcacggguaaucuaauugccccgcggggcuauuuuaaaauccgcucggggaagucuuccauaaugcgaucagacgcgcccauuggaaaauguaagagugaaugcaucacuccuaacggcagcaucccaaaugauaagcccuuccagaacgugaauagaauuacauacggugcauguccuagguaugucaaacacuccacccucaagcuggccacugggaugcggaacgugccagagaaacagacacguggaaucuuuggcgcuauugccggcuucauagaaaaugggugggagggaaugguggacgguugguacggcuuucgccaccaaaacucugaggggagaggacaggcagcugaucuuaagagcacccaggccgcgaucgaccaaauuaauggcaaacugaacagguugaucgguaagacgaaugaaaaauuccaucagaucgagaaggaauuuucagaggucgaagggcggauucaggaucucgagaaguauguugaggacaccaaaauagaucuguggaguuacaacgccgaauuacugguggcacucgagaaucagcacacaaucgaccuuacugauuccgaaaugaacaagcuguuugagaaaaccaagaaacaauugcgagaaaacgcugaggacaugggcaauggaugcuucaagauuuaucauaagugugauaacgccugcaucggcagcauucgcaaugggacauacaaccacaauguauacagagacgaggcucuaaacaauagguuucagaucaaaggaguggaacugaagucugguuauaaagacuggauacucuggaucucauucgccauuaguugcuuucugcuuugugucgcacuguugggcuucaucaugugggccugccagaaggggaacauucgguguaauaucugcauauga

SEQ ID NO: 141511 - RNA, 1701 nt, Artificial Sequence
  derived and/or modified CDS sequence (opt3) from hemagglutinin__InfluenzaA__ALE31964
augaagaccaucauugcccugagcuacauacucugccuuguguucgcucagaaaauccccggcaacgacaauuccacagcaacucuguguuuggggcaccaugccgucccuaacggaacgauuguuaagaccaucacaaaugauagaauugaggugacuaacgcgaccgaauuaguacaaaauucuucaaucggugagauaugcgacaguccacaccagauccuggauggcgaaaacuguacacuaauugacgcucuccugggggauccgcagugcgacggauuucagaauaaaaagugggaucuuuucguggagaggagcaaagccuauuccaacuguuaccccuauuacgucccugacuaugcaucucugcggucguugguggccucaagcggcacccucgaauuuaauaacgagaguuucaauuggacugguguuacacaaaacgggaccuccucugcuugcauccgccgaagcuccucaaguuucuucagccgucugaauuggcugacgcaucucaacuacacuuauccagcauuaaaugugaccaugcccaacaacgagcaguuugauaagcuguacauuuggggaguccaccauccuggcacagacaaggaucagaucuuccuuuacgcccagucuuccggcagaauaacugugucaaccaaaaggagccaacaggcuguaauuccaaauaucgggagucggccccgcauuagagacaucccuucuaggaucuccauuuauuggacaauaguuaagccaggagauaucuugcugauuaacagcaccgguaaucuaaucgccccgcggggcuacuuuaaaauacagucggggaagucuuccauuaugcgcucagacgcgcccaucggaaaauguaagagugaaugcaucacgccuaacggcagcauuccaaaugacaagcccuuccagaacgugaaucgaaucacuuauggugcauguccuagauacgucaaacacuccacacucaagcuggccaccgggaugaggaacgugccagagaaacaaacucggggaauuuuuggcgcuauagccggcuucaucgaaaaugggugggagggaaugguggaugguugguauggcuuucgucaccagaacucugaggggcgcggacaggcagcugaccuuaagagcacacaagccgcgauugaucagaucaauggcaaacugaacagauugaucgguaagaccaaugaaaaauuccaucagauugagaaggaauuuucagaggucgaagggaggauacaggaccucgagaaguacguugaggauacgaaaaucgaccuguggaguuauaacgccgaauuacugguggcacucgagaaucaacacaccauugaucuuacagacuccgaaaugaacaagcuguuugagaaaacuaagaaacaguugcgggaaaacgcugaggauaugggcaauggaugcuucaagaucuaccauaagugugacaacgccugcauuggcagcauccgaaaugggaccuacgaucacaacguauaucgcgacgaggcucuaaauaacagauuucagauaaaaggaguggaacugaagucugguuacaaagacuggauccucuggauuucauucgccaucaguugcuuucugcuuugugucgcacuguugggcuucauuaugugggccugccagaaggggaauaucagguguaacauaugcauuuga

SEQ ID NO: 141512 - RNA, 1701 nt, Artificial Sequence; identical to SEQ ID NO: 140489
  derived and/or modified CDS sequence (opt3) from hemagglutinin__InfluenzaA__ALE31965

SEQ ID NO: 141513 - RNA, 1701 nt, Artificial Sequence; identical to SEQ ID NO: 141147
  derived and/or modified CDS sequence (opt3) from hemagglutinin__InfluenzaA__ALE31966

SEQ ID NO: 141514 - RNA, 1701 nt, Artificial Sequence; identical to SEQ ID NO: 141417
  derived and/or modified CDS sequence (opt3) from hemagglutinin__InfluenzaA__ALE31967

SEQ ID NO: 141515 - RNA, 1701 nt, Artificial Sequence; identical to SEQ ID NO: 141033
  derived and/or modified CDS sequence (opt3) from hemagglutinin__InfluenzaA__ALE31968

SEQ ID NO: 141516 - RNA, 1701 nt, Artificial Sequence; identical to SEQ ID NO: 141140
  derived and/or modified CDS sequence (opt3) from hemagglutinin__InfluenzaA__ALE31969

SEQ ID NO: 141517 - RNA, 1701 nt, Artificial Sequence; identical to SEQ ID NO: 140489
  derived and/or modified CDS sequence (opt3) from hemagglutinin__InfluenzaA__ALE31970

SEQ ID NO: 141518 - RNA, 1701 nt, Artificial Sequence
  derived and/or modified CDS sequence (opt3) from hemagglutinin__InfluenzaA__ALE31971
augaagaccaucauugcccugagcuacauacucugccuuguguucgcucagaaaauccccggcaacgacaauuccacagcaacucuguguuuggggcaccaugccgucccuaacggaacgauuguuaagaccaucacaaaugauagaauugaggugacuaacgcgaccgaauuaguacaaaauucuucaaucggugagauaugcgacaguccacaccagauccuggauggcgaaaacuguacacuaauugacgcucuccugggggauccgcagugcgacggauuucagaauaaaaagugggaucuuuucguggagaggagcaaagccuauuccaacuguuaccccuaugacgucccugauuacgcaucucugcggucguugguggccucaagcggcacccucgaauuuaauaacgagaguuucaauuggacugguguuacacaaaacgggaccuccucugcuugcauccgccgaagcuccucaaguuucuucagccgucugaauuggcugacgcaucucaacuaugcauacccagccuuaaaugugacuaugcccaacaacgagcaguuugacaagcuguauauuuggggaguccaccauccuggcaccgauaaggaccagaucuuccuuuacgcucagucuuccggcagaauaacagugucaacuaaagggagccaacaggccguaauuccaaauaucggaaguaggccccggauucgcgauaucccuucuagaaucuccauuuacuggaccauaguuaagccaggugacaucuugcugauuaacagcacaggcaaucuaaucgcgccgaggggguauuuuaaaauacggucgggaaagucuuccauuaugcgcucagacgcacccaucggcaaauguaagagugaaugcaucaccccuaacgguagcauuccaaaugauaagcccuuccagaacgugaaucgaaucacguacggggccuguccuagauaugucaaacacuccacucucaagcuggcuacaggaaugaggaacgugccagagaaacagacccggggcauuuuuggcgccauagcaggguucaucgaaaauggaugggaggguaugguggacggcugguacggguuucgucaccaaaacucugagggacgcggccaggcugccgaucuuaagagcacucaggcggccauugaccaaaucaaugguaaacugaacagauugaucgggaagacaaaugaaaaauuccaucagauugagaaggaauuuucagaggucgaaggcaggauacaggaucucgagaaguauguugaggacaccaaaaucgaucuguggaguuacaacgcagaauuacugguggcucucgagaaucagcacacgauugaccuuaccgauuccgaaaugaacaagcuguuugagaaaacaaagaaacaauugcgggaaaacgccgaggacaugggaaauggcugcuucaagaucuaucauaagugugauaacgcuugcauugggagcauccgaaauggaacuuacgaccacaacguauaccgcgacgaggcccuaaauaacagauuucagauaaaagguguggaacugaagucuggcuauaaagauuggauccucuggauuucauucgcaaucaguugcuuucugcuuugugucgcccuguugggguucauuaugugggcuugccagaagggaaauaucagguguaacauaugcauuuga

SEQ ID NO: 141519 - RNA, 1701 nt, Artificial Sequence; identical to SEQ ID NO: 141033
  derived and/or modified CDS sequence (opt3) from hemagglutinin__InfluenzaA__ALE31972

SEQ ID NO: 141520 - RNA, 1701 nt, Artificial Sequence; identical to SEQ ID NO: 141033
  derived and/or modified CDS sequence (opt3) from hemagglutinin__InfluenzaA__ALE31973

SEQ ID NO: 141521 - RNA, 1701 nt, Artificial Sequence; identical to SEQ ID NO: 140678
  derived and/or modified CDS sequence (opt3) from hemagglutinin__InfluenzaA__ALE31974

SEQ ID NO: 141522 - RNA, 1701 nt, Artificial Sequence; identical to SEQ ID NO: 141033
  derived and/or modified CDS sequence (opt3) from hemagglutinin__InfluenzaA__ALE31975

SEQ ID NO: 141523 - RNA, 1701 nt, Artificial Sequence; identical to SEQ ID NO: 140489
  derived and/or modified CDS sequence (opt3) from hemagglutinin__InfluenzaA__ALE31976

SEQ ID NO: 141524 - RNA, 1701 nt, Artificial Sequence; identical to SEQ ID NO: 140489
  derived and/or modified CDS sequence (opt3) from hemagglutinin__InfluenzaA__ALE31977

SEQ ID NO: 141525 - RNA, 1701 nt, Artificial Sequence
  derived and/or modified CDS sequence (opt3) from hemagglutinin__InfluenzaA__ALE31978
augaagaccaucauugcccugagcuacauacucugccuuguguucgcucagaaaauccccggcaacgacaauuccacagcaacucuguguuuggggcaccaugccgucccuaacggaacgauuguuaagaccaucacaaaugauagaauugaggugacuaacgcgaccgaauuaguacaaaauucuucaaucggugagauaugcgacaguccacaccagauccuggauggcgaaaacuguacacuaauugacgcucuccugggggauccgcagugcgacggauuucagaauaaaaagugggaucuuuucguggagaggagcaaagccuauuccaacuguuaccccuaugacgucccugauuacgcaucucugcggucguugguggccucaagcggcacccucgaauuuaauaacgagaguuucaauuggacugguguuacacaaaacgggaccuccucugcuugcauccgcaagagcuccucaaguuucuucagccgacugaauuggcugacgcaucucaacuauacuuacccagcauuaaaugugaccaugcccaacaacgagcaguuugacaagcuguauauuuggggaguccaccauccuggcacagauaaagaccagaucuuccuuuacgcccguucuuccggcagaauaacugugucaaccaagaggagccagcaagcuguaauuccaaauaucgggagucggccccgcauuagagauaucccuucuaggaucuccauuuacuggacaauaguuaaaccaggagacaucuugcugauucacagcaccgguaaccuaaucgccccgcggggcuauuuuaagauacgcucggggaaaucuuccauuaugcgaucagacgcgcccaucggaaaguguaagagugaaugcaucacgccuaauggcagcauuccaaacgauaaacccuuccagaaugugaacagaaucacuuacggugcauguccuagguaugucaagcacuccacacucaaacuggccaccgggaugcggaaugugccagagaagcagacucguggaauuuuuggcgcuauagccggcuucaucgaaaacgggugggagggaaugguggacgguugguacggcuuucgccaucaaaauucugaggggagaggacaggcagcugaucuuaaaagcacacaggccgcgauugaccagaucaacggcaagcugaauagguugaucgguaaaaccaacgaaaaguuccaccaaauugagaaggaauuuucagaggucgaagggcggauacaggaucucgagaaauauguugaggacacgaagaucgaucuguggaguuacaaugccgaauuacugguggcacucgagaaccagcauaccauugaccuuacagauuccgaaaugaauaaacuguuugagaagacuaaaaagcaguugcgagaaaacgcugaggacaugggcaacggaugcuucaagaucuaucacaaaugugauaaugccugcauuggcagcauccgcaacgggaccuacgaccacaauguauacagagacgaggcucuaaacaauagguuucaaauaaagggaguggaacugaaaucugguuauaaggauuggauccucuggauuucauucgccaucaguugcuuucugcuuugugucgcacuguugggcuucauuaugugggccugccagaaagggaacauccgguguaauauaugcauuuga

SEQ ID NO: 141526 - RNA, 1701 nt, Artificial Sequence; identical to SEQ ID NO: 140489
  derived and/or modified CDS sequence (opt3) from hemagglutinin__InfluenzaA__ALE31979

SEQ ID NO: 141527 - RNA, 1701 nt, Artificial Sequence
  derived and/or modified CDS sequence (opt3) from hemagglutinin__InfluenzaA__ALE31980
augaagaccaucauugcccugagcuacauacucugccuuguguucgcucagaaaauccccggcaacgacaauuccacagcaacucuguguuuggggcaccaugccgucccuaacggaacgauuguuaagaccaucacaaaugauagaauugaggugacuaacgcgaccgaauuaguacaaaauucuucaaucggugagauaugcgacaguccacaccagauccuggauggcgaaaacuguacacuaauugacgcucuccugggggauccgcagugcgacggauuucagaauaaaaagugggaucuuuucguggagaggagcaaagccuauuccaacuguuaccccuaugacgucccugauuacgcaucucugcggucguugguggccucaagcggcacccucgaauuuaauaacgagaguuucaauuggacugguguuacacaaaacgggaccuccucugcuugcauccgccgaagcuccucaaguuucuucagccgucugaauuggcugacgcaucucaacuauacuuacccagcauuaaaugugaccaugcccaacaacgagcaguuugacaagcuguauauuuggggaguccaccauccuggcacagauaaggaccagaucuuccuuuacgcccagucuuccggcagaauaacugugucaaccaaaaggagccaacaggcuguaauuccaaauaucgggagucggccccgcauuagagauaucccuucuaggaucuccauuuacuggacaauaguuaagccaggagacaucuugcugauuaacagcaccgguaaucuaaucgccccgcggggcuauuuuaaaauacgcucggggaagucuuccauuaugcgaucagacgcgcccaucggaaaauguaagagugaaugcaucacgccuaacggcagcauuccaaaugauaagcccuuccagaacgugaauagaaucacuuacggugcauguccuagguaugucaaacacuccacacucaagcuggccaccgggaugcggaacgugccagagaaacagacucguggaauuuuuggcgcuauagccggcuucaucgaaaaugggugggagggaaugguggacgguugguacggcuuucgccaccaaaacucugaggggagaggacaggcagcugaucuuaagagcacacaggccgcgauugaccaaaucaauggcaaacugaacagguugaucgguaagaccaaugaaaaauuccaucagauugagaaggaauuuucagaggucgaagggcggauacaggaucucgagaaguauguugaggacacgaaaaucgaucuguggaguuacaacgccgaauuacugguggcacucgagaaucagcacaccauugaccuuacagauuccgaaaugaacaagcuguuugagaaaacuaagaaacaauugcgagaaaacgcugaggacaugggcaauggaugcuucaagaucuaucauaagugugauaacgccugcauuggcagcauccgcaaugggaccuacgaccacaacguauacagagacgaggcucuaaauaacagguuucagauaaaaggaguggaacugaagucugaguauaaagauuggauccucuggauuucauucgccaucaguugcuuucugcuuugugucgcacuguuggguuucauuaugugggccugccagaagggcaauauccgguguaacauaugcauuuga

SEQ ID NO: 141528 - RNA, 1701 nt, Artificial Sequence; identical to SEQ ID NO: 140489
  derived and/or modified CDS sequence (opt3) from hemagglutinin__InfluenzaA__ALE31981

SEQ ID NO: 141529 - RNA, 1701 nt, Artificial Sequence; identical to SEQ ID NO: 141029
  derived and/or modified CDS sequence (opt3) from hemagglutinin__InfluenzaA__ALE31995

SEQ ID NO: 141530 - RNA, 1701 nt, Artificial Sequence
  derived and/or modified CDS sequence (opt3) from hemagglutinin__InfluenzaA__ALE31996
augaagaccaucauugcccugagcuacauacucugccuuguguucgcucagaaaauccccggcaacgacaauuccacagcaacucuguguuuggggcaccaugccgucccuaacggaacgauuguuaagaccaucacaaaugauagaauugaggugacuaacgcgaccgaauuaguacaaaauucuucaaucggugagauaugcgacaguccacaccagauccuggauggcgaaaacuguacacuaauugacgcucuccugggggauccgcagugcgacggauuucagaauaaaaagugggaucuuuucguggagaggagcaaagccuauuccaacuguuaccccuaugacgucccugauuacgcaucucugcggucguugguggccucaagcggcacccucgaauuuaauaacgagaguuucaauuggacugguguuacacaaaacgggaccuccucugcuugcauccgccgaagcuccucaaguuucuucagccgucugaauuggcugacgcaucucaacuauacuuacccagcauuaaaugugaccaugcccaacaacgagcaguuugacaagcuguauauuuggggaguccaccauccuggcacagauaaggaccagaucuuccuuuacgcccagucuuccggcagaauaacugugucaaccaaaaggagccaacaggcuguaauuccaaauaucgggagucggccccgcauuagagauaucccuucuaggaucuccauuuacuggacaauaguuaagccaggagacaucuugcugauuaacagcaccgguaaucuaaucgccccgcggggcuauuuuaaaauacgcucggggaagucuuccauuaugcgaucagacgcgcccaucggaaaauguaagagugaaugcaucacgccuaacggcagcauuccaaaugauaagcccuuccagaacgugaauagagucacuuacggugcauguccuagguaugugaaacacuccacacucaagcuggccaccgggaugcggaacgugccagagaaacagacucguggaaucuuuggcgcuauugccggcuucauagaaaaugggugggagggaauggucgacgguugguacggcuuucgccaccaaaacucugaggggagaggacaggcagcugaucuuaagagcacacaggccgcgaucgaccaaauuaauggcaaacugaacagguugaucgguaagaccaaugaaaaauuccaucagaucgagaaggaauuuucagagguugaagggcggauucaggaucucgagaaguauguggaggacacgaaaauagaucuguggaguuacaacgccgaauuacugguagcacucgagaaucagcacaccaucgaccuuacagauuccgaaaugaacaagcuguuugagaaaacuaagaaacaauugcgagaaaacgcugaggacaugggcaauggaugcuucaagauuuaucauaagugugauaacgccugcaucggcagcauucgcaaugggaccuacgaccacaacguguacagagacgaggcucuaaauaacagguuucagaucaaaggagucgaacugaagucugguuauaaagauuggauacucuggaucucauucgccauuaguugcuuucugcuuuguguggcacuguugggcuucaucaugugggccugccagaaggggaauauucgguguaacaucugcauauga

SEQ ID NO: 141531 - RNA, 1701 nt, Artificial Sequence
  derived and/or modified CDS sequence (opt3) from hemagglutinin__InfluenzaA__ALE31997
augaagaccaucauugcccugagcuacauacucugccuuguguucgcucagaaaauccccggcaacgacaauuccacagcaacucuguguuuggggcaccaugccgucccuaacggaacgauuguuaagaccaucacaaaugauagaauugaggugacuaacgcgaccgaauuaguacaaaauucuucaaucggugagauaugcgacaguccacaccagauccuggauggcgaaaacuguacacuaauugacgcucuccugggggauccgcagugcgacggauuucagaauaaaaagugggaucuuuucaucgagaggagcaaagccuauuccaacuguuaccccuaugacgugccugauuacgcaucucugcggucguuggucgccucaagcggcacccucgaauuuaauaacgagaguuucaauuggacuggugugacacaaaacgggaccuccucugcuugcauucgccgaagcuccucaaguuucuucagccgucugaauuggcugacgcaucucaacuauacuuacccagcauuaaauguuaccaugcccaacaacgagcaguuugacaagcuguauaucuggggagugcaccauccuggcacagauaaggaccagauauuccuuuacgcccagucuuccggcagaauuacugucucaaccaaaaggagccaacaggcugugaucccaaauauugggagucggccccgcaucagagauaucccuucuaggauuuccauauacuggacaaucguaaagccaggagacauuuugcugaucaacagcaccgguaaucuaauagccccgcggggcuauuuuaaaauucgcucggggaagucuuccaucaugcgaucagacgcgcccaucggaaaauguaagagugaaugcauuacgccuaacggcagcaucccaaaugauaagcccuuccagaacguuaauagaauuacuuacggugcauguccuagguaugugaaacacuccacacucaagcuggccaccgggaugcggaacgucccagagaaacagacucguggaauauuuggcgcuaucgccggcuucauugaaaaugggugggagggaaugguggacgguugguacggcuuucgccaccaaaacucugaggggagaggacaggcagcugaucuuaagagcacacaggccgcgaucgaccaaaucaauggcaaacugaacagguugauugguaagaccaaugaaaaauuccaucagauagagaaggaauuuucagagguggaagggcggauccaggaucucgagaaguaugucgaggacacgaaaauugaucuguggaguuacaacgccgaauuacugguugcacucgagaaucagcacaccaucgaccuuacagauuccgaaaugaacaagcuguuugagaaaacuaagaaacaauugcgagaaaacgcugaggacaugggcaauggaugcuucaagauuuaucauaagugugauaacgccugcaucggcagcauacgcaaugggaccuacgaccacaacguguacagagacgaggcucuaaauaacagguuucagaucaaaggaguagaacugaagucugguuauaaagauuggauucucuggaucucauucgccauuaguugcuuucugcuuuguguggcacuguugggcuucaucaugugggccugccagaaggggaauauacgguguaacauuugcaucuga

SEQ ID NO: 141532 - RNA, 1701 nt, Artificial Sequence; identical to SEQ ID NO: 140489
  derived and/or modified CDS sequence (opt3) from hemagglutinin__InfluenzaA__ALE31998

SEQ ID NO: 141533 - RNA, 1701 nt, Artificial Sequence
  derived and/or modified CDS sequence (opt3) from hemagglutinin__InfluenzaA__ALE31999
augaagaccaucauugcccugagcuacauacucugccuuguguucgcucagaaaauccccggcaacgacaauuccacagcaacucuguguuuggggcaccaugccgucccuaacggaacgauuguuaagaccaucacaaaugauagaauugaggugacuaacgcgaccgaauuaguacaaaauucuucaaucggugagauaugcgacaguccacaccagauccuggauggcgaaaacuguacacuaauugacgcucuccugggggauccgcagugcgacggauuucagaauaaaaagugggaucuuuucguggagaggagcaaagccuauuccaacuguuaccccuaugacgucccugauuacgcaucucugcggucguugguggccucaagcggcacccucgaauuuaauaacgagaguuucaauuggacugguguuacacaaaacgggaccuccucugcuugcauccgccgaagcuccucaaguuucuucagccgucugaauuggcugacgcaucuccacuauacuuacccagcauuaaacgugaccaugcccaauaacgagcaguuugacaagcuguauauuuggggaguccaucacccuggcacagauaaggaccagaucuuccuuuacgcccagucuuccggcagaauaacugugucaaccaaaaggagccaacaggcuguaauuccaaacaucgggagucggccccgcauuagagauaucccuucuaggaucuccauuuacuggacaauaguuaagccaggagacaucuugcugauuaauagcaccgguaaccuaaucgccccgcggggcuauuuuaaaauacgcucggggaagucuuccauuaugcgaucagacgcgcccaucggaaaauguaagagugaaugcaucacgccuaauggcagcauuccaaacgauaagcccuuccagaaugugaacagaaucacuuacggugcauguccuagguaugucaaacacuccacacucaagcuggccaccgggaugcggaaugugccagagaaacagacucguggaauuuuuggcgcuauagccggcuucaucgaaaacgggugggagggaaugguggacgguugguacggcuuucgccaucaaaauucugaggggagaggacaggcagcugaucuuaagagcacacaggccgcgauugaccaaaucaacggcaaacugaauagguugaucgguaagaccaacgaaaaauuccaccagauugagaaggaauuuucagaggucgaagggcggauacaggaucucgagaaguauguugaggacacgaaaaucgaucuguggaguuacaaugccgaauuacugguggcacucgagaaccagcauaccauugaccuuacagauuccgaaaugaauaagcuguuugagaaaacuaagaaacaauugcgagaaaacgcugaggacaugggcaacggaugcuucaagaucuaucacaagugugauaaugccugcauuggcagcauccgcaacgggaccuacgaccacaauguauacagagacgaggcucuaaacaauagguuucagauaaaaggaguggaacugaagucugguuauaaagauuggauccucuggauuucauucgccaucaguugcuuucugcuuugugucgcacuguugggcuucauuaugugggccugccagaaggggaacauccgguguaauauaugcauuuga

SEQ ID NO: 141534 - RNA, 1701 nt, Artificial Sequence
  derived and/or modified CDS sequence (opt3) from hemagglutinin__InfluenzaA__ALE32000
augaagaccaucauugcccugagccacauacucugccuuguguucgcucagaaacugcccgagaacgacaauuccacagcaacuuuguguuuaggccaucacgccgucccuaacgggacgaucguuaagaccauuacaucugauagaaucgaagugacuaaugcgaccgagcugguacaaaacucaaguauuggagaaaucugcgacagcccacaucagauacuagaugguaaaaauuguacacucaucgacgcucugcuuggcgauccgcagugcgacggguuucagaacaagaaaugggaucuguucguggagagguccaaggccuacucuaauuguuaucccuacgacgucccugauuaugcaucguugcggucacucguggccagcaguggaacccuggaauuuaacgacgaguccuucaauugggcuggcguuacucaaaacgguacaucuagcgcaugcauucgcggguccaauucaaguuucuuuagccgacugaacuggcucacccacucuaauuuuaaguacccagccuuaaacgugacgaugcccaauaacgagcaguucgauaaacuguauaucuggggaguccaucacccuggcacugacaaggaucagauuuuucuuuacgcucaguccucaggccguaucaccgugagcacaaaaagaagucaacaggccguaauaccaaacauugggucuaggccccggauccgcaauauuccuuccagaaucagcaucuauuggacuauuguuaagccaggagacauauugcugaucaacucgaccgguaaucuaauugcgccgaggggcuacuucaaaauccggucugggaaguccucaauaaugcgcagugacgcacccauuggaaaguguaaaagcgaaugcaucacaccuaacggcuccaucccaaaugauaagcccuuucagaacgugaaucgaauuaccuacggugccuguccuagauaugucaaacagucuacgcucaagcuggcuacugggaugaggaacgugccagagaaacaaacacggggaaucuucggcgccauugcaggcuuuauagaaaaugggugggagggaaugaaggacgguugguacggcuuccgucaccagaacagcgaggggcgcggacaggcugccgaucuuaaaucaacccaagcggccaucgaccagauuaauggcaagcugaacagauugaucgguaagacuaaugaaaaauuccaucagaucgagaaggaauuuagugagguggaagggaggauucaggaucucgagaaauaugucgaggacacaaagauagaucugugguccuacaacgcagaauuacugguugcucucgagaaucaacacaccaucgaccuuacggauagcgaaaugaacaaacuguucgagaagaccaagaaacaguugcgggaaaacgccgaggacaugggcaauggaugcuuuaagauuuaucauaaaugugauaacgcuugcaucggcucuauucgaaaugggacauacgaccacgacguguaucgcgaugaggcccuaaacaauagauuccagaucaagggaguagaacugaaaucagguuacaaggacuggauacucuggaucaguuuugcaauuagcugcuuccugcuuuguguggcccuguugggcuuuaucaugugggcuugccagaaggggaacauuagguguaauaucugcauauga

SEQ ID NO: 141535 - RNA, 1701 nt, Artificial Sequence; identical to SEQ ID NO: 140489
  derived and/or modified CDS sequence (opt3) from hemagglutinin__InfluenzaA__ALE32001

SEQ ID NO: 141536 - RNA, 1701 nt, Artificial Sequence; identical to SEQ ID NO: 140489
  derived and/or modified CDS sequence (opt3) from hemagglutinin__InfluenzaA__ALE32002

SEQ ID NO: 141537 - RNA, 1701 nt, Artificial Sequence; identical to SEQ ID NO: 140589
  derived and/or modified CDS sequence (opt3) from hemagglutinin__InfluenzaA__ALE32003

SEQ ID NO: 141538 - RNA, 1701 nt, Artificial Sequence; identical to SEQ ID NO: 140489
  derived and/or modified CDS sequence (opt3) from hemagglutinin__InfluenzaA__ALE32004

SEQ ID NO: 141539 - RNA, 1701 nt, Artificial Sequence; identical to SEQ ID NO: 140489
  derived and/or modified CDS sequence (opt3) from hemagglutinin__InfluenzaA__ALE32005

SEQ ID NO: 141540 - RNA, 1701 nt, Artificial Sequence; identical to SEQ ID NO: 141033
  derived and/or modified CDS sequence (opt3) from hemagglutinin__InfluenzaA__ALE32006

SEQ ID NO: 141541 - RNA, 1701 nt, Artificial Sequence; identical to SEQ ID NO: 140489
  derived and/or modified CDS sequence (opt3) from hemagglutinin__InfluenzaA__ALE32007

SEQ ID NO: 141542 - RNA, 1701 nt, Artificial Sequence; identical to SEQ ID NO: 141040
  derived and/or modified CDS sequence (opt3) from hemagglutinin__InfluenzaA__ALE32008

SEQ ID NO: 141543 - RNA, 1701 nt, Artificial Sequence
  derived and/or modified CDS sequence (opt3) from hemagglutinin__InfluenzaA__ALE32009
augaagaccaucauugcccugagcuacauacucugccuuguguucgcucagaaacugcccgagaacgacaauuccacagcaacuuuguguuuaggccaccaugccgucccuaacgggacgaucguuaagaccauuacaucugauagaaucgaagugacuaaugcgaccgagcugguacaaaacucaaguauuggagaaaucugcgacagcccacaccagauacuagaugguaaaaauuguacacucaucgacgcucugcuuggcgauccgcagugcgacggguuucagaacaagaaaugggaucuguucguggagagguccaaggccuauucuaauuguuaccccuaugacgucccugauuacgcaucguugcggucacucguggccagcaguggaacccuggaauuuaacgacgaguccuucaauugggcuggcguuacucaaaacgguacaucuagcgcaugcauucgcggguccaauucaaguuucuuuagccgacugaacuggcucacccauucuaauuuuaaguauccagccuuaaacgugacgaugcccaauaacgagcaguucgauaaacuguacaucuggggaguccaccauccuggcacugacaaggaucagauuuuucuuuaugcucaguccucaggccguaucaccgugagcacaaaaagaagucaacaggccguaauaccaaacauugggucuaggccccggauccgcaauauuccuuccagaaucagcaucuacuggacuauuguuaagccaggagacauauugcugaucaacucgaccgguaaucuaauugcgccgaggggcuacuucaaaauccggucugggaaguccucaauaaugcgcagugacgcacccauuggaaaguguaaaagcgaaugcaucacaccuaacggcuccaucccaaaugauaagcccuuucagaacgugaaucgaauuaccuauggugccuguccuagauacgucaaacagucuacgcucaagcuggcuacugggaugaggaacgugccagagaaacaaacacggggaaucuucggcgccauugcaggcuuuauagaaaaugggugggagggaaugaaggacgguugguauggcuuccgucaccagaacagcgaggggcgcggacaggcugccgaucuuaaaucaacccaagcggccaucgaccagauuaauggcaagcugaacagauugaucgguaagacuaaugaaaaauuccaccagaucgagaaggaauuuagugagguggaagggaggauucaggaucucgagaaauacgucgaggacacaaagauagaucugugguccuauaacgcagaauuacugguugcucucgagaaucaacauaccaucgugcuuacggacagcgaaaugaacaaacuguucgagaagaccaagaaacaguugcgggaaaacgccgaggauaugggcaauggaugcuuuaagauuuaccacaaaugugacaacgcuugcaucggcucuauucgaaaugggacauaugaucaugacguauaccgcgacgaggcccuaaacaauagauuccagaucaagggaguggaacugaaaucagguuacaaggauuggauacucuggaucaguuuugcaauuagcugcuuccugcuuugugucgcccuguugggcuuuaucaugugggcuugccaggaggggaacauuagguguaauaucugcauauga

SEQ ID NO: 141544 - RNA, 1701 nt, Artificial Sequence
  derived and/or modified CDS sequence (opt3) from hemagglutinin__InfluenzaA__ALE32010
augaagaccaucauugcccugagcuacauacucugccuugcuuucgcacagaaaauccccggcaacgacaauuccacagccacucuguguuuggggcaccaugcggugccuaacggaacgauugucaagaccaucacaaaugauagaauugagguuacuaacgcuaccgaauuagugcaaaauucuucaaucggugagauaugcgacaguccacaccagauccuggauggcgaaaacuguacacuaauugacgcccuccugggggauccgcagugcgacggauuucagaauaaaaagugggaucuuuucguagagaggagcaaagcauauuccaacuguuaccccuaugacgugccugauuacgccucucugcggucguuggucgcuucaagcggcacccucgaauuuaauaacgagaguuucaauuggacuggugugacacaaaacgggaccuccucugcaugcauccgccgaagcuccucaaguuucuucagccgucugaauuggcugacgcaucuccacuauacuuacccagccuuaaacguuaccaugcccaauaacgagcaguuugacaagcuguauauuuggggagugcaucacccuggcacagauaaggaccagaucuuccuuuacgcucagucuuccggcagaauaacugucucaaccaaaaggagccaacaggccgugauuccaaacaucgggagucggccccgcauuagagauaucccuucuaggaucuccauuuacuggacaauaguaaagccaggagacaucuugcugauuaauagcaccgguaaccuaaucgcgccgcggggcuauuuuaaaauacgcucggggaagucuuccauuaugcgaucagacgcacccaucggaaaauguaagagugaaugcaucacgccuaauggcagcauuccaaacgauaagcccuuccagaauguuaacagaaucacuuacggugccuguccuagguaugugaaacacuccacacucaagcuggcuaccgggaugcggaaugucccagagaaacagacucguggaauuuuuggcgccauagcaggcuucaucgaaaacgggugggagggaaugguggacgguugguacggcuuucgccaucaaaauucugaggggagaggacaggcugccgaucuuaagagcacacaggcggccauugaccaaaucaacggcaaacugaauagguugaucgguaagaccaacgaaaaauuccaccagauugagaaggaauuuucagagguggaagggcggauacaggaucucgagaaguaugucgaggacacgaaaaucgaucuguggaguuacaaugcagaauuacugguugcucucgagaaccagcauaccauugaccuuacagauuccgaaaugaauaagcuguuugagaaaacuaagaaacaauugcgagaaaacgccgaggacaugggcaacggaugcuucaagaucuaucacaagugugauaaugcuugcauuggcagcauccgcaacgggaccuacgaccacaauguguacagagacgaggcccuaaacaauagguuucagauaaaaggaguagaacugaagucugguuauaaagauuggauccucuggauuucauucgcaaucaguugcuuucugcuuuguguggcccuguugggcuucauuaugugggcuugccagaaggggaacauccgguguaauauaugcauuuga

SEQ ID NO: 141545 - RNA, 1701 nt, Artificial Sequence; identical to SEQ ID NO: 141503
  derived and/or modified CDS sequence (opt3) from hemagglutinin__InfluenzaA__ALE32011

SEQ ID NO: 141546 - RNA, 1701 nt, Artificial Sequence; identical to SEQ ID NO: 141046
  derived and/or modified CDS sequence (opt3) from hemagglutinin__InfluenzaA__ALE32012

SEQ ID NO: 141547 - RNA, 1701 nt, Artificial Sequence; identical to SEQ ID NO: 140489
  derived and/or modified CDS sequence (opt3) from hemagglutinin__InfluenzaA__ALE32013

SEQ ID NO: 141548 - RNA, 1701 nt, Artificial Sequence
  derived and/or modified CDS sequence (opt3) from hemagglutinin__InfluenzaA__ALE32014
augaagaccaucauugcccugagcuacauacucugccuuguguucgcucagaaaauccccggcaacgacaauuccacagcaacucuguguuuggggcaccaugccgucccuaacggaacgauuguuaagaccaucacaaaugauagaauugaggugacuaacgcgaccgaauuaguacaaaauucuucaaucggugagauaugcgacaguccacaccagauccuggauggcgaaaacuguacacuaauugacgcucuccugggggauccgcagugcgacggauuucagaauaaaaagugggaucuuuucguggagaggagcaaagccuauuccaacuguuaccccuaugacgucccugauuacgcaucucugcggucguugguggccucaagcggcacccucgaauuuaauaacgagaguuucaauuggacugguguuacacaaaacgggaccuccucugcuugcauccgcaagagcuccucaaguuucuucagccgacugaauuggcugacgcagcucaacuauacuuacccagcauuaaaugugaccaugcccaacaacgagcaguuugacaagcuguauauuuggggaguccaucacccuggcacagauaaagaccagaucuuccuuuacgcccaaucuuccggccguauaacugugucaaccaagagaagccagcaggcuguaauuccaaauaucgggaguaggccccggauucgcgauaucccuucuagaaucuccauuuacuggacaauaguuaaaccaggagacaucuugcugauuaacagcaccgguaaucuaaucgccccgaggggcuauuuuaagauacggucggggaaaucuuccauuaugcgcucagacgcgcccaucggaaaguguaagagugaaugcaucacgccuaacggcagcauuccaaaugauaaacccuuccagaacgugaaucgaaucacuuacggugcauguccuagauaugucaagcauuccacacucaaacuggccaccgggaugaggaacgugccagagaagcaaacucggggaauuuuuggcgcuauagccggcuucaucgaaaaugggugggagggaaugguggacgguugguacggcuuucgucaccagaacucugaggggcgcggacaggcagcugaucuuaaaagcacacaagccgcgauugaccagaucaauggcaagcugaacagauugaucgguaaaaccaaugaaaaguuccaccagauugagaaggaauuuucagaggucgaagggaggauacaggaucucgagaaauauguugaggacacgaagaucgaucuguggaguuacaacgccgaauuacugguggcacucgagaaucaacauaccauugaccuuacagauuccgaaaugaacaaacuguuugagaagacuaaaaagcaguugcgggaaaacgcugaggacaugggcaauggaugcuucaagaucuaucacaaaugugauaacgccugcauuggcagcauccgaaaugggaccuacgaccauaacguauaccgcgacgaggcucuaaauaacagauuucagauaaagggaguggaacugaaaucugguuauaaggauuggauccucuggauuucauucgccaucaguugcuuucugcuuugugucgcacuguugggcuucauuaugugggccugccagaaagggaauaucagguguaacauaugcauuuga

SEQ ID NO: 141549 - RNA, 1701 nt, Artificial Sequence; identical to SEQ ID NO: 141374
  derived and/or modified CDS sequence (opt3) from hemagglutinin__InfluenzaA__ALE32015

SEQ ID NO: 141550 - RNA, 1701 nt, Artificial Sequence; identical to SEQ ID NO: 140489
  derived and/or modified CDS sequence (opt3) from hemagglutinin__InfluenzaA__ALE32016

SEQ ID NO: 141551 - RNA, 1701 nt, Artificial Sequence; identical to SEQ ID NO: 140489
  derived and/or modified CDS sequence (opt3) from hemagglutinin__InfluenzaA__ALE32017

SEQ ID NO: 141552 - RNA, 1701 nt, Artificial Sequence; identical to SEQ ID NO: 140489
  derived and/or modified CDS sequence (opt3) from hemagglutinin__InfluenzaA__ALE32018

SEQ ID NO: 141553 - RNA, 1701 nt, Artificial Sequence; identical to SEQ ID NO: 141033
  derived and/or modified CDS sequence (opt3) from hemagglutinin__InfluenzaA__ALE32020

SEQ ID NO: 141554 - RNA, 1701 nt, Artificial Sequence; identical to SEQ ID NO: 141140
  derived and/or modified CDS sequence (opt3) from hemagglutinin__InfluenzaA__ALE32021

SEQ ID NO: 141555 - RNA, 1701 nt, Artificial Sequence; identical to SEQ ID NO: 141220
  derived and/or modified CDS sequence (opt3) from hemagglutinin__InfluenzaA__ALE32022

SEQ ID NO: 141556 - RNA, 1701 nt, Artificial Sequence; identical to SEQ ID NO: 140489
  derived and/or modified CDS sequence (opt3) from hemagglutinin__InfluenzaA__ALE32023

SEQ ID NO: 141557 - RNA, 1701 nt, Artificial Sequence
  derived and/or modified CDS sequence (opt3) from hemagglutinin__InfluenzaA__ALE32024
augaagaccaucauugcccugagcuacauacucugccuuguguucgcucagaaacugcccggcaacgacaauuccacagcaacuuuguguuuagggcaccaugccgucccuaacggaacgaucguuaagaccauuacaaaugauagaaucgaggugacuaacgcgaccgaacugguacaaaauucuucaauuggugagaucugcgacaguccacaccagauacuagauggcaaaaacuguacacucaucgacgcucugcuuggggauccgcagugcgacggauuucagaauaagaggugggaucuguucguggaacggagcaaagccuauuccaacuguuaccccuaugacgucccugauuacgcaucuuugcgcucgcucguggccucaagcggcacccuggaguuuaaugacgaaaguuucaacugggcugguguuacucaaaaugggaaguccucugcaugcauucgaggaagcaacuccucauuuuucagucgucugaauuggcucacacauagcaacuuuaaguauccagccuuaaaugugaccaugcccaacaacgagcaguucgauaaacuguacaucuggggcguccaccauccuggcacggacaaggaucagauuuuucuuuaugcucacucuuccgggagaaucacugugucaaccaaaaggagccagcaagccguaauaccaaauauuggaagucggccccgcaucagaaacauuccuucuaggaucuccaucuacuggacaauuguuaagccaggugacauauugcugaucaauagcacuggcaaccuaauugcgccgcggggguacuucaaaauccagucgggaaagucuuccauaaugcgcucagacgcacccauuggcaaguguaaaagugagugcaucaccccuaaugguagcaucccaaacgauaagcccuuucagaaugugaaccgaauuacauaugggaccuguccuagauacgucaaacaguccacgcucaagcuggccacuggaaugaggaaugugccagaaaaacaaacacggggcaucuucggcgcuauugccggguuuauagagaacggaugggaagguaugaaggacggcugguauggguuccgucaccaaaauucugagggacgcggccaggcagcugaucuuaaaagcacccaggccgcgaucgaccagauuaacgguaagcugaauagauugaucgggaagacuaacgagaaauuccaucagaucgaaaaggaguuuucagaaguggagggcaggauucaggaucucgaaaaauacgucgaggacacaaagauagaucuguggaguuauaaugccgaguuacugguugcacucgaaaaccaacacaccaucgaccuuacggauuccgagaugaacaaacuguucgaaaagaccaagaaacaguugcgggagaaugcugaagacaugggaaacggcugcuuuaagauuuaccauaaaugugauaaugccugcaucgggagcauucgaaacggaacauaugaccacuacguguaccgcgacgaggcucuaaauaacagauuccagaucaaggguguagagcugaaaucuggcuauaaggauuggauacucuggaucucauuugccauuaguugcuuccugcuuuguguggcacuguugggguuuaucaugugggccugccagaagggaaauauuagguguaacaucugcauauga

SEQ ID NO: 141558 - RNA, 1701 nt, Artificial Sequence
  derived and/or modified CDS sequence (opt3) from hemagglutinin__InfluenzaA__ALE32025
augaagaccaucauugcccugagcuacauacucugccuuguguucgcucagaaaauccccggcaacgacaauuccacagcaacucuguguuuggggcaccaugccgucccuaacggaacgauuguuaagaccaucacaaaugauagaauugaggugacuaacgcgaccgaauuaguacaaaauucuucaaucggugagauaugcgacaguccacaccagauccuggauggcgaaaacuguacacuaauugacgcucuccugggggauccgcagugcgacggauuucagaauaaaaagugggaucuuuucguggagaggagcaaagccuauuccaacuguuaccccuaugacgucccugauuacgcaucucugcggucguugguggccucaagcggcacccucgaauuuaauaacgagaguuucaauuggacugguguuacacaaaacgggaccuccucugcuugcauccgcaagagcuccucaaguuucuucagccgacugaauuggcugacgcaucucaacuauacuuacccagcauuaaaugugaccaugcccaacaacgagcaguuugacaagcuguauauuuggggaguccaccauccuggcacagauaaagaccagaucuuccuuuacgcccguucuuccggcagaauaacugugucaaccaagaggagccagcaagcuguaauuccaaauaucgggagucggccccgcauuagagauaucccuucuaggaucuccauuuacuggacaauaguuaaaagcggagacaucuugcugauuaacucgaccgguaaucuaaucgccccacggggcuauuuuaagauacgcucugggaaauccucaauuaugcgaagugacgcgccgaucggaaaguguaagagcgaaugcaucacgcccaacggcuccauuccuaaugauaaaccauuccagaacgugaauagaaucacuuacggugcaugucccagguaugucaagcacucuacacucaaacuggccaccgggaugcggaacgugccugagaagcagacucguggaauuuuuggcgcuauagccggcuucaucgaaaaugggugggagggaaugguggacgguugguacggcuuucgccaccagaacagcgaggggagaggacaagcagcugaucuuaaaucaacacaggccgcgauugaccagaucaauggcaagcugaacagguugaucgguaaaaccaaugaaaaguuccaucaaauugagaaggaauuuagugaggucgaagggcggauacaggaucucgagaaauauguugaggacacgaagaucgaucugugguccuacaacgccgaauuacugguggcacucgagaaucagcacaccauugaccuuacagauagcgaaaugucuaaacuguuugagaagacuaaaaagcaguugcgagaaaacgcugaggacaugggcaacggaugcuucaagaucuaucauaaaugugauaaugccugcauuggcucaauccgcaacgggaccuacgaccacaauguauacagagacgaggcucuaaacaauagguuucaaauaaagggaguggaacugaaaagugguuauaaggauuggauccucuggauuagcuucgccaucuccugcuuucugcuuugugucgcacuguugggcuucauuaugugggccugccagaaagggaacauccgguguaauauaugcauuuga

SEQ ID NO: 141559 - RNA, 1701 nt, Artificial Sequence; identical to SEQ ID NO: 140489
  derived and/or modified CDS sequence (opt3) from hemagglutinin__InfluenzaA__ALE32026

SEQ ID NO: 141560 - RNA, 1701 nt, Artificial Sequence; identical to SEQ ID NO: 141033
  derived and/or modified CDS sequence (opt3) from hemagglutinin__InfluenzaA__ALE32027

SEQ ID NO: 141561 - RNA, 1701 nt, Artificial Sequence
  derived and/or modified CDS sequence (opt3) from hemagglutinin__InfluenzaA__ALE32028
augaagaccaucauugcccugagccacauacucugccuuguguucgcucagaaaauccccggcaacgacaauuccacagcaacucuguguuuggggcaucacgccgucccuaacggaacgauuguuaagaccaucacaaaugauagaauugaggugacuaacgcgaccgaauuaguacaaaauucuucaaucggugagauaugcgacaguccacaucagauccuggauggcgaaaacuguacacuaauugacgcucuccugggggauccgcagugcgacggauuucagaauaaaaagugggaucuuuucguggagaggagcaaagccuacuccaacuguuaucccuacgacgucccugauuaugcaucucugcggucguugguggccucaagcggcacccucgaauuuaauaacgagaguuucaauuggacugguguuacacaaaacgggaccuccucugcuugcauccgccgaagcuccucaaguuucuucagccgucugaauuggcugacgcaccucaacuacacuuauccagcauuaaaugugaccaugcccaacaacgagcaguuugacaagcuguacauuuggggaguccaucacccuggcacagauaaggaccagaucuuccuuuaugcccagucuuccggcagaauaacugugucaaccaaaaggagccaacaggcuguaauuccaaauaucgggagucggccccgcauuagagauaucccuucuaggaucuccauuuacuggacaauaguuaagccaggagacaucuugcugauuaacagcaccgguaaucuaaucgccccgcggggcuacuuuaaaauacgcucggggaagucuuccauuaugcgaucagacgcgcccaucggaaaauguaagagugaaugcaucacgccuaacggcagcauuccaaaugauaagcccuuccagaacgugaauagaaucacuuauggugcauguccuagguacgucaaacacuccacacucaagcuggccaccgggaugcggaacgugccagagaaacagacucguggaauuuuuggcgcuauagccggcuucaucgaaaaugggugggagggaaugauggacgguugguauggcuuucgccaucaaaacucugaggggagaggacaggcagcugaucuuaagagcacacaggccgcgauugaccaaaucaauggcaaacugaacagguugaucgguaagaccaaugaaaaauuccaccagauugagaaggaauuuucagagguggaagggcggauacaggaucucgagaaguacgucgaggacacgaaaaucgaucuguggaguuauaacgccgaauuacugguugcacucgagaaucagcauaccauugaccuuacagauuccgaaaugaacaagcuguuugagaaaacuaagaaacaauugcgagaaaacgcugaggacaugggcaauggaugcuucaagaucuaccacaagugugauaacgccugcauuggcagcauccgcaaugggaccuaugaccacaacguguacagagacgaggcucuaaauaacagguuucagauaaaaggaguagaacugaagucugguuacaaagauuggauccucuggauuucauucgccaucaguugcuuucugcuuuguguggcacuguugggcuucauuaugugggccugccagaaggggaauauccgguguaacauaugcauuuga

SEQ ID NO: 141562 - RNA, 1701 nt, Artificial Sequence; identical to SEQ ID NO: 141140
  derived and/or modified CDS sequence (opt3) from hemagglutinin__InfluenzaA__ALE32029

SEQ ID NO: 141563 - RNA, 1701 nt, Artificial Sequence
  derived and/or modified CDS sequence (opt3) from hemagglutinin__InfluenzaA__ALE32030
augaagaccaucauugcccugagccacauacucugccuuguguucgcucagaaaauccccggcaacgacaauuccacagcaacucuguguuuggggcaucacgccgucccuaacggaacgauuguuaagaccaucacaaaugauagaauugaggugacuaacgcgaccgaauuaguacaaaauucuucaaucggugagauaugcgacaguccacaucagauccuggauggcgaaaacuguacacuaauugacgcucuccugggggauccgcagugcgacggauuucagaauaaaaagugggaucuuuucguggagaggagcaaagccuacuccaacuguuaucccuacgacgucccugauuaugcaucucugcggucguugguggccucaagcggcacccucgaauuuaauaacgagaguuucaauuggacugguguuacacaaaacgggaccuccucugcuugcauccgccgaagcuccucaaguuucuucagccgucugaauuggcugacgcaccucaacuacauuuauccagcauuaaaugugacuaugcccaacaacgagcaguuugacaagcuguacaucuggggaguccaucacccuggcaccgauaaggaccagauauuccuuuaugcccagucuuccggcagaauuacagugucaacuaaaaggagccaacaggcuguaaucccaaauauugggagucggccccgcaucagagauaucccuucuaggauuuccauauacuggaccaucguuaagccaggagacauuuugcugaucaacagcacagguaaucuaauagccccgcggggcuacuuuaaaauucgcucggggaagucuuccaucaugcgaucagacgcgcccaucggaaaauguaagagugaaugcauuaccccuaacggcagcaucccaaaugauaagcccuuccagaacgugaauagaauuacguauggugcauguccuagguacgucaaacacuccacucucaagcuggccacagggaugcggaacgugccagagaaacagacccguggaauauuuggcgcuaucgccggcuucauugaaaaugggugggagggaaugauggacgguugguauggcuuucgccaucaaaacucugaggggagaggacaggcagcugaucuuaagagcacucaggccgcgaucgaccaaaucaauggcaaacugaacagguugauugguaagacaaaugaaaaauuccaccagauagagaaggaauuuucagagguggaagggcggauccaggaucucgagaaguacgucgaggacaccaaaauugaucuguggaguuauaacgccgaauuacugguugcacucgagaaucagcauacgaucgaccuuaccgauuccgaaaugaacaagcuguuugagaaaacaaagaaacaauugcgagaaaacgcugaggacaugggcaauggaugcuucaagauuuaccacaagugugauaacgccugcaucggcagcauacgcaaugggacuuaugaccacaacguguacagagacgaggcucuaaauaacagguuucagaucaaaggaguagaacugaagucugguuacaaagauuggauucucuggaucucauucgccauuaguugcuuucugcuuuguguggcacuguugggcuucaucaugugggccugccagaaggggaauauacgguguaacauuugcaucuga

SEQ ID NO: 141564 - RNA, 1701 nt, Artificial Sequence
  derived and/or modified CDS sequence (opt3) from hemagglutinin__InfluenzaA__ALE32031
augaagaccaucauugcccugagcuacauacucugccuuguguucgcucagaaaauccccggcaacgacaauuccacagcaacucuguguuuggggcaccaugccgucccuaacggaacgauuguuaagaccaucacaaaugauagaauugaggugacuaacgcgaccgaauuaguacaaaauucuucaaucggugagauaugcgacaguccacaccagauccuggauggcgaaaacuguacacuaauugacgcucuccugggggauccgcagugcgacggauuucagaauaaaaagugggaucuuuucguggagaggagcaaagccuauuccaacuguuaccccuaugacgucccugauuacgcaucucugcggucguugguggccucaagcggcacccucgaauuuaauaacgagaguuucaauuggacugguguuacacaaaacgggaccuccucugcuugcauccgccgaagcuccucaaguuucuucagccgucugaauuggcugacgcaucucaacuauacuuacccagcauuaaaugugaccaugcccaacaacgagcaguuugacaagcuguauauuuggggaguccaccauccuggcacagauaaggaccagaucuuccuuuacgcccagucuuccggcagaauaacugugucaaccaaaaggagccaacaggcuguaauuccaaauaucgggagucggccccgcauuagagauaucccuucuaggaucuccauuuacuggacaauaguuaagccaggagacaucuugcugauuaacagcaccgguaaucuaaucgccccgcggggcuauuuuaaaauacgcucggggaagucuuccauuaugcgaucagacgcgcccaucggaaaauguaagagugaaugcaucacgccuaacggcagcauuccaaaugauaagcccuuccagaacgugaauagaaucacuuacggugcauguccuagguaugucaaacacuccacacucaagcuggccaccgggaugcggaacgugccagagaaacagacucguggaauuuuuggcgcuauagccggcuucaucgaaaaugggugggagggaaugauggacgguugguacggcuuucgccaccaaaacucugaggggagaggacaggcagcugaucuuaagagcacacaggccgcgauugaccaaaucaauggcaaacugaacagguugaucgguaagaccaaugaaaaauuccaucagauugagaaggaauuuucagagguggaagggcggauacaggaucucgagaaguaugucgaggacacgaaaaucgaucuguggaguuacaacgccgaauuacugguugcacucgagaaucagcacaccauugaccuuacagauuccgaaaugaacaagcuguuugagaaaacuaagaaacaauugcgagaaaacgcugaggacaugggcaauggaugcuucaagaucuaucauaagugugauaacgccugcauuggcagcauccgcaaugggaccuacgaccacaacguguacagagacgaggcucuaaauaacagguuucagauaaaaggaguagaacugaagucugguuauaaagauuggauccucuggauuucauucgccaucaguugcuuucugcuuuguguggcacuguugggcuucauuaugugggccugccagaaggggaauauccgguguaacauaugcauuuga

SEQ ID NO: 141565 - RNA, 1701 nt, Artificial Sequence
  derived and/or modified CDS sequence (opt3) from hemagglutinin__InfluenzaA__ALE32032
augaagaccaucauugcccugagcuacauacucugccuuguguucgcucagaaaauccccggcaacgacaauuccacagcaacucuguguuuggggcaccaugccgucccuaacggaacgauuguuaagaccaucacaaaugauagaauugaggugacuaacgcgaccgaauuaguacaaaauucuucaaucggugagauaugcgacaguccacaccagauccuggauggcgaaaacuguacacuaauugacgcucuccugggggauccgcagugcgacggauuucagaauaaaaagugggaucuuuucguggagaggagcaaagccuauuccaacuguuaccccuaugacgucccugauuacgcaucucugcggucguugguggccucaagcggcacccucgaauuuaauaacgagaguuucaauuggacugguguuacacaaaacgggaccuccucugcuugcauccgccgaagcuccucaaguuucuucagccgucugaauuggcugacgcaucucaacuauacuuacccagcauuaaaugugaccaugcccaacaacgagcaguuugacaagcuguauauuuggggaguccaccauccuggcacagauaaggaccagaucuuccuuuacgcccagucuuccggcagaauagcugugucaacuaaaaggagccaacaggccguaauuccaaauaucgggagucggccccgcauuagagauaucccuucuaggaucuccauuuacuggaccauaguuaagccaggagacaucuugcugauuaacagcacagguaaucuaaucgcgccgcggggcuauuuuaaaauacgcucggggaagucuuccauuaugcgaucagacgcacccaucggaaaauguaagagugaaugcaucaccccuaacggcagcauuccaaaugauaagcccuuccagaacgugaauagaaucacguacggugccuguccuagguaugucaaacacuccacucucaagcuggcuacagggaugcggaacgugccagagaaacagacccguggaauuuuuggcgccauagcaggcuucaucgaaaaugggugggagggaaugauggacgguugguacggcuuucgccaccaaaacucugaggggagaggacaggcugccgaucuuaagagcacucaggcggccauugaccaaaucaauggcaaacugaacagguugaucgguaagacaaaugaaaaauuccaucagauugagaaggaauuuucagagguggaagggcggauacaggaucucgagaaguaugucgaggacaccaaaaucgaucuguggaguuacaacgcagaauuacugguugcucucgagaaucagcacacgauugaccuuaccgauuccgaaaugaacaagcuguuugagaaaacaaagaaacaauugcgagaaaacgccgaggacaugggcaauggaugcuucaagaucuaucauaagugugauaacgcuugcauuggcagcauccgcaaugggacuuacgaccacaacguguacagagacgaggcccuaaauaacagguuucagauaaaaggaguagaacugaagucugguuauaaagauuggauccucuggauuucauucgcaaucaguugcuuucugcuuuguguggcccuguugggcuucauuaugugggcuugccagaaggggaauauccgguguaacauaugcauuuga

SEQ ID NO: 141566 - RNA, 1701 nt, Artificial Sequence; identical to SEQ ID NO: 140489
  derived and/or modified CDS sequence (opt3) from hemagglutinin__InfluenzaA__ALE32033

SEQ ID NO: 141567 - RNA, 1701 nt, Artificial Sequence
  derived and/or modified CDS sequence (opt3) from hemagglutinin__InfluenzaA__ALE32034
augaagaccaucauugcccugggcuacauacucugccuuguguucgcucagaaaauccccgggaacgacaauagcacagcaacucuguguuugggacaccaugccgucccuaacgguacgauuguuaagaccaucacaaaugauagaauugaggugacuaacgcgaccgaauuaguacaaaauuccucuaucggcgagauaugcgacucaccacacaaaauccuggauggggaaaacuguacacuaauugacgcucuccugggagauccgcagugcgacggcuuucagaauaagaaaugggaucuuuucguggagaggaguaaggccuauagcaacuguuaccccuaugacgucccugauuacgcaucccugcggucuuugguggccucgucagguacccucgaauuuaauaacgagagcuucaauuggacugggguuacacagaacggaaccaguuccgcuugcauccgccgaucuagcuccucauuuuucagucgucugaauuggcugacgcaucucaaguauacuuacccagcauuaaacgugaccaugcccaauaacgagcaauuugacaaacuguauauuuggggcguccaccauccuggcacagauaaggaccagaucuuccuuuacgcccagagcucugggagaauaacuguguccaccaaaaggucacagcaagcuguaauuccaaacaucggaagccggccccgcauuagagauaucccuaguaggaucucuauuuacuggacaauaguuaagccaggugacaucuugcugauuaauuccaccggcaaccuaaucgccccgcggggguauuuuaaaauacgcagcggaaagucgucuauuaugcgauccgacgcgcccaucggcaaguguaaaucagaaugcaucacgccuaaugguaguauuccaaacgauaagcccuuccagaaugugaacagaaucacuuacggggcauguccuagguaugucaaacacagcacacucaagcuggccaccggaaugcggaaugugccagagaaacagacucguggcauuuuuggcgcuauagccggguucaucgaaaacggaugggaggguaugguggacggcugguacggguuucgccaccagaauagcgagggaagaggccaagcagcugaucuuaagucuacacaggccgcgauugaccagaucaacgguaaacugaauagguugaucgggaagaccaacgaaaaguuccaucaaauugagaaagaguucagcgaagucgaaggccggauacaggaucucgagaaguauguugaggacacgaaaaucgaucuguggucauacaaugccgaauuacugguggcacucgagaaccagcacaccauugaccuuacagauagugaaaugaauaagcuguuugagaaaacuaagaagcaguugcgagaaaacgcugaggacaugggaaacggcugcuucaaaaucuaucauaagugugauaaugccugcauuggguccauccgcaacggaaccuacgaccacaauguauacagagacgaggcucuaaacaauagguuucaaauaaaagguguggaacugaaguccggcuauaaagauuggauccucuggauuucuuucgccaucucaugcuuucugcuuugugucgcacuguugggguucauuaugugggccugccagaagggaaacauccgguguaauauaugcauuuga

SEQ ID NO: 141568 - RNA, 1701 nt, Artificial Sequence; identical to SEQ ID NO: 141379
  derived and/or modified CDS sequence (opt3) from hemagglutinin__InfluenzaA__ALE32035

SEQ ID NO: 141569 - RNA, 1701 nt, Artificial Sequence
  derived and/or modified CDS sequence (opt3) from hemagglutinin__InfluenzaA__ALE32036
augaagaccaucauugcccugggcuacauacucugccuuguguucgcucagaaaauccccgggaacgacaauagcacagcaacucuguguuugggacaccaugccgucccuaacgguacgauuguuaagaccaucacaaaugauagaauugaggugacuaacgcgaccgaauuaguacaaaauuccucuaucggcgagauaugcgacucaccacacaaaauccuggauggggaaaacuguacacuaauugacgcucuccugggagauccgcagugcgacggcuuucagaauaagaaaugggaucuuuucguggagaggaguaaggccuauagcaacuguuaccccuaugacgucccugauuacgcaucccugcggucuuugguggccucgucagguacccucgaauuuaauaacgagagcuucaauuggacugggguuacacagaacggaaccaguuccgcuugcauccgccgaucuagcuccucauuuuucagucgucugaauuggcugacgcaucuccacuauacuuacccagcauuaaacgugaccaugcccaauaacgagcaauuugacaagcuguauauuuggggcguccaucacccuggcacagauaaagaccagaucuuccuuuacgcccagagcucugggagaauaacuguguccaccaagaggucacagcaagcuguaauuccaaacaucggaagccggccccgcauuagagauaucccuaguaggaucucuauuuacuggacaauaguuaaaccaggugacaucuugcugauuaauuccaccggcaaccuaaucgccccgcggggguauuuuaagauacgcagcggaaaaucgucuauuaugcgauccgacgcgcccaucggcaaguguaagucagaaugcaucacgccuaaugguaguauuccaaacgauaaacccuuccagaaugugaacagaaucacuuacggggcauguccuagguaugucaagcacagcacacucaaacuggccaccggaaugcggaaugugccagagaagcagacucguggcauuuuuggcgcuauagccggguucaucgaaaacggaugggaggguaugguggacggcugguacggguuucgccaucaaaauuccgagggaagaggccaggcagcugaucuuaaaucuacacaggccgcgauugaccagaucaacgguaagcugaauagguugaucgggaaaaccaacgaaaaguuccaccaaauugagaaggaguucagcgaagucgaaggccggauacaggaucucgagaaauauguugaggacacgaagaucgaucuguggucauacaaugccgaauuacugguggcacucgagaaccagcauaccauugaccuuacagauagugaaaugaauaaacuguuugagaagacuaaaaagcaguugcgagaaaacgcugaggacaugggaaacggcugcuucaagaucuaucacaaaugugauaaugccugcauuggguccauccgcaacggaaccuacgaccacaauguauacagagacgaggcucuaaacaauagguuucaaauaaaggguguggaacugaaaagcggcuauaaggauuggauccucuggauuucuuucgccaucucaugcuuucugcuuugugucgcacuguugggguucauuaugugggccugccagaaaggaaacauccgguguaauauaugcauuuga

SEQ ID NO: 141570 - RNA, 1701 nt, Artificial Sequence
  derived and/or modified CDS sequence (opt3) from hemagglutinin__InfluenzaA__ALE32037
augaagaccaucauugcccugagcuacauacucugccuuguguucgcucagaaaauccccggcaacgacaauuccacagcaacucuguguuuggggcaccaugccgucccuaacggaacgauuguuaagaccaucacaaaugauagaauugaggugacuaacgcgaccgaauuaguacaaaauucuucaaucggugagauaugcgacaguccacaccagauccuggauggcgaaaacuguacacuaauugacgcucuccugggggauccgcagugcgacggauuucagaauaaaaagugggaucuuuucguggagaggagcaaagccuauuccaacuguuaccccuaugacgucccugauuacgcaucucugcggucguugguggccucaagcggcacccucgaauuuaauaacgagaguuucaauuggacugguguuacacaaaacgggaccuccucugcuugcauccgccgaagcuccucaaguuucuucagccgucugaauuggcugacgcaucucaacuauaaguacccagcauuaaaugugacuaugcccaacaacgagcaguuugacaagcuguauauuuggggaguccaccauccuggcaccgauaaagaccagaucuuccuuuacgcccagucuuccggcagaauaacagugucaacuaagaggagccaacaggcuguaauuccaaauaucgggagucggccccgcauuagagauaucccuucuaggaucuccauuuacuggaccauaguuaaaccaggagacaucuugcugauuaacagcacagguaaucuaaucgccccgcggggcuauuuuaagauacucucggggaaaucuuccauuaugcgcucagacgcgcccaucggaaaguguaagagugaaugcaucaccccuaacggcagcauuccaaaugauaaacccuuccagaacgugaaucgaaucacguacggugcauguccuagauaugucaagcacuccacucugaaacuugccacagggaugaggaacgugccagagaagcagacccggggaauuuuuggcgcuauagccggcuucaucgaaaaugggugggagggaaugguggacgguugguacggcuuucgucaccaaaacucugaggggcgcggacaggcagcugaucugaaaagcacucaggccgcgauugaccaaaucaauggcaaguugaacagacucaucgguaaaacaaaugaaaaguuccaucagauugagaaggaauuuucagaggucgaagggaggauacaggaucuggagaaauauguugaggacaccaagaucgauuuauggaguuacaacgccgaacugcucguggcacuugagaaucagcacacgauugaccugaccgauuccgaaaugaacaaauuguuugagaagacuaaaaagcaacuacgggaaaacgcugaggacaugggcaauggaugcuucaagaucuaucauaaaugugauaacgccugcauuggcagcauccgaaaugggacauacgaccacaacguauaccgcgacgaggcucugaauaacagauuucagauaaagggaguggaacucaaaucugguuauaaggauuggauccuguggauuucauucgccaucaguugcuuucuucugugugucgcauugcucggcuucauuaugugggccugccagaaagggaauaucagguguaacauaugcauuuga

SEQ ID NO: 141571 - RNA, 1701 nt, Artificial Sequence
  derived and/or modified CDS sequence (opt3) from hemagglutinin__InfluenzaA__ALE32038
augaagaccaucauugcccugagcuacauacucugccuuguguucgcucagaaaauccccggcaacgacaauuccacagcaacucuguguuuggggcaccaugccgucccuaacggaacgauuguuaagaccaucacaaaugauagaauugaggugacuaacgcgaccgaauuaguacaaaauucuucaaucggugagauaugcgacaguccacaccagauccuggauggcgaaaacuguacacuaauugacgcucuccugggggauccgcagugcgacggauuucagaauaaaaagugggaucuuuucguggagaggagcaaagccuauuccaacuguuaccccuaugacgucccugauuacgcaucucugcggucguugguggccucaagcggcacccucgaauuuaauaacgagaguuucaauuggacugguguuacacaaaacgggaccuccucugcuugcauccgccgaagcuccucaaguuucuucagccgucugaauuggcugacgcaucucaacuauacuuacccagcauuaaaugugaccaugcccaacaacgagcaguuugacaagcuguauauuuggggaguccaccauccuggcacagauaaggaccagaucuuccuuuacgcccagucuuccggcagaauaacugugucaaccaaaaggagccaacaggcuguaauuccaaauaucgggagucggccccgcauuagagauaucccuucuaggaucuccauuuacuggacaauaguuaagccaggagacaucuugcugauuaacagcaaagguaaucuaaucgccccgcggggcuauuuuaagauacgcucggggaaaucuuccauuaugcgaucagacgcgcccaucggaaaguguaagagugaaugcaucaccccuaacggcagcauuccaaaugauaaacccuuccagaacgugaauagaaucacguacggugcauguccuagguaugucaagcacuccacucucaaacuggccacagggaugcggaacgugccagagaagcagacccguggaauuuuuggcgcuauagccggcuucaucgaaaaugggugggagggaaugguggacgguugguacggcuuucgccaccuuaacucugaggggagaggacaagcagcugaucugaaaagcacucaggccgcgauugaccagaucaauggcaaguugaacaggcucaucgguaaaacaaaugaaaaguuccaucaaauugagaaggaauuuucagaggucgaagggcggauacaggaucuggagaaauauguugaggacaccaagaucgauuuauggaguuacaacgccgaacugcucguggcacuugagaaucagcacacgauugaccugaccgauuccgaaaugaacaaauuguuugagaagacuaaaaagcagcuacgagaaaacgcugaggacaugggcaauggaugcuucaagaucuaucauaaaugugauaacgccugcauuggcagcauccgcaaugggacauacgaccacaacguauacagagacgaggcucugaauaacagguuucaaauaaagggaguggaacucaaaucugguuauaaggauuggauccuguggauuucauucgccaucaguugcuuucuucugugugucgcauugcucggcuucauuaugugggccugccagaaagggaauauccgguguaacauaugcauuuga

SEQ ID NO: 141572 - RNA, 1701 nt, Artificial Sequence; identical to SEQ ID NO: 141147
  derived and/or modified CDS sequence (opt3) from hemagglutinin__InfluenzaA__ALE32039

SEQ ID NO: 141573 - RNA, 1701 nt, Artificial Sequence
  derived and/or modified CDS sequence (opt3) from hemagglutinin__InfluenzaA__ALE32040
augaagaccaucauugcccugagcuacauacucugccuuguguucgcucagaaaauccccggcaacgacaauuccacagcaacucuguguuuggggcaccaugccgucccuaacggaacgauuguuaagaccaucacaaaugauagaauugaggugacuaacgcgaccgaauuaguacaaaauucuucaaucggugagauaugcgacaguccacaccagauccuggauggcgaaaacuguacacuaauugacgcucuccugggggauccgcagugcgacggauuucagaauaaaaagugggaucuuuucguggagaggagcaaagccuauuccaacuguuaccccuaugacgucccugauuacgcaucucugcggucguugguggccucaagcggcacccucgaauuuaauaacgagaguuucaauuggacugguguuacacaaaacgggaccuccucugcuugcauccgccgaagcuccucaaguuucuucagccgucugaauuggcugacgcaucucaacuauacuuacccagcauuaaaugugaccaugcccaacaacgagcaguuugacaagcuguauauuuggggaguccaccauccuggcacagauaaggaccagaucuuccuuuacgcccagucuuccggcagaauaacugugucaaccaaaaggagccaacaggcuguaauuccaaauaucgggagucggccccgcauuagagauaucccuucuaggaucuccauuuacuggacaauaguuaagccaggagacaucuugcugauuaacagcaccgguaaucuaaucgccccgcggggcuauuuuaaaauacgcucggggacgucuuccauuaugcgaucagacgcgcccaucggaaaguguaaaagugaaugcaucacuccuaacggcagcauuccaaaugauaagcccuuccagaacgugaauagaaucacauacggugcauguccuagguaugucaagcacuccacccucaaacuggccacugggaugcggaacgugccagagaagcagacacguggaauuuuuggcgcuauagccggcuucaucgaaaaugggugggagggaaugguggacgguugguacggcuuucgccaccaaaacucugaggggagaggacaggcagcugaucuuaaaagcacccaggccgcgauugaccaaaucaauggcaagcugaacagguugaucgguaaaacgaaugaaaaguuccaucagauugagaaagaauuuucagaggucgaagggcggauacaggaucucgagaaguauguugaggacaccaagaucgaucuguggaguuacaacgccgaauuacugguggcacucgagaaucagcacacaauugaccuuacugauuccgaaaugaacaaacuguuugagaagaccaaaaagcaauugcgagaaaacgcugaggacaugggcaauggaugcuucaaaaucuaucauaagugugauaacgccugcauuggcagcauccgcaaugggacauacgaccacaacguauacagagacgaggcucuaaauaacagguuucagauaaagggaguggaacugaaaucugguuauaaggauuggauccucuggauuucauucgccaucaguugcuuucugcuuugugucgcacuguugggcuucauuaugugggccugccagaaagggaauauccgguguaacauaugcauuuga

SEQ ID NO: 141574 - RNA, 1701 nt, Artificial Sequence; identical to SEQ ID NO: 140489
  derived and/or modified CDS sequence (opt3) from hemagglutinin__InfluenzaA__ALE32041

SEQ ID NO: 141575 - RNA, 1701 nt, Artificial Sequence; identical to SEQ ID NO: 140489
  derived and/or modified CDS sequence (opt3) from hemagglutinin__InfluenzaA__ALE32042

SEQ ID NO: 141576 - RNA, 1701 nt, Artificial Sequence
  derived and/or modified CDS sequence (opt3) from hemagglutinin__InfluenzaA__ALE32043
augaagaccaucauugcccugagcuacauacucugccuuguguucgcucagaaaauccccggcaacgacaauuccacagcaacucuguguuuggggcaccaugccgucccuaacggaacgauuguuaagaccaucacaaaugauagaauugaggugacuaacgcgaccgaauuaguacaaaauucuucaaucggugagauaugcgacaguccacaccagauccuggauggcgaaaacuguacacuaauugacgcucuccugggggauccgcagugcgacggauuucagaauaaaaagugggaucuuuucguggagaggagcaaagccuauuccaacuguuaccccuaugacgucccugauuacaccucucugcggucguugguggcaucaagcggcacucucgaauuuaauaacgagaguuucaauuggacagguguuacccaaaacgggacguccucugccugcauccgccgaagcuccucaaguuucuucagccgucugaauuggcugacucaucucaacuauaccuacccagcuuuaaaugugacaaugcccaacaacgagcaguuugacaagcuguauauuuggggaguccaccauccuggcacugauaaggaccagaucuuccuuuacgcacagucuuccggcagaauaaccgugucaacaaaaaggagccaacaggccguaauuccaaauaucgggagucggccccgcauuagagauaucccuucuaggaucuccauuuacuggaccauaguuaagccaggagacaucuugcugauuaacagcacggguaaucuaaucgcuccgcggggcuauuuuaaaauacgcucggggaagucuuccauuaugcgaucagacgcccccaucggaaaauguaagagugaaugcaucacuccuaacggcagcauuccaaaugauaagcccuuccagaacgugaauagaaucacauacggugcguguccuagguaugucaaacacuccacccucaagcuggcaacugggaugcggaacgugccagagaaacagacacguggaauuuuuggcgccauagcuggcuucaucgaaaaugggugggagggaaugguggacgguugguacggcuuucgccaccaaaacucugaggggagaggacaggccgcagaucuuaagagcacccaggcugccauugaccaaaucaauggcaaacugaacagguugaucgguaagacgaaugaaaaauuccaucagauugagaaggaauuuucagaggucgaagggcggauacaggaucucgagaaguauguugaggacaccaaaaucgaucuguggaguuacaacgcggaauuacugguggcccucgagaaucagcacacaauugaccuuacugauuccgaaaugaacaagcuguuugagaaaaccaagaaacaauugcgagaaaacgcagaggacaugggcaauggaugcuucaagaucuaucauaagugugauaacgcuugcauuggcagcauccgcaaugggacauacgaccacaacguauacagagacgaggcccuaaauaacagguuucagauaaaaggaguggaacugaagucugguuauaaagauuggauccucuggauuucauucgcuaucaguugcuuucugcuuugugucgcccuguugggcuucauuaugugggcaugccagaaggggaauauccgguguaacauaugcauuuga

SEQ ID NO: 141577 - RNA, 1701 nt, Artificial Sequence; identical to SEQ ID NO: 140489
  derived and/or modified CDS sequence (opt3) from hemagglutinin__InfluenzaA__ALE32044

SEQ ID NO: 141578 - RNA, 1701 nt, Artificial Sequence; identical to SEQ ID NO: 140489
  derived and/or modified CDS sequence (opt3) from hemagglutinin__InfluenzaA__ALE32045

SEQ ID NO: 141579 - RNA, 1701 nt, Artificial Sequence; identical to SEQ ID NO: 140489
  derived and/or modified CDS sequence (opt3) from hemagglutinin__InfluenzaA__ALE32046

SEQ ID NO: 141580 - RNA, 1701 nt, Artificial Sequence
  derived and/or modified CDS sequence (opt3) from hemagglutinin__InfluenzaA__ALE32047
augaagaccaucauugcccugagcuacauacucugccuuguguucgcucagaaaauccccggcaacgacaauuccacagcaacucuguguuuggggcaccaugccgucccuaacggaacgauuguuaagaccaucacaaaugauagaauugaggugacuaacgcgaccgaauuaguacaaaauucuucaaucggugagauaugcgacaguccacaccaggugcuggauggcgaaaacuguacacuaaucgacgcucuccugggggauccgcagugcgacggauuucagaauaaaaagugggaucuuuucgucgagaggagcaaagccuauuccaacuguuaccccuaugacgugccugauuacgcaucucugcggucguugguugccucaagcggcacccucgaauuuaauaacgagaguuucaauuggacuggugugacacaaaacgggaccuccucugcuugcauucgccgaagcuccucaaguuucuucagccgucugaauuggcugacgcaucucaacuauacuuacccagcauuaaaugucaccaugcccaacaacgagcaguuugacaagcuguauaucuggggagugcaccauccuggcacagauaaggaccagauuuuccuuuacgcccagucuuccggcagaaucacuguaucaaccaaaaggagccaacaggcuguuauaccaaauauugggagucggccccgcaucagagauauuccuucuaggaucuccaucuacuggacaauugugaagccaggagacauauugcugaucaacagcaccgguaaucuaauugccccgcggggcuauuuuaaaauccgcucggggaagucuuccauaaugauuucagacgcgcccaucggaaaauguaagagugaaugcaucacgccuaacggcagcauuccauccgauaagcccuuccagaaugucaaccgaaucacuuacggugcauguccuagauaugugaaacacucuacacucaagcuggccaccgggaugaggaaugugccagagaaacagacucggggaauuuuuggcgcuauagccggcuucaucgaaaacgggugggagggaauggucgacgguugguacggcuuucgucaccaaaauagcgaggggcgcggacaggcagcugaucuuaagucaacacaggccgcgauugaccaaaucaacggcaaacugaauagauugaucgguaagaccaacgaaaaauuccaucagauugagaaggaauuuagugagguugaagggaggauacaggaucucgagaaguauguggaggacacgaaaaucgaucugugguccuacaaugccgaauuacugguagcacucgagaaccagcacaccauugaccuuacagauagcgaaaugaauaagcuguuugagaaaacuaagaaacaauugcgggaaaacgcugaggacaugggcaacggaugcuucaagaucuaucauaagugugauaaugccugcauuggcucuauccgaaacgggaccuacgaccacaauguguaccgcgacgaggcucuaaacaauagauuucagauaaaaggagucgaacugaagucagguuauaaagauuggauccucuggauuaguuucgccaucagcugcuuucugcuuuguguggcacuguugggcuucauuaugugggccugccagaaggggaacaucagguguaauauaugcauuuga

SEQ ID NO: 141581 - RNA, 1701 nt, Artificial Sequence; identical to SEQ ID NO: 140489
  derived and/or modified CDS sequence (opt3) from hemagglutinin__InfluenzaA__ALE32048

SEQ ID NO: 141582 - RNA, 1701 nt, Artificial Sequence; identical to SEQ ID NO: 141147
  derived and/or modified CDS sequence (opt3) from hemagglutinin__InfluenzaA__ALE32049

SEQ ID NO: 141583 - RNA, 1701 nt, Artificial Sequence
  derived and/or modified CDS sequence (opt3) from hemagglutinin__InfluenzaA__ALE32050
augaagaccaucauugcccugagcuacauacucugccuuguguucgcucagaaaauccccggcaacgacaauuccacagcaacucuguguuuggggcaccaugccgucccuaacggaacgauuguuaagaccaucacaaaugauagaauugaggugacuaacgcgaccgaauuaguacaaaauucuucaaucggugagauaugcgacaguccacaccagauccuggauggcgaaaacuguacacuaauugacgcucuccugggggauccgcagugcgacggauuucagaauaaaaagugggaucuuuucguggagaggagcaaagccuauuccaacuguuaccccuaugacgucccugauuacgcaucucugcggucguugguggccucaagcggcacccucgaauuuaauaacgagaguuucaauuggacugguguuacacaagacgggaccuccucugcuugcauccgccgaagcuccucaaguuucuucagccgucugaacuggcugacgcaucucaauuauacuuacccagcauuaaacgugaccaugcccaauaacgagcaguuugauaagcuguauauuuggggaguccaccauccuggcacagacaaggaucagaucuuccuuuacgcccagucuuccggcagaauaacugugucaaccaaaaggagccaacaggcuguaauuccaaacaucgggagucggccccgcauuagagacaucccuucuaggaucuccauuuacuggacaauaguuaagccaggagacaucuugcugauuaauagcaccgguaaccuaaucgccccgcggggcuauuuuaaaauacgcucggggaagucuuccauuaugcgaucagaugcgcccaucggaaaauguaagagugaaugcaucacgccuaauggcagcauuccaaacgacaagcccuuccagaaugugaacagaaucacuuacggugcauguccuagguaugucaaacacuccacacucaagcuggccaccgggaugcggaaugugccagagaaacagacucguggaauuuuuggcgcuauagccggcuucaucgaaaacgggugggagggaaugguggaugguugguacggcuuucgccaccaaaauucugaggggagaggacaggcagcugaccuuaagagcacacaggccgcgauugaucaaaucaacggcaaacugaauagguugaucgguaagaccaacgaaaaauuccaucagauugagaaggaauuuucagaggucgaagggcggauacaggaccucgagaaguauguugaggauacgaaaaucgaccuguggaguuacaaugccgaauuacugguggcacucgagaaccagcacaccauugaucuuacagacuccgaaaugaauaagcuguuugagaaaacuaagaaacaauugcgagaaaacgcugaggauaugggcaacggaugcuucaagaucuaucauaagugugacaaugccugcauuggcagcauccgcaacgggaccuacgaccacaauguauacagagaugaggcucuaaacaauagguuucagauaaaaggaguggaacugaagucugguuauaaagacuggauccucuggauuucauucgccaucaguugcuuucugcuuugugucgcacuguugggcuucauuaugugggccugccagaaggggaacauccgguguaauauaugcauuuga

SEQ ID NO: 141584 - RNA, 1701 nt, Artificial Sequence
  derived and/or modified CDS sequence (opt3) from hemagglutinin__InfluenzaA__ALE32051
augaagaccaucauugcccugagcuacauacucugccuuguguucgcucagaaaauccccggcaacgacaauuccacagcaacucuguguuuggggcaccaugccgucccuaacggaacgauuguuaagaccaucacaaaugauagaauugaggugacuaacgcgaccgaauuaguacaaaauucuucaaucggugagauaugcgacaguccacaccagauccuggauggcgaaaacuguacacuaauugacgcucuccugggggauccgcagugcgacggauuucagaauaaaaagugggaucuuuucguggagaggagcaaagccuauuccaacuguuaccccuaugacgucccugauuacgcaucucugcggucguugguggccucaagcggcacccucgaauuuaauaacgagaguuucaauuggacugguguuacacaaaacgggaccuccucugcuugcauccgccgaagcuccucaaguuucuucagccgucugaauuggcugacgcaucucaacuauacuuacccagcauuaaaugugaccaugcccaacaacgagcaguuugacaagcuguauauuuggggaguccaccauccuggcacagauaaggaccagaucuuccuuuacgcccagucuuccggcagaauaacugugucaaccaaaaggagccaacaggcuguaauuccaaauaucgggagucggccccgcauuagagauaucccuucuaggaucuccauuuacuggacaauaguuaagccaggagacaucuugcugauuaacagcaccgguaaucuaaucgccccgcggggcuauuuuaaaauacgcucggggaagucuuccauuaugcgaucagacgcgcccaucggaaaauguaagagugaaugcaucacgccuaacggcagcauuccaaaugauaagcccuuccagaacgugaauagagucacuuacggugcauguccuagguaugugaaacacuccacacucaagcuggccaccgggaugcggaacgugccagagaaacagacucguggaaucuuuggcgcuauugccggcuucauagaaaaugggugggagggaauggucgacgguugguacggcuuucgccaccaaaacucugaggggagaggacaggcagcugaucuuaagagcacacaggccgcgaucgaccaaauuaauggcaaacugaacagguugaucgguaagaccaaugaaaaauuccaucagaucgagaaggaauuuucagagguugaagggcggauucaggaucucgagaaguauguggaggacacgaaaauagaucuguggaguuacaacgccgaauuacugguagcacucgagaaucagcacaccaucgaccuuacagauuccgaaaugaacaagcuguuugagaaaacuaagaaacaauugcgagaaaacgcugaggacaugggcaauggaugcuucaagauuuaucauaagugugauaacgccugcaucggcagcauucgcaaugggaccuacgaccacaacguguacagagacgaggcucuaaucaauagguuucagauaaaaggagucgaacugaagucugguuauaaagauuggauccucuggauuucauucgccaucaguugcuuucugcuuuguguggcacuguugggcuucauuaugugggccugccagaaggggaacauccgguguaauauaugcauuuga

SEQ ID NO: 141585 - RNA, 1701 nt, Artificial Sequence; identical to SEQ ID NO: 140489
  derived and/or modified CDS sequence (opt3) from hemagglutinin__InfluenzaA__ALE32052

SEQ ID NO: 141586 - RNA, 1701 nt, Artificial Sequence; identical to SEQ ID NO: 140489
  derived and/or modified CDS sequence (opt3) from hemagglutinin__InfluenzaA__ALE32053

SEQ ID NO: 141587 - RNA, 1701 nt, Artificial Sequence
  derived and/or modified CDS sequence (opt3) from hemagglutinin__InfluenzaA__ALE32054
augaagaccaucauugcccugagcuacauacucugccuuguguucgcucagaaaauccccggcaacgacaauuccacagcaacucuguguuuggggcaccaugccgucccuaacggaacgauuguuaagaccaucacaaaugauagaauugaggugacuaacgcgaccgaauuaguacaaaauucuucaaucggugagauaugcgaaaguccacaccagauccuggacggcgagaacuguacacuaauugaugcucuccugggggacccgcagugcgauggauuucagaauaaaaagugggaccuuuucguggaaaggagcaaagccuauuccaacuguuaccccuaugaugucccugacuacgcaucucugcggucguugguggccucaagcggcacccucgaguuuaauaacgagaguuucaauuggacugguguuacacaaaacgggaccuccucugcuugcauccgccgaagcuccucaaguuucuuuagccgucugaauuggcugacgcaucucaacuauacuuacccagcauuaaaugugaccaugcccaacaacgaacaguuugauaagcuguauauuuggggaguccaccauccuggcacagacaaggaucagaucuuccuuuacgcccagucuuccggcagaauaacugugucaaccaaagggagccaacaggcuguaauuccaaauaucggaaguaggccccggauucgcgacaucccuucuagaaucuccauuuacuggacaauaguuaagccaggugauaucuugcugauuaacagcaccggcaaucuaaucgccccgaggggguauuuuaaaauacggucgggaaagucuuccauuaugcgcucagacgcgcccaucggcaaauguaagagugagugcaucacgccuaacgguagcauuccaaaugacaagcccuuccagaacgugaaucgaaucacuuacggggcauguccuagauaugucaaacacuccacacucaagcuggccaccggaaugaggaacgugccagaaaaacagacucggggcauuuuuggcgcuauagccggguucaucgagaauggaugggaggguaugguggauggcugguacggguuucgucaccaaaacucugaaggacgcggccaggcagcugaccuuaagagcacacaggccgcgauugaucaaaucaaugguaaacugaacagauugaucgggaagaccaaugagaaauuccaucagauugaaaaggaguucucagaagucgagggcaggauacaggaccucgagaaguauguugaagauacgaaaaucgaccuguggaguuacaacgccgaguuacugguggcacucgaaaaucagcacaccauugaucuuacagacuccgagaugaacaagcuguuugagaaaacuaagaaacaauugcgggaaaacgcugaggauaugggaaauggcugcuucaagaucuaucauaagugugacaacgccugcauugggagcauccgaaauggaaccuacgaucacaacguauaccgcgacgaagcucuaaauaacagauuucagauaaaagguguggagcugaagucuggcuauaaagacuggauccucuggauuucauucgccaucaguugcuuucugcuuugugucgcacuguugggguucauuaugugggccugccagaagggaaauaucagguguaaccacugcauauga

SEQ ID NO: 141588 - RNA, 1701 nt, Artificial Sequence
  derived and/or modified CDS sequence (opt3) from hemagglutinin__InfluenzaA__ALE32055
augaagaccaucauugcccugagcuacauacucugccuuguguucgcucagaaaauccccggcaacgacaauuccacagcaacucuguguuuggggcaccaugccgucccuaacggaacgauuguuaagaccaucacaaaugauagaauugaggugacuaacgcgaccgaauuaguacaaaauucuucaaucggugagauaugcgacaguccacaccagauccuggauggcgaaaacuguacacuaauugacgcucuccugggggauccgcagugcgacggauuucagaauaaaaagugggaucuuuucguggagaggagcaaagccuauuccaacuguuaccccuaugacgucccugauuacgcaucucugcggucguugguggccucaagcggcacccucgaauuuaauaacgagaguuucaauuggacugguguuacacaaaacgggaccuccucugcuugcauccgccgaagcuccucaaguuucuucagccgucugaauuggcugacgcaucucaacuauaaguacccagcauuaaaugugacuaugcccaacaacgagcaguuugacaagcuguauauuuggggaguccaccauccuggcaccgauaaagaccagaucuuccuuuacgcccagucuuccggcagaauaacagugucaacuaagaggagccaacaggcuguaauuccaaauaucgggagucggccccgcauuagagauaucccuucuaggaucuccauuuacuggaccauaguuaaaccaggagacaucuugcugauuaacagcacagguaaucuaaucgccccgcggggcuauuuuaagauacgcucggggaaaucuuccauuaugcgaucagacgcgcccaucggaaaguguaagagugaaugcaucaccccuaacggcagcauuccaaaugauaaacccuuccagaacgugaauagaaucacguacggugcauguccuagguaugucaagcacuccacucucaaacuggccacagggaugcggaacgugccagagaagcagacccguggaauuuuuggcgcuauagccggcuucaucgaaaaugggugggagggaaugguggacgguugguacggcuuucgccaccaaaacucugaggggagaggacaggcagcugaucuuaaaagcacucaggccgcgauugaccaaaucaauggcaagcugaacagguugaucgguaaaacaaaugaaaaguuccaucagauugagaaggaauuuucagaggucgaagggcggauacaggaucucgagaaauauguugaggacaccaagaucgaucuguggaguuacaacgccgaauuacugguggcacucgagaaucagcacacgauugaccuuaccgauuccgaaaugaacaaacuguuugagaagacuaaaaagcaauugcgagaaaacgcugaggacaugggcaauggaugcuucaagaucuaucauaaaugugauaacgccugcauuggcagcauccgcaaugggacauacgaccacaacguauacagagacgaggcucuaaauaacagguuucagauaaagggaguggaacugaaaucugguuauaaggauuggauccucuggauuucauucgccaucaguugcuuucugcuuugugucgcacuguugggcuucauuaugugggccugccagaaugggaacauccgguguaauauaugcauuuga

SEQ ID NO: 141589 - RNA, 1701 nt, Artificial Sequence; identical to SEQ ID NO: 141140
  derived and/or modified CDS sequence (opt3) from hemagglutinin__InfluenzaA__ALE32056

SEQ ID NO: 141590 - RNA, 1701 nt, Artificial Sequence
  derived and/or modified CDS sequence (opt3) from hemagglutinin__InfluenzaA__ALE32057
augaagaccaucauugcccugagcuacgugcucugccuugucuucgcucagaaaauacccggcaacgacaauuccacagcaacucuguguuuggggcaccaugccguuccuaacggaacgaucgugaagaccauuacaaaugauagaaucgagguaacuaacgcgaccgaauuagugcaaaauucuucaauuggugagaucugcgacaguccacaccagauacuggauggcgaaaacuguacacuaaucgacgcucuccugggggauccgcagugcgacggauuucagaauaaaaagugggaucuuuucgucgagaggagcaaagccuauuccaacuguuaccccuaugacgugccugauuacgcaucucugcggucguugguugccucaagcggcacccucgaauuuaauaacgagaguuucaauuggacuggugugacacaaaacgggaccuccucugcuugcauucgccgaagcuccucaaguuucuucagccgucugaauuggcugacgcaucucaacuauacuuacccagcauuaaaugucaccaugcccaacaacgagcaguuugacaagcuguauaucuggggagugcaccauccuggcacagauaaggaccagauuuuccuuuacgcccagucuuccggcagaaucacuguaucaaccaaaaggagccaacaggcuguuauaccaaauauugggagucggccccgcaucagagauauuccuucuaggaucuccaucuacuggacaauugugaagccaggagacauauugcugaucaacagcaccgguaaucuaauugccccgcggggcuauuuuaaaauccgcucggggaagucuuccauaaugcgaucagacgcgcccauuggaaaauguaagagugaaugcaucacgccuaacggcagcaucccaaaugauaagcccuuccagaacgucaauagaauuacuuacggugcauguccuagguaugugaaacacuccacacucaagcuggccaccgggaugcggaacgugccagagaaacagacucguggaaucuuuggcgcuauugccggcuucauagaaaaugggugggagggaauggucgacgguugguacggcuuucgccaccaaaacucugaggggagaggacaggcagcugaucuuaagagcacacaggccgcgaucgaccaaauuaauggcaaacugaacagguugaucgguaagaccaaugaaaaauuccaucagaucgagaaggaauuuucagagguugaagggcggauucaggaucucgagaaguauguggaggacacgaaaauagaucuguggaguuacaacgccgaauuacugguagcacucgagaaucagcacaccaucgaccuuacagauuccgaaaugaacaagcuguuugagaaaacuaagaaacaauugcgagaaaacgcugaggacaugggcaauggaugcuucaagauuuaucauaagugugauaacgccugcaucggcagcauucgcaaugggaccuacgaccacaacguguacagagacgaggcucuaaauaacagguuucagaucaaaggagucgaacugaagucugguuauaaagauuggauacucuggaucucauucgccauuaguugcuuucugcuuuguguggcacuguugggcuucaucaugugggccugccagaaggggaauauucgguguaacaucugcauauga

SEQ ID NO: 141591 - RNA, 1701 nt, Artificial Sequence; identical to SEQ ID NO: 140489
  derived and/or modified CDS sequence (opt3) from hemagglutinin__InfluenzaA__ALE32058

SEQ ID NO: 141592 - RNA, 1701 nt, Artificial Sequence; identical to SEQ ID NO: 140489
  derived and/or modified CDS sequence (opt3) from hemagglutinin__InfluenzaA__ALE32059

SEQ ID NO: 141593 - RNA, 1701 nt, Artificial Sequence
  derived and/or modified CDS sequence (opt3) from hemagglutinin__InfluenzaA__ALE32060
augaagaccaucauugcccugagcuacauacucugccuuguguucgcucagaaaauccccggcaacgacaauuccacagcaacucuguguuuggggcaccaugccgucccuaacggaacgauuguuaagaccaucacaaaugauagaauugaggugacuaacgcgaccgaauuaguacaaaauucuucaaucggugagauaugcgacaguccacaccagauccuggauggcgaaaacuguacacuaauugacgcucuccugggggauccgcagugcgacggauuucagaauaaaaagugggaucuuuucguggagaggagcaaagccuauuccaacuguuaccccuaugacgucccugauuacgcaucucugcggucguugguggccucaagcggcacccucgaauuuaauaacgagaguuucaauuggacugguguuacacaaaacgggaccuccucugcuugcauccgccgaagcuccucaaguuucuucagccgucugaauuggcugacgcaucucaacuauacuuacccagcauuaaaugugaccaugcccaacaacgagcaguuugacaagcuguauauuuggggaguccaccauccuggcacagauaaggaccagguguuccuuuacgcccagucuuccggcagaaucacuguaucaaccaaaaggagccaacaggcuguuauaccaaauauugggagucggccccgcaucagagauauuccuucuaggaucuccaucuacuggacaauugugaagccaggagacauauugcugauccacagcaccgguaaccuaauugccccgcggggcuauuuuaaaauccgcucggggaagucuuccauaaugcgaucagacgcgcccauuggaaaauguaagagugaaugcaucacgccuaauggcagcaucccaaacgauaagcccuuccagaaugucaacagaauuacuuacggugcauguccuagguaugugaaacacuccacacucaagcuggccaccgggaugcggaaugugccagagaaacagacucguggaaucuuuggcgcuauugccggcuucauagaaaacgggugggagggaauggucgacgguugguacggcuuucgccaucaaaauucugaggggagaggacaggcagcugaucuuaagagcacacaggccgcgaucgaccaaauuaacggcaaacugaauagguugaucgguaagaccaacgaaaaauuccaccagaucgagaaggaauuuucagagguugaagggcggauucaggaucucgagaaguauguggaggacacgaaaauagaucuguggaguuacaaugccgaauuacugguagcacucgagaaccagcauaccaucgaccuuacagauuccgaaaugaauaagcuguuugagaaaacuaagaaacaauugcgagaaaacgcugaggacaugggcaacggaugcuucaagauuuaucacaagugugauaaugccugcaucggcagcauucgcaacgggaccuacgaccacaauguguacagagacgaggcucuaaacaauagguuucagaucaaaggagucgaacugaagucugguuauaaagauuggauacucuggaucucauucgccauuaguugcuuucugcuuuguguggcacuguugggcuucaucaugugggccugccagaaggggaacauucgguguaauaucugcauauga

SEQ ID NO: 141594 - RNA, 1701 nt, Artificial Sequence
  derived and/or modified CDS sequence (opt3) from hemagglutinin__InfluenzaA__ALE32061
augaagaccaucauugcccugagcuacauacucugccuuguguucgcucagaaaauccccggcaacgacaauuccacagcaacucuguguuuggggcaccaugccgucccuaacggaacgauuguuaagaccaucacaaaugauagaauugaggugacuaacgcgaccgaauuaguacaaaauucuucaaucggugagauaugcgacaguccacaccagauccuggauggcgaaaacuguacacuaauugacgcucuccugggggauccgcagugcgacggauuucagaauaaaaagugggaucuuuucguggagaggagcaaagccuauuccaacuguuaccccuaugacgucccugauuacgcaucucugcggucguugguggccucaagcggcacccucgaauuuaauaacgagaguuucaauuggacugguguuacacaaaacgggaccuccucugcuugcauccgccgaagcuccucaaguuucuucagccgucugaauuggcugacgcaucucaaguauacuuacccagcauuaaacgugaccaugcccaauaacgagcaguuugacaagcuguauauuuggggaguccaccauccuggcacagauaacgaccagaucuuccuuuacgccagaucuuccggcaggauaacugugucaaccaaagggagccagcaagcuguaauuccaaauaucggaagucggccccgcauuagagauaucccuucuaggaucuccauuuacuggacaauaguuaagccaggugacaucuugcugauuaacagcaccggcaaucuaaucgccccgcggggguauuuuaaaauacgcucgggaaagucuuccauuaugcgaucagacgcgcccaucggcaaauguaagagugaaugcaucacgccuaacgguagcauuccaaaugauaagcccuuccagaacgugaauagaaucacuuacggggcauguccuagguaugucaaacacuccacacucaagcuggccaccggaaugcggaacgugccagagaaacagacucguggcauuuuuggcgcuauagccggguucaucgaaaauggaugggaggguaugguggacggcugguacggguuucgccaccagaacucugagggaagaggccaagcagcugaucuuaagagcacacaggccgcgauugaccagaucaaugguaaacugaacagguugaucgggaagaccaaugaaaaauuccaucaaauugagaaggaauuuucagaggucgaaggccggauacaggaucucgagaaguauguugaggacacgaaaaucgaucuguggaguuacaacgccgaauuacugguggcacucgagaaucagcacaccauugaccuuacagauuccgaaaugaacaagcuguuugagaaaacuaagaaacaguugcgagaaaacgcugaggacaugggaaauggcugcuucaagaucuaucauaagugugauaacgccugcauugggagcauccgcaauggaaccuacgaccacaacguauacagagacgaggcucuaaauaacagguuucaaauaaaagguguggaacugaagucuggcuauaaagauuggauccucuggauuucauucgccaucaguugcuuucugcuuugugucgcacuguugggguucauuaugugggccugccagaagggaaauauccgguguaacauaugcauuuga

SEQ ID NO: 141595 - RNA, 1701 nt, Artificial Sequence
  derived and/or modified CDS sequence (opt3) from hemagglutinin__InfluenzaA__ALE32062
augaagaccaucauugcccugagcuacauacucugccuuguguucgcucagaaaauccccggcaacgacaauuccacagcaacucuguguuuggggcaccaugccgucccuaacggaacgauuguuaagaccaucacaaaugauagaauugaggugacuaacgcgaccgaauuaguacaaaauucuucaaucggugagauaugcgacaguccacaccagauccuggauggcgaaaacuguacacuaauugacgcucuccugggggauccgcagugcgacggauuucagaauaaaaagugggaucuuuucguggagaggagcaaagccuauuccaacuguuaccccuaugacgucccugauuacgcaucucugcggucguugguggccucaagcggcacccucgaauuuaauaacgagaguuucaauuggacugguguuacacaaaacgggaccuccucugcuugcauccgccgaagcuccucaaguuucuucagccgucugaauuggcugacgcaucucaacuauacuuacccagcauuaaaugugaccaugcccaacaacgagcaguuugacaagcuguauauuuggggaguccaccauccuggcacagauaaggaccagaucuuccuuuacgcccagucuuccggcagaauaacugugucaaccaaaaggagccaacaggcuguaauuccaaauaucgggagucggccccgcauuagagauaucccuucuaggaucuccauuuacuggacaauaguuaagccaggagacaucuugcugauuuauagcaccgguaaccuaaucgccccgcggggcuacuuuaaaauacgcucggggaagucuuccauuaugcgaucagacgcgcccaucggaaaauguaagagugaaugcaucacgccuaauggcagcauuccaaacgauaagcccuuccagaaugugaacagaaucacuuauggugcauguccuagguacgucaaacacuccacacucaagcuggccaccgggaugcggaaugugccagagaaacagacucguggaauuuuuggcgcuauagccggcuucaucgaaaacgggugggagggaaugguggacgguugguauggcuuucgccaccaaaauucugaggggagaggacaggcagcugaucuuaagagcacacaggccgcgauugaccaaaucaacggcaaacugaauagguugaucgguaagaccaacgaaaaauuccaucagauugagaaggaauuuucagaggucgaagggcggauacaggaucucgagaaguacguugaggacacgaaaaucgaucuguggaguuauaaugccgaauuacugguggcacucgagaaccagcacaccauugaccuuacagauuccgaaaugaauaagcuguuugagaaaacuaagaaacaauugcgagaaaacgcugaggacaugggcaacggaugcuucaagaucuaccauaagugugauaaugccugcauuggcagcauccgcaacgggaccuacgaccacaauguauauagagacgaggcucuaaacaauagguuucagauaaaaggaguggaacugaagucugguuacaaagauuggauccucuggauuucauucgccaucaguugcuuucugcuuugugucgcacuguugggcuucauuaugugggccugccagaaggggaacauccgguguaauauaugcauuuga

SEQ ID NO: 141596 - RNA, 1701 nt, Artificial Sequence; identical to SEQ ID NO: 140489
  derived and/or modified CDS sequence (opt3) from hemagglutinin__InfluenzaA__ALE32063

SEQ ID NO: 141597 - RNA, 1701 nt, Artificial Sequence
  derived and/or modified CDS sequence (opt3) from hemagglutinin__InfluenzaA__ALE32064
augaagaccaucauugcccugagcuacauacucugccuuguguucgcucagaaaauccccggcaacgacaauuccacagcaacucuguguuuggggcaccaugccgucccuaacggaacgauuguuaagaccaucacaaaugauagaauugaggugacuaacgcgaccgaauuaguacaaaauucuucaaucggugagauaugcgacaguccacaccagauccuggauggcgaaaacuguacacuaauugacgcucuccugggggauccgcagugcgacggauuucagaauaaaaagugggaucuuuucguggagaggagcaaagccuauuccaacuguuaccccuaugacgucccugauuacgcaucucugcggucguugguggccucaagcggcacccucgaauuuaauaacgagaguuucaauuggacugguguuacacaaaacgggaccuccucugcuugcauccgccgaagcuccaauucauuuuucagucgucugaacuggcugacgcaucucaauuauacuuacccagcauuaaacgugaccaugcccaacaaugagcaguuugacaagcuguauauuuggggaguccaccauccuggcacagauaaggaccagaucuuccuuuacgcccagagcucuggcagaauaacuguguccaccaaaaggucacaacaggcuguaauuccaaacaucgggagccggccccgcauuagagauaucccuaguaggaucucuauuuacuggacaauaguuaagccaggagacaucuugcugauuaauuccaccgguaaccuaaucgccccgcggggcuauuuuaaaauacgcagcgggaagucgucuauuaugcgauccgacgcgcccaucggaaaauguaagucagaaugcaucacgccuaauggcaguauuccaaacgauaagcccuuccagaaugugaacagaaucacuuacggugcauguccuagguaugucaaacacagcacacucaagcuggccaccgggaugcggaaugugccagagaaacagacucguggaauuuuuggcgcuauagccggcuucaucgaaaacgggugggagggaaugguggacgguugguacggcuuucgccaccaaaauuccgaggggagaggacaggcagcugaucuuaagucuacacaggccgcgauugaccaaaucaacggcaaacugaauagguugaucgguaagaccaacgaaaaauuccaucagauugagaaggaguucagcgaagucgaagggcggauacaggaucucgagaaguauguugaggacacgaaaaucgaucuguggucauacaaugccgaauuacugguggcacucgagaaccagcacaccauugaccuuacagauagugaaaugaacaagcuguuugagaaaacuaagaaacaauugcgagaaaaugcugaggacaucggcaacggaugcuucaagauuuaucauaagugugauaaugccugcaucggcuccauacgcaacgggaccuacgaccacaauguauacagagacgaggcucuaaacaauagguuucagaucaaaggaguggaacucaagagcgguuauaaagauuggauucuguggaucucuuucgccauuucaugcuuucugcuuugugucgcacuguugggcuucaucaugugggccugccagaaggggaacauacgguguaauauuugcaucuga

SEQ ID NO: 141598 - RNA, 1701 nt, Artificial Sequence; identical to SEQ ID NO: 140489
  derived and/or modified CDS sequence (opt3) from hemagglutinin__InfluenzaA__ALE32065

SEQ ID NO: 141599 - RNA, 1701 nt, Artificial Sequence
  derived and/or modified CDS sequence (opt3) from hemagglutinin__InfluenzaA__ALE32066
augaagaccaucauugcccugagcuacauacucugccuuguguucgcucagaaaauccccggcaacgacaauuccacagcaacucuguguuuggggcaccaugccgucccuaacggaacgauuguuaagaccaucacaaaugauagaauugaggugacuaacgcgaccgaauuaguacaaaauucuucaaucggugagauaugcgacaguccacaccagauccuggauggcgaaaacuguacacuaauugacgcucuccugggggauccgcagugcgacggauuucagaauaaaaagugggaucuuuucguggagaggagcaaagccuauuccaacuguuaccccuaugacgucccugauuacgcaucucugcggucguugguggccucaagcggcacccucgaauuuaauaacgagaguuucaauuggacugguguuacacaaaacgggaccuccucugcuugcauccgccgaagcuccucaaguuucuucagccgucugaauuggcugacgcaucucaacuauacuuacccagcauuaaaugugucuaugcccaacaacgagcaguuugacaagcuguauauuuggggaguccaccauccuggcaccgauaaggaccagaucuuccuuuacgcccaguccucaggcagaauaacagugagcacuaaaaggagucaacaggcuguaauuccaaauaucgggucucggccccgcauuagagauaucccuuccaggaucagcauuuacuggaccauaguuaagccaggagacaucuugcugauuaacucgacagguaaucuaaucgccccgcggggcuauuuuaaaauacgcucugggaaguccucaauuaugcgaagugacgcgcccaucggaaaauguaagagcgaaugcaucaccccuaacggcuccauuccaaaugauaagcccuuccagaacgugaauagaaucacguacggugcauguccuagguaugucaaacacucuacucucaagcuggccacagggaugcggaacgugccagagaaacagacccguggaauuuuuggcgcuauagccggcuucaucgaaaaugggugggagggaaugguggacgguugguacggcuuucgccaccaaaacagcgaggggagaggacaggcagcugaucuuaagucaacucaggccgcgauugaccaaaucaauggcaaacugaacagguugaucgguaagacaaaugaaaaauuccaucagauugagaaggaauuuagugaggucgaagggcggauacaggaucucgagaaguauguugaggacaccaaaaucgaucugugguccuacaacgccgaauuacugguggcacucgagaaucagcacacgauugaccuuaccgauagcgaaaugaacaagcuguuugagaaaacaaagaaacaauugcgagaaaacgcugaggacaugggcaauggaugcuucaagaucuaucauaagugugauaacgccugcauuggcucuauccgcaaugggacuuacgaccacaacguauacagagacgaggcucuaaauaacagguuucagauaaaaggaguggaacugaagucagguuauaaagauuggauccucuggauuaguuucgccaucagcugcuuucugcuuugugucgcacuguugggcuucauuaugugggccugccagaaggggaauauccgguguaacauaugcauuuga

SEQ ID NO: 141600 - RNA, 1701 nt, Artificial Sequence; identical to SEQ ID NO: 141271
  derived and/or modified CDS sequence (opt3) from hemagglutinin__InfluenzaA__ALE32067

SEQ ID NO: 141601 - RNA, 1701 nt, Artificial Sequence; identical to SEQ ID NO: 140489
  derived and/or modified CDS sequence (opt3) from hemagglutinin__InfluenzaA__ALE32068

SEQ ID NO: 141602 - RNA, 1701 nt, Artificial Sequence; identical to SEQ ID NO: 140489
  derived and/or modified CDS sequence (opt3) from hemagglutinin__InfluenzaA__ALE32069

SEQ ID NO: 141603 - RNA, 1701 nt, Artificial Sequence
  derived and/or modified CDS sequence (opt3) from hemagglutinin__InfluenzaA__ALE32070
augaagaccaucauugcccugagcuacauacucugccuuguguucgcucagaaaauccccggcaacgacaauuccacagcaacucuguguuuggggcaccaugccgucccuaacggaacgauuguuaagaccaucacaaaugauagaauugaggugacuaacgcgaccgaauuaguacaaaauucuucaaucggugagauaugcgacaguccacaccagauccuggauggcgaaaacuguacacuaauugacgcucuccugggggauccgcagugcgacggauuucagaauaaaaagugggaucuuuucguggagaggagcaaagccuauuccaacuguuaccccuaugacgucccugauuacgcaucucugcggucguugguggccucaagcggcacccucgaauuuaauaacgagaguuucaauuggacugguguuacacaaaacgggaccuccucugcuugcauccgccgaagcuccucaaguuucuucagccgucugaauuggcugacgcaucucaacuauacuuacccagcauuaaaugugaccaugcccaacaacgagcaguuugacaagcuguauauuuggggaguccaccauccuggcacagauaaggaccagaucuuccuuuacgcccagucuuccggcagaauaacugugucaaccaaaaggagccaacaggcuguaauuccaaauaucgggagucggccccgcauuagagauaucccuucuaggaucuccauuuacuggacaauaguuaagccaggagacaucuugcugauuaacagcaccgguaaucuaaucgccccgcggggcuauuuuaaaauacgcucggggaagucuuccauuaugcgaucagacgcgcccaucggaaaauguaagagugaaugcaucacgccuaacggcagcauuccaaaugauaagcccuuccagaacgugaauagaaucacuuacggugucuguccuagguaugugaaacacuccacacucaagcuggcaaccgggaugcggaacgugccagagaaacagacucguggaauuuuuggcgccauagcuggcuucaucgaaaaugggugggagggaauggucgacgguugguacggcuuucgccaccaaaacucugaggggagaggacaggccgcagaucuuaagagcacacaggcugccauugaccaaaucaauggcaaacugaacagguugaucgguaagaccaaugaaaaauuccaucagauugagaaggaauuuucagagguugaagggcggauacaggaucucgagaaguauguggaggacacgaaaaucgaucuguggaguuacaacgcggaauuacugguagcccucgagaaucagcacaccauugaccuuacagauuccgaaaugaacaagcuguuugagaaaacuaagaaacaauugcgagaaaacgcagaggacaugggcaauggaugcuucaagaucuaucauaagugugauaacgcuugcauuggcagcauccgcaaugggaccuacgaccacaacguguacagagacgaggcccuaaauaacagguuucagauaaaaggagucgaacugaagucugguuauaaagauuggauccucuggauuucauucgcuaucaguugcuuucugcuuuguguggcccuguugggcuucauuaugugggcaugccagaaggggaauauccgguguaacauaugcauuuga

SEQ ID NO: 141604 - RNA, 1701 nt, Artificial Sequence; identical to SEQ ID NO: 140489
  derived and/or modified CDS sequence (opt3) from hemagglutinin__InfluenzaA__ALE32071

SEQ ID NO: 141605 - RNA, 1701 nt, Artificial Sequence; identical to SEQ ID NO: 141486
  derived and/or modified CDS sequence (opt3) from hemagglutinin__InfluenzaA__ALE32072

SEQ ID NO: 141606 - RNA, 1701 nt, Artificial Sequence
  derived and/or modified CDS sequence (opt3) from hemagglutinin__InfluenzaA__ALE32073
augaagaccaucauugcccugagcuacauacucugccuuguguucgcucagaaaauccccggcaacgacaauuccacagcaacucuguguuuggggcaccaugccgucccuaacggaacgauuguuaagaccaucacaaaugauagaauugaggugacuaacgcgaccgaauuaguacaaaauucuucaaucggugagauaugcgacaguccacaccagauccuggauggcgaaaacuguacacuaauugacgcucuccugggggauccgcagugcgacggauuucagaauaaaaagugggaucuuuucguggagaggagcaaagccuauuccaacuguuaccccuaugacgucccugauuacgcaucucugcggucguugguggccucaagcggcacccucgaauuuaauaacgagaguuucaauuggacugguguuacacaaaacgggaccuccucugcuugcauccgcaagagcuccucaaguuucuucagccgacugaauuggcugacgcaucucaacuauacuuacccagcauuaaaugugaccaugcccaacaacgagcaguuugacaagcuguauauuuggggaguccaccauccuggcacagauaaagaccagaucuuccuuuacgcccagucuuccggccguauaacugugucaaccaagagaagccaacaggcuguaauuccaaauaucgggaguaggccccggauucgcgauaucccuucuagaaucuccauuuacuggacaauaguuaaaccaggagacaucuugcugauuaacagcaccgguaaucuaaucgccccgaggggcuauuuuaagauacucucggggaaaucuuccauuaugcggucagacgcgcccaucggaaaguguaagagugaaugcaucacgccuaacggcagcauuccaaaugauaaacccuuccagaacgugaaucgcaucacuuacggugcauguccucgauaugucaagcacuccacacugaaacuugccaccgggaugagaaacgugccagagaagcagacuaggggaauuuuuggcgcuauagccggcuucaucgaaaaugggugggagggaaugguggacgguugguacggcuuucggcaccaaaacucugaggggcguggacaggcagcugaucugaaaagcacacaggccgcgauugaccaaaucaauggcaaguugaaccgccucaucgguaaaaccaaugaaaaguuccaucagauugagaaggaauuuucagaggucgaagggagaauacaggaucuggagaaauauguugaggacacgaagaucgauuuauggaguuacaacgccgaacugcucguggcacuugagaaucagcacaccauugaccugacagauuccgaaaugaacaaauuguuugagaagacuaaaaagcaacuaagggaaaacgcugaggacaugggcaauggaugcuucaagaucuaucauaaaugugauaacgccugcauuggcagcauccggaaugggaccuacgaccacaacguauaccgagacgaggcucugaauaaccgcuuucagauaaagggaguggaacucaaaucugguuauaaggauuggauccuguggauuucauucgccaucaguugcuuucuucugugugucgcauugcucggcuucauuaugugggccugccagaaagggaauaucagauguaacauaugcauuuga

SEQ ID NO: 141607 - RNA, 1701 nt, Artificial Sequence
  derived and/or modified CDS sequence (opt3) from hemagglutinin__InfluenzaA__ALE32074
augaagaccaucauugcccugagcuacauacucugccuuguguucgcucagaaaauccccggcaacgacaauuccacagcaacucuguguuuggggcaccaugccgucccuaacggaacgauuguuaagaccaucacaaaugauagaauugaggugacuaacgcgaccgaauuaguacaaaauucuucaaucggugagauaugcgacaguccacaccagauccuggauggcgaaaacuguacacuaauugacgcucuccugggggauccgcagugcgacggauuucagaauaaaaagugggaucuuuucguggagaggagcaaagccuauuccaacuguuaccccuaugacgucccugauuacgcaucucugcggucguugguggccucaagcggcacccucgaauuuaauaacgagaguuucaauuggacugguguuacacaaaacgggaccuccucuagcugcauccgccgauccucaaguagcuuuuucucucgucugaauuggcugacgcaucucaacuauacuuacccagcuuuaaaugugaccaugcccaacaacgagcaguuugacaagcuguauauuuggggaguccaccauccuggcacagauaaggaccagaucuuccuuuacgcacaguccucaggcagaauaacugugagcaccaaaaggagucaacaggccguaauuccaaauaucgggucucggccccgcauuagagauaucccuuccaggaucagcauuuacuggacaauaguuaagccaggagacaucuugcugauuaacucgaccgguaaucuaaucgcuccgcggggcuauuuuaaaauacucucugggaaguccucaauuaugcgcagugacgcccccaucggaaaauguaagagcgaaugcaucacgccuaacggcuccauuccaaaugauaagcccuuccagaacgugaaucgaaucacuuacggugcguguccuagauaugucaaacacucuacacugaaacuugcaaccgggaugaggaacgugccagagaagcagacucggggaauuuuuggcgccauagcuggcuucaucgaaaaugggugggagggaaugguggacgguugguacggcuuucgucaccaaaacagcgaggggcgcggacaggccgcagaucugaagucaacacaggcugccauugaccaaaucaauggcaaauugaacagacucaucgguaagaccaaugaaaaauuccaucagauugagaaggaguucagugaagucgaagggaggauacaggaucuggagaaguauguugaggacacgaaaaucgauuuaugguccuacaacgcggaacugcucguggcccuugagaaucagcacaccauugaccugacagauagcgaaaugaacaaguuguuugagaaaacuaagaaacaacuacgggaaaacgcagaggacaugggcaauggaugcuucaagaucuaucauaagugugauaacgcuugcauuggcucuauccgaaaugggaccuacgaccacaacguauaccgcgacgaggcccugaauaacagauuucagauaaaaggaguggaacucaagucagguuauaaagauuggauccuguggauuaguuucgcuaucagcugcuuucuucugugugucgccuugcucggcuucauuaugugggcaugccagaaggggaauaucagguguaacauaugcauuuga

SEQ ID NO: 141608 - RNA, 1701 nt, Artificial Sequence
  derived and/or modified CDS sequence (opt3) from hemagglutinin__InfluenzaA__ALE32075
augaagaccaucauugcccugagcuacauacucugccuuguguucgcucagaaacugcccgagaacgacaauuccacagcaacuuuguguuuaggccaccaugccgucccuaacgggacgaucguuaagaccauuacaucugauagaaucgaagugacuaaugcgaccgagcugguacaaaacucaaguauuggagaaaucugcgacagcccacaccagauacuagaugguaaaaauuguacacucaucgacgcucugcuuggcgauccgcagugcgacggguuucagaacaagaaaugggaucuguucguggagagguccaaggccuauucuaauuguuaccccuaugacgucccugauuacgcaucguugcggucacucguggccagcaguggaacccuggaauuuaacgacgaguccuucaauugggcuggcguuacucaaaacgguacaucuagcuccugcauucgcgggucaaauaguagcuuuuucucucgacugaacuggcucacccauuccaauuuuaaguauccagcauuaaacgugacgaugcccaauaacgagcaguucgauaaacuguacaucuggggaguccaccauccuggcacugacaaggaucagauuuuucuuuaugcccagucaagcggccguaucaccgugaguacaaaaagaucucaacaggcuguaauaccaaacauuggguccaggccccggauccgcaauauuccuagcagaaucucgaucuacuggacuauuguuaagccaggagacauauugcugaucaacucuaccgguaaucuaauugccccgaggggcuacuucaaaauccgguccgggaagucaaguauaaugcgcagcgacgcgcccauuggaaaguguaaauccgaaugcaucacaccuaacggcucuaucccaaaugauaagcccuuucagaacgugaaucgaauuaccuauggugcauguccuagauacgucaaacagagcacgcucaagcuggccacugggaugaggaacgugccagagaaacaaacacggggaaucuucggcgcuauugccggcuuuauagaaaaugggugggagggaaugaaggacgguugguauggcuuccgucaccagaacucagaggggcgcggacaggcagcugaucuuaaaaguacccaagccgcgaucgaccagauuaauggcaagcugaacagauugaucgguaagacuaaugaaaaauuccaccagaucgagaaggaauuuuccgagguggaagggaggauucaggaucucgagaaauacgucgaggacacaaagauagaucuguggagcuauaacgccgaauuacugguugcacucgagaaucaacauaccaucgaccuuacggauucugaaaugaacaaacuguucgagaagaccaagaaacaguugcgggaaaacgcugaggacaugggcaauggaugcuuuaagauuuaccacaaaugugauaacgccugcaucggcucaauucgaaaugggacauaugaccaugacguguaccgcgaugaggcucuaaacaauagauuccagaucaagggaguagaacugaaaagugguuacaaggacuggauacucuggaucagcuuugccauuuccugcuuccugcuuuguguggcacuguugggcuuuaucaugugggccugccagaaggggaacauuagguguaauaucugcauauga

SEQ ID NO: 141609 - RNA, 1701 nt, Artificial Sequence; identical to SEQ ID NO: 141046
  derived and/or modified CDS sequence (opt3) from hemagglutinin__InfluenzaA__ALE32076

SEQ ID NO: 141610 - RNA, 1701 nt, Artificial Sequence
  derived and/or modified CDS sequence (opt3) from hemagglutinin__InfluenzaA__ALE32077
augaagaccaucauugcccugagcuacauacucugccuuguguucgcucagaaaauccccggcaacgacaauuccacagcaacucuguguuuggggcaccaugccgucccuaacggaacgauuguuaagaccaucacaaaugauagaauugaggugacuaacgcgaccgaauuaguacaaaauucuucaaucggugagauaugcgacaguccacaccagauccuggauggcgaaaacuguacacuaauugacgcucuccugggggauccgcagugcgacggauuucagaauaaaaagugggaucuuuucguggagaggagcaaagcccauuccaacuguuaucccuacgacgucccugauuaugcaucucugcggucguugguggccucaagcggcacccucgaauuuaauaacgagaguuucaauuggacugguguuacacaaaacgggaccuccucugcuugcauccgccgaagcuccucaaguuucuucagccgucugaauuggcugacgcaccucaacuacacuuauccagcauuaaaugugaccaugcccaacaacgagcaguuugacaagcuguacauuuggggaguccaucacccuggcacagauaaggaccagaucuuccuuuaugccagaucuuccggcaggauaacugugucaaccaaagggagccagcaagcuguaauuccaaauaucggaagucggccccgcauuagagauaucccuucuaggaucuccauuuacuggacaauaguuaagccaggugacaucuugcugauuaacagcaccggcaaucuaaucgccccgcggggguacuuuaaaauacgcucgggaaagucuuccauuaugcgaucagacgcgcccaucggcaaauguaagagugaaugcaucacgccuaacgguagcauuccaaaugauaagcccuuccagaacgugaauagaaucacuuauggggcauguccuagguacgucaaacacuccacacucaagcuggccaccggaaugcggaacgugccagagaaacagacucguggcauuuuuggcgcuauagccggguucaucgaaaauggaugggaggguaugguggacggcugguauggguuucgccaucagaacucugagggaagaggccaagcagcugaucuuaagagcacacaggccgcgauugaccagaucaaugguaaacugaacagguugaucgggaagaccaaugaaaaauuccaccaaauugagaaggaauuuucagaggucgaaggccggauacaggaucucgagaaguacguugaggacacgaaaaucgaucuguggaguuauaacgccgaauuacugguggcacucgagaaucagcauaccauugaccuuacagauuccgaaaugaacaagcuguuugagaaaacuaagaaacaguugcgagaaaacgcugaggacaugggaaauggcugcuucaagaucuaccacaagugugauaacgccugcauugggagcauccgcaauggaaccuaugaccacaacguauacagagacgaggcucuaaauaacagguuucaaauaaaagguguggaacugaagucuggcuacaaagauuggauccucuggauuucauucgccaucaguugcuuucugcuuugugucgcacuguugggguucauuaugugggccugccagaagggaaauauccgguguaacauaugcauuuga

SEQ ID NO: 141611 - RNA, 1701 nt, Artificial Sequence; identical to SEQ ID NO: 141147
  derived and/or modified CDS sequence (opt3) from hemagglutinin__InfluenzaA__ALE32078

SEQ ID NO: 141612 - RNA, 1701 nt, Artificial Sequence; identical to SEQ ID NO: 141033
  derived and/or modified CDS sequence (opt3) from hemagglutinin__InfluenzaA__ALE32079

SEQ ID NO: 141613 - RNA, 1701 nt, Artificial Sequence
  derived and/or modified CDS sequence (opt3) from hemagglutinin__InfluenzaA__ALE32080
augaagaccaucauugcccugagcuacauacucugccuuguguucgcucagaaaauccccggcaacgacaauuccacagcaacucuguguuuggggcaccaugccgucccuaacggaacgauuguuaagaccaucacaaaugauagaauugaggugacuaacgcgaccgaauuaguacaaaauucuucaaucggugagauaugcgacaguccacaccagauccuggauggcgaaaacuguacacuaauugacgcucuccugggggauccgcagugcgacggauuucagaauaaaaagugggaucuuuucguggagaggagcaaagccuauuccaacuguuaccccuaugacgucccugauuacgcaucucugcggucguugguggccucaagcggcacccucgaauuuaauaacgagaguuucaauuggacugguguuacacaaaacgggaccuccucuagcugcauccgccgauccucaaguagcuuuuucucucgucugaauuggcugacgcaucucaacuauacuuacccagcuuuaaaugugaccaugcccaacaacgagcaguuugacaagcuguauauuuggggaguccaccauccuggcacagauaaggaccagaucuuccuuuacgcacaguccucaggcagaauaacugugagcaccaaaaggagucaacaggccguaauuccaaauaucgggucucggccccgcauuagagauaucccuuccaggaucagcauuuacuggacaauaguuaagccaggagacaucuugcugauuaacucgaccgguaaucuaaucgcuccgcggggcuauuuuaaaauacgcucugggaaguccucaauuaugcgaagugacgcccccaucggaaaauguaagagcgaaugcaucacgccuaacggcuccauuccaaaugauaagcccuuccagaacgugaauagaaucacuuacggugcguguccuagguaugucaaacacucuacacucaagcuggcaaccgggaugcggaacgugccagagaaacagacucguggaauuuuuggcgccauagcuggcuucaucgaaaaugggugggagggaaugguggacgguugguacggcuuucgccaccaaaacagcgaggggagaggacaggccgcagaucuuaagucaacacaggcugccauugaccaaaucaauggcaaacugaacagguugaucgguaagaccaaugaaaaauuccaucagauugagaaggaguucagugaagucgaagggcggauacaggaucucgagaaguauguugaggacacgaaaaucgaucugugguccuacaacgcggaauuacugguggcccucgagaaucagcacaccauugaccuuacagauagcgaaaugaacaagcuguuugagaaaacuaagaaacaauugcgagaaaacgcagaggacaugggcaauggaugcuucaagaucuaucauaagugugauaacgcuugcauuggcucuauccgcaaugggaccuacgaccacaacguauacagagacgaggcccuaaauaacagguuucagauaaaaggaguggaacugaagucagguuauaaagauuggauccucuggauuaguuucgcuaucagcugcuuucugcuuugugucgcccuguugggcuucauuaugugggcaugccagaaggggaauauccgguguaacauaugcauuuga

SEQ ID NO: 141614 - RNA, 1701 nt, Artificial Sequence; identical to SEQ ID NO: 141147
  derived and/or modified CDS sequence (opt3) from hemagglutinin__InfluenzaA__ALE32081

SEQ ID NO: 141615 - RNA, 1701 nt, Artificial Sequence; identical to SEQ ID NO: 141147
  derived and/or modified CDS sequence (opt3) from hemagglutinin__InfluenzaA__ALE32082

SEQ ID NO: 141616 - RNA, 1701 nt, Artificial Sequence
  derived and/or modified CDS sequence (opt3) from hemagglutinin__InfluenzaA__ALE32083
augaagaccaucauugcccugagcuacauacucugccuuguguucgcucagaaaauccccggcaacgacaauuccacagcaacucuguguuuggggcaccaugccgucccuaacggaacgauuguuaagaccaucacaaaugauagaauugaggugacuaacgcgaccgaauuaguacaaaauucuucaaucggugagauaugcgacaguccacaccagauccuggauggcgaaaacuguacacuaauugacgcucuccugggggauccgcagugcgacggauuucagaauaaaaagugggaucuuuucguggagaggagcaaagccuauuccaacuguuaccccuaugacgucccugauuacgcaucucugcggucguugguggccucaagcggcacccucgaauuuaauaacgagaguuucaauuggacugguguuacacaaaacgggaccuccucugcuugcauccgccgaagcuccucaaguuucuucagccgucugaauuggcugacgcaucucaacuauaaguacccagcauuaaaugugacuaugcccaacaacgagcaguuugacaagcuguauauuuggggaguccaccauccuggcaccgauaaagaccagaucuuccuuuacgccagaucuuccggcaggauaacagugucaacuaaggggagccagcaagcuguaauuccaaauaucggaagucggccccgcauuagagauaucccuucuaggaucuccauuuacuggaccauaguuaaaccaggugacaucuugcugauuaacagcacaggcaaucuaaucgccccgcggggguauuuuaagauacgcucgggaaaaucuuccauuaugcgaucagacgcgcccaucggcaaguguaagagugaaugcaucaccccuaacgguagcauuccaaaugauaaacccuuccagaacgugaauagaaucacguacggggcauguccuagguaugucaagcacuccacucucaaacuggccacaggaaugcggaacgugccagagaagcagacccguggcauuuuuggcgcuauagccggguucaucgaaaauggaugggaggguaugguggacggcugguacggguuucgccaccagaacucugagggaagaggccaagcagcugaucuuaaaagcacucaggccgcgauugaccagaucaaugguaagcugaacagguugaucgggaaaacaaaugaaaaguuccaucaaauugagaaggaauuuucagaggucgaaggccggauacaggaucucgagaaauauguugaggacaccaagaucgaucuguggaguuacaacgccgaauuacugguggcacucgagaaucagcacacgauugaccuuaccgauuccgaaaugaacaaacuguuugagcgaacaaagaaacaguugcgcgaaaacgcugaggacaugggaaauggcugcuucaagaucuaucauaagugugauaacgccugcauugggagcaucagaaauggaacuuacgaccacaacguauacagggacgaggcucuaaauaaccgguuucaaauaaaagguguggaacugaagucuggcuauaaagauuggauccucuggauuucauucgccaucaguugcuuucugcuuugugucgcacuguugggguucauuaugugggccugccagaagggaaauauccgcuguaacauaugcauuuga

SEQ ID NO: 141617 - RNA, 1701 nt, Artificial Sequence; identical to SEQ ID NO: 141104
  derived and/or modified CDS sequence (opt3) from hemagglutinin__InfluenzaA__ALE32084

SEQ ID NO: 141618 - RNA, 1701 nt, Artificial Sequence; identical to SEQ ID NO: 141147
  derived and/or modified CDS sequence (opt3) from hemagglutinin__InfluenzaA__ALE32085

SEQ ID NO: 141619 - RNA, 1701 nt, Artificial Sequence
  derived and/or modified CDS sequence (opt3) from hemagglutinin__InfluenzaA__ALE32086
augaagaccaucauugcccugagcuacauacucugccuuguguucgcucagaaaauccccggcaacgacaauuccacagcaacucuguguuuggggcaccaugccgucccuaacggaacgauuguuaagaccaucacaaaugauagaauugaggugacuaacgcgaccgaauuaguacaaaauucuucaaucggugagauaugcgacaguccacaccagauccuggauggcgaaaacuguacacuaauugacgcucuccugggggauccgcagugcgacggauuucagaauaaaaagugggaucuuuucguggagaggagcaaagccuauuccaacuguuaccccuaugacgucccugauuacgcaucucugcggucguugguggccucaagcggcacccucgaauuuaauaacgagaguuucaauuggacugguguuacacaaaacgggaccuccucugcuugcauccgcaagagcuccucaaguuucuucagccgacugaauuggcugacgcaucucaacuauacuuacccagcauuaaaugugaccaugcccaacaacgagcaguuugacaagcuguauauuuggggaguccaccauccuggcacagauaaagaccagaucuuccuuuacgcccguucuuccggcagaauaacugugucaaccaagaggagccagcaagcuguaauuccaaauaucgggagucggccccgcauuagagauaucccuucuaggaucuccauuuacuggacaauaguuaaaccaggagacaucuugcugauuaacagcaccgguaaucuaaucgccccgcggggcuauuuuaagauacgcucggggaaaucuuccauuaugcgaucagacgcgcccaucaguaaguguaagagcgaaugcaucacgccuaacggauccauuccaaaugauaaacccuuccagaacgugaauagaaucacuuacggcgcauguccuagguaugucaagcacucuacacucaaacuggccaccgguaugcggaacgugccagagaagcagacucgugggauuuuuggagcuauagccggcuucaucgaaaauggcugggaggggaugguggacggaugguacgguuuucgccaccagaacagcgagggcagagggcaagcagcugaucuuaaaucaacacaggccgcgauugaccagaucaauggaaagcugaacagguugaucggcaaaaccaaugaaaaguuccaucaaauugagaaggaauuuagugaggucgaaggucggauacaggaucucgagaaauauguugaggacacgaagaucgaucugugguccuacaacgccgaauuacugguggcacucgagaaucagcacaccauugaccuuacagauagcgaaaugaacaaacuguuugagaagacuaaaaagcaguugcgagaaaacgcugaggacauggggaauggcugcuucaagaucuaucauaaaugugauaacgccugcauuggaucuauccgcaauggcaccuacgaccacaacguauacagagacgaggcucuaaauaacagguuucaaauaaaggggguggaacugaaaucaggauauaaggauuggauccucuggauuaguuucgccaucagcugcuuucugcuuugugucgcacuguuggguuucauuaugugggccugccagaaaggcaauauccgguguaacauaugcauuuga

SEQ ID NO: 141620 - RNA, 1701 nt, Artificial Sequence
  derived and/or modified CDS sequence (opt3) from hemagglutinin__InfluenzaA__ALE32087
augaagaccaucauugcccugagcuacauacucugccuuguguucgcucagaaaauccccggcaacgacaauuccacagcaacucuguguuuggggcaccaugccgucccuaacggaacgauuguuaagaccaucacaaaugauagaauugaggugacuaacgcgaccgaauuaguacaaaauucuucaaucggugagauaugcgacaguccacaccagauccuggauggcgaaaacuguacacuaauugacgcucuccugggggauccgcagugcgacggauuucagaauaaaaagugggaucuuuucguggagaggagcaaagccuauuccaacuguuaccccuaugacgucccugauuacgcaucucugcggucguugguggccucaagcggcacccucgaauuuaauaacgagaguuucaauuggacugguguuacacaaaacgggaccuccucugcuugcauccgcaagagcuccucaaguuucuucagccgacugaauuggcugacgcaucucgacuauacuuacccagcauuaaacgugaccaugcccaauaacgagcaguuugauaagcuguauauuuggggaguccaccauccuggcacagacaaagaucagaucuuccuuuacgcccguucuuccggcagaauaacugugucaaccaagaggagccagcaagcuguaauuccaaacaucgggagucggccccgcauuagagacaucccuucuaggaucuccauuuacuggacaauaguuaaaccaggagacaucuugcugauuaauagcaccgguaaccuaaucgccccgcggggcuauuuuaagauacgcucggggaaaucuuccauuaugcgaucagaugcgcccaucggaaaguguaagagugaaugcaucacgccuaauggcagcauuccaaacgacaaacccuuccagaaugugaacagaaucacuuacggugcauguccuagguaugucaagcacuccacacucaaacuggccaccgggaugcggaaugugccagagaagcagacucguggaauuuuuggcgcuauagccggcuucaucgaaaacgggugggagggaaugguggaugguugguacggcuuucgccaccaaaauucugaggggagaggacaggcagcugaccuuaaaagcacacaggccgcgauugaucagaucaacggcaaucugaacagguugaucgguaagaccaaugaaaaauuccaucaaauugagaaggaauuuucagaggucgaagggcggauacaggaccucgagaaguauguugaggauacgaaaaucgaccuguggaguuacaacgccgaauuacugguggcacucgagaaucagcacaccauugaucuuacagacuccgaaaugaacaagcuguuugagaaaacuaagaaacaguugcgagaaaacgcugaggauaugggcaauggaugcuucaagaucuaucauaagugugacaacgccugcauuggcagcauccgcaaugggaccuacgaccacaacguauacagagaugaggcucuaaauaacagguuucaaauaaaaggaguggaacugaagucugguuauaaagacuggauccucuggauuucauucgccaucaguugcuuucugcuuugugucgcacuguugggcuucauuaugugggccugccagaaggggaauauccgguguaacauaugcauuuga

SEQ ID NO: 141621 - RNA, 1701 nt, Artificial Sequence
  derived and/or modified CDS sequence (opt3) from hemagglutinin__InfluenzaA__ALE32088
augaagaccaucauugcccugagcuacauacucugccuuguguucgcucagaaaauccccggcaacgacaauuccacagcaacucuguguuuggggcaccaugccgucccuaacggaacgauuguuaagaccaucacaaaugauagaauugaggugacuaacgcgaccgaauuaguacaaaauucuucaaucggugagauaugcgacaguccacaccagauccuggauggcgaaaacuguacacuaauugacgcucuccugggggauccgcagugcgacggauuucagaauaaaaagugggaucuuuucguggagaggagcaaagccuauuccaacuguuaccccuaugacgucccugauuacgcaucucugcggucguugguggccucaagcggcacccucgaauuuaauaacgagaguuucaauuggacugguguuacacaaaacgggaccuccucugcuugcauccgcaagagcuccucaaguuucuucagccgacugaauuggcugacgcaucucaacuauacuuacccagcauuaaaugugaccaugcccaacaacgagcaguuugacaagcuguauauuuggggaguccuucacccuggcacagauaaagaccagaucuucuuguacgcccguucuuccggcagaauaacugugucaaccaagaggagccagcaagcuguaauuccaaauaucgggagucggccccgcauuagagauaucccuucuaggaucuccauuuacuggacaauaguuaaaccaggagacauccugcuaauuaacagcaccgguaaucucaucgccccgcggggcuauuuuaagauacgcucggggaaaucuuccauuaugcgaucagacgcgcccaucggaaaguguaagagugaaugcaucacgccuaacggcagcauuccaaaugauaaacccuuccagaacgugaauagaaucacuuacggugcauguccuagguaugucaagcauuccacacugaaacuugccaccgggaugcggaacgugccagagaagcagacucguggaauuuuuggcgcuauagccggcuucaucgaaaaugggugggagggaaugguggacgguugguacggcuuucgccaccagaacucugaggggagaggacaagcagcugaucugaaaagcacacaggccgcgauugaccagaucaauggcaaguugaacaggcucaucgguaaaaccaaugaaaaguuccaccaaauugagaaggaauuuucagaggucgaagggcggauacaggaucuggagaaauauguugaggacacgaagaucgauuuauggaguuacaacgccgaacugcucguggcacuugagaaucagcauaccguagaccugacagauuccgaaaugaacaaauuguuugagaagacuaaaaagcagcuacgagaaaacgcugaggacaugggcaauggaugcuucaagauuuaucacaaaugugauaacgccugcaucggcagcauucgcaaugggaccuacgaccauaacguguacagagacgaggcucugaauaacagguuucaaaucaagggagucgaacucaaaucugguuauaaggauuggauacuguggaucucauucgccauuaguugcuuucuucuguguguggcauugcucggcuucaucaugugggccugccagaaagggaauauucgguguaacaucugcauauga

SEQ ID NO: 141622 - RNA, 1701 nt, Artificial Sequence; identical to SEQ ID NO: 140489
  derived and/or modified CDS sequence (opt3) from hemagglutinin__InfluenzaA__ALE32089

SEQ ID NO: 141623 - RNA, 1701 nt, Artificial Sequence; identical to SEQ ID NO: 140489
  derived and/or modified CDS sequence (opt3) from hemagglutinin__InfluenzaA__ALE32090

SEQ ID NO: 141624 - RNA, 1701 nt, Artificial Sequence; identical to SEQ ID NO: 140489
  derived and/or modified CDS sequence (opt3) from hemagglutinin__InfluenzaA__ALE32091

SEQ ID NO: 141625 - RNA, 1701 nt, Artificial Sequence
  derived and/or modified CDS sequence (opt3) from hemagglutinin__InfluenzaA__ALE32092
augaagaccaucauugcccugagcuacauacucugccuuguguucgcucagaaaauccccggcaacgacaauuccacagcaacucuguguuuggggcaccaugccgucccuaacggaacgauuguuaagaccaucacaaaugauagaauugaggugacuaacgcgaccgaauuaguacaaaauucuucaaucggugagauaugcgacaguccacaccagauccuggauggcgaaaacuguacacuaauugacgcucuccugggggauccgcagugcgacggauuucagaauaaaaagugggaucuuuucguggagaggagcaaagccuauuccaacuguuaccccuaugacgucccugauuacgcaucucugcggucguugguggccucaagcggcacccucgaauuuaauaacgagaguuucaauuggacugguguuacacaaaacgggaccuccucugcuugcauccgccgaagcuccucaaguuucuucagccgucugaauuggcugacgcaucucaacuauacuuacccagcauuaaaugugaccaugcccaacaacgagcaguuugacaagcuguauauuuggggaguccaccauccuggcacagauaaggaccagaucuuccuuuacgcccagucuuccggcagaauaacugugucaaccaaaaggagccaacaggcuguaauuccaaauaucgggagucggccccgcauuagagauaucccuucuaggaucuccauuuacuggacaauaguuaagccaggagacaucuugcugauuaacagcaccgguaaucuaaucgccccgcggggcuauuuuaaaauacgcucggggaagucuuccauuaugcgaucagacgcgcccaucggaaaauguagaagugaaugcaucacgccuaacggcagcauuccaaaugauaagcccuuccagaacgugaauaggaucacuuacggugcauguccucgguaugucaagcacuccacacucaaacuggccaccgggaugcguaacgugccagagaagcagacucgcggaauuuuuggcgcuauagccggcuucaucgaaaaugggugggagggaaugguggacgguugguacggcuuuagacaccaaaacucugaggggaggggacaggcagcugaucuuaaaagcacacaggccgcgauugaccaaaucaauggcaagcugaaccgguugaucgguaaaaccaaugaaaaguuccaucagauugagaaagaauuuucagaggucgaagggcgaauacaggaucucgagaaguauguugaggacacgaagaucgaucuguggaguuacaacgccgaauuacugguggcacucgagaaucagcacaccauugaccuuacagauuccgaaaugaacaaacuguuugagaagacuaaaaagcaauugcgcgaaaacgcugaggacaugggcaauggaugcuucaaaaucuaucauaagugugauaacgccugcauuggcagcaucagaaaugggaccuacgagcacaacguauacagggacgaagcucuaaauaaccgguuucagauaaagggaguggagcugaaaucugguuauaaggacuggauccucuggauuucauucgccaucaguugcuuucugcuuugugucgcacuguugggcuucauuaugugggccugccagaaagggaauauccgcuguaacauaugcauuuga

SEQ ID NO: 141626 - RNA, 1701 nt, Artificial Sequence; identical to SEQ ID NO: 141095
  derived and/or modified CDS sequence (opt3) from hemagglutinin__InfluenzaA__ALE32093

SEQ ID NO: 141627 - RNA, 1701 nt, Artificial Sequence
  derived and/or modified CDS sequence (opt3) from hemagglutinin__InfluenzaA__ALE32094
augaagaccaucauugcccugagcuacauacucugccuuguguucgcucagaaaauccccggcaacgacaauuccacagcaacucuguguuuggggcaccaugccgucccuaacggaacgauuguuaagaccaucacaaaugauagaauugaggugacuaacgcgaccgaauuaguacaaaauucuucaaucggugagauaugcgacaguccacaccagauccuggauggcgaaaacuguacacuaauugacgcucuccugggggauccgcagugcgacggauuucagaauaaaaagugggaucuuuucguggagaggagcaaagccuauuccaacuguuaccccuaugacgucccugauuacgcaucucugcggucguugguggccucaagcggcacccucgaauuuaauaacgagaguuucaauuggacugguguuacacaaaacgggaccuccucugcuugcauccgccgaagcuccucaaguuucuucagccgucugaauuggcugacgcaucucaacuauacuuacccagcauuaaaugugaccaugcccaacaacgagcaguuugacaagcuguauauuuggggaguccaccauccuggcacagauaaggaccagaucuuccuuuacgcccagucuuccggcagaauaacugugucaaccaaaaggagccaacaggcuguaauuccaaauaucgggagucggccccgcauuagagauaucccuucuaggaucuccauuuacuggacaauaguuaagccaggagacaucuugcugauuaccagcacggguaaccuaaucgccccgcggggcuauuuuaaaauacgcucggggaagucuuccauuaugcgaucagacgcgcccaucggaaaauguaagagugaaugcaucacuccuaauggcagcauuccaaacgauaagcccuuccagaaugugaacagaaucacauacggugcauguccuagguaugucaaacacuccacccucaagcuggccacugggaugcggaaugugccagagaaacagacacguggaauuuuuggcgcuauagccggcuucaucgaaaacgggugggagggaaugguggacgguugguacggcuuucgccaccaaaauucugaggggagaggacaggcagcugaucuuaagagcacccaggccgcgauugaccaaaucaacggcaaacugaauagguugaucgguaagacgaacgaaaaauuccaucagauugagaaggaauuuucagaggucgaagggcggauacaggaucucgagaaguauguugaggacaccaaaaucgaucuguggaguuacaaugccgaauuacugguggcacucgagaaccagcacacaauugaccuuacugauuccgaaaugaauaagcuguuugagaaaaccaagaaacaauugcgagaaaacgcugaggacaugggcaacggaugcuucaagaucuaucauaagugugauaaugccugcauuggcagcauccgcaacgggacauacgaccacaauguauacagagacgaggcucuaaacaauagguuucagauaaaaggaguggaacugaagucugguuauaaagauuggauccucuggauuucauucgccaucaguugcuuucugcuuugugucgcacuguugggcuucauuaugugggccugccagaaggggaacauccgguguaauauaugcauuuga

SEQ ID NO: 141628 - RNA, 1701 nt, Artificial Sequence; identical to SEQ ID NO: 140489
  derived and/or modified CDS sequence (opt3) from hemagglutinin__InfluenzaA__ALE32095

SEQ ID NO: 141629 - RNA, 1701 nt, Artificial Sequence
  derived and/or modified CDS sequence (opt3) from hemagglutinin__InfluenzaA__ALE32096
augaagaccaucauugcccugagcuacauacucugccuuguguucgcucagaaaauccccggcaacgacaauuccacagcaacucuguguuuggggcaccaugccgucccuaacggaacgauuguuaagaccaucacaaaugauagaauugaggugacuaacgcgaccgaauuaguacaaaauucuucaaucggugagauaugcgacaguccacaccagauccuggauggcgaaaacuguacacuaauugacgcucuccugggggauccgcagugcgacggauuucagaauaaaaagugggaucuuuucguggagaggagcaaagccuauuccaacuguuaccccuaugacgucccugauuacgcaucucugcggucguugguggccucaagcggcacccucgaauuuaauaacgagaguuucaauuggacugguguuacacaaaacgggaccuccucugcuugcauccgccgaagcuccucaaguuucuucagccgucugaauuggcugacgcaucucucuuauacuuacccagcauuaaacgugaccaugcccaauaacgagcaguuugacaagcuguauauuuggggaguccaccauccuggcacagauaaggaccagaucuuccuuuacgcccaguccucaggcagaauaacugugagcaccaaaaggagucaacaggcuguaauuccaaacaucgggucucggccccgcauuagagauaucccuuccaggaucagcauuuacuggacaauaguuaagccaggagacaucuugcugauuaauucgaccgguaaccuaaucgccccgcggggcuauuuuaaaauacgcucugggaaguccucaauuaugcgaagugacgcgcccaucggaaaauguaagagcgaaugcaucacgccuaauggcuccauuccaaacgauaagcccuuccagaaugugaacagaaucacuuacggugcauguccuagguaugucaaacacucuacacucaagcuggccaccgggaugcggaaugugccagagaaacagacucguggaauuuuuggcgcuauagccggcuucaucgaaaacgggugggagggaaugguggacgguugguacggcuuucgccaccaaaauagcgaggggagaggacaggcagcugaucuuaagucaacacaggccgcgauugaccaaaucaacggcaaacugaauagguugaucgguaagaccaacgaaaaauuccaucagauugagaaggaauuuagugaggucgaagggcggauacaggaucucgagaaguauguugaggacacgaaaaucgaucugugguccuacaaugccgaauuacugguggcacucgagaaccagcacaccauugaccuuacagauagcgaaaugaauaagcuguuugagaaaacuaagaaacaauugcgagaaaacgcugaggacaugggcaacggaugcuucaagaucuaucauaagugugauaaugccugcauuggcucuauccgcaacgggaccuacgaccacaauguauacagagacgaggcucuaaacaauagguuucagauaaaaggaguggaacugaagucagguuauaaagauuggauccucuggauuaguuucgccaucagcugcuuucugcuuugugucgcacuguugggcuucauuaugugggccugccagaaggggaacauccgguguaauauaugcauuuga

SEQ ID NO: 141630 - RNA, 1701 nt, Artificial Sequence; identical to SEQ ID NO: 140489
  derived and/or modified CDS sequence (opt3) from hemagglutinin__InfluenzaA__ALE32097

SEQ ID NO: 141631 - RNA, 1701 nt, Artificial Sequence; identical to SEQ ID NO: 141095
  derived and/or modified CDS sequence (opt3) from hemagglutinin__InfluenzaA__ALE32099

SEQ ID NO: 141632 - RNA, 1701 nt, Artificial Sequence
  derived and/or modified CDS sequence (opt3) from hemagglutinin__InfluenzaA__ALE32100
augaagaccaucauugcccugagcuacauacucugccuuguguucgcucagaaaauccccggcaacgacaauuccacagcaacucuguguuuggggcaccaugccgucccuaacggaacgauuguuaagaccaucacaaaugauagaauugaggugacuaacgcgaccgaauuaguacaaaauucuucaaucggugagauaugcgacaguccacaccagauccuggauggcgaaaacuguacacuaauugacgcucuccugggggauccgcagugcgacggauuucagaauaaaaagugggaucuuuucguggagaggagcaaagccuauuccaacuguuaccccuaugacgucccugauuacgcaucucugcggucguugguggccucaagcggcacccucgaauuuaauaacgagaguuucaauuggacugguguuacacaaaacgggaccuccucugcuugcauccgccgaagcuccucaaguuucuucagccgucugaauuggcugacgcaucucaacuauacuuacccagcauuaaaugugaccaugcccaacaacgagcaguuugacaagcuguauauuuggggaguccaccauccuggcacagauaaggaccagaucuuccuuuacgcccagucuuccggcagaauaacugugucaaccaaaaggagccaacaggcuguaauuccaaauaucgggagucggccccgcauuagagauaucccuucuaggaucuccauuuacuggacaauaguuaagccaggagacaucuugcugauuaacagcaccgguaaucuaaucgccccgcggggcuauuuuaaaauacgcucggggaagucuuccauuaugcgaucagacgcgcccaucggaaaauguaagagugaaugcaucacgccuaacggcagcauuccaaaugauaagcccuuccagaacgugaauagaaucacuuacggugcauguccuagguaugucaaacacuccacacucaagcuggccaccgggaugcggaacgugccagagaaacagacucguggaauuuuuggcgcuauagccggcuucaucgaaaaugggugggagggaaugguggacgguugguacggcuuucgccaccaaaacucugaggggagaggacaggcagcugaucuuaagagcacacaggccgcgauugaccaaaucaauggcaaacugaacagguugaucgguaagaccaaugaaaaauuccaucagauugagaaggaauuuucagaggucgaagggcggauacaggaucucgagaaguauguugaggacacgaaaaucgaucuguggaguuacaacgccgacuuacugguggcacucgaaaaucagcacaccauugaucuuacagacuccgagaugaacaagcuguuugagaaaacuaagaaacaauugcgagaaaacgcugaagauaugggcaauggaugcuucaagaucuaucauaagugugacaacgccugcauuggcagcauccgcaaugggaccuacgaccacaacguauacagagaugaggcucuaaauaacagguuucagauaaaaggaguggagcugaagucugguuauaaagacuggauccucuggauuucauucgccaucaguugcuuucugcuuugugucgcacuguugggcuucauuaugugggccugccagaaggggaauauccgguguaacauaugcauuuga

SEQ ID NO: 141633 - RNA, 1701 nt, Artificial Sequence
  derived and/or modified CDS sequence (opt3) from hemagglutinin__InfluenzaA__ALE32101
augaagaccaucauugcccugagcuacauacucugccuuguguucgcucagaaaauccccggcaacgacaauuccacagcaacucuguguuuggggcaccaugccgucccuaacggaacgauuguuaagaccaucacaaaugauagaauugaggugacuaacgcgaccgaauuaguacaaaauucuucaaucggugagauaugcgacaguccacaccagauccuggauggcgaaaacuguacacuaauugacgcucuccugggggauccgcagugcgacggauuucagaauaaaaagugggaucuuuucguggagaggagcaaagccuauucccaauguuaccccuaugacgucccugauuacgcaucucugcggucguugguggccucaagcggcacccucgaauuuaacaaugagaguuucaacuggacugguguuacacagaaugggaccuccucugcuugcauccgcaagagcuccggaucauuuuucagucgacugaacuggcugacgcaucucaaguauacuuacccagcauuaaaugugaccaugcccaacaaugagcaguuugacaaacuguauauuuggggcguccaccauccuggcacagauaaggaccagaucuuccuuuacgcccguagcucugggagaauaacuguguccaccaaaaggucacaacaggcuguaauuccaaacaucggaagccggccccgcauuagagauaucccuaguaggaucucuauuuacuggacaauaguuaagccaggugacaucuugcugauuaacuccaccggcaaucuaaucgccccgcggggguauuuuaaaauacgcagcggaaagucgucuauuaugcgauccgacgcgcccaucggcaaguguaaaucagaaugcaucacgccuaacgguaguauuccaaaugauaagcccuuccagaacgugaauagaaucacuuacggggcauguccuagguaugucaaacacagcacacucaagcuggccaccggaaugcggaacgugccagagaaacagacucguggcauuuuuggcgcuauagccggguucaucgaaaauggaugggaggguaugguggacggcugguacggguuucgccaccaaaacuccgagggaagaggccaggcagcugaucuuaagucuacacaggccgcgauugaccaaaucaaugguaaacugaacagguugaucgggaagaccaaugaaaaguuccaucagauugagaaagaguucagcgaagucgaaggccggauacaggaucucgagaaguauguugaggacacgaaaaucgaucuguggucauacaacgccgaauuacugguggcacucgagaaucagcacaccauugaccuuacagauagugaaaugaacaagcuguuugagaaaacuaagaagcaauugcgagaaaaugcugaggacaugggaaacggcugcuucaaaaucuaucauaagugugauaacgccugcauuggguccauccgcaauggaaccuacgaccacaacguauacagagacgaggcucuaaauaacagguuucagauaaaagguguggaacucaagagcggcuauaaagauuggauccuguggauuucuuucgccaucucaugcuuucugcuuugugucgcacuguugggguucauuaugugggccugccagaagggaaauauccgguguaacauaugcauuuga

SEQ ID NO: 141634 - RNA, 1701 nt, Artificial Sequence
  derived and/or modified CDS sequence (opt3) from hemagglutinin__InfluenzaA__ALE32102
augaagaccaucauugcccugagcuacauacucugccuuguguucgcucagaaaauccccggcaacgacaauuccacagcaacucuguguuuggggcaccaugccgucccuaacggaacgauuguuaagaccaucacaaaugauagaauugaggugacuaacgcgaccgaauuaguacaaaauucuucaaucggugagauaugcgacaguccacaccagauccuggauggcgaaaacuguacacuaauugacgcucuccugggggauccgcagugcgacggauuucagaauaaaaagugggaucuuuucguggagaggagcaaagccuauuccaacuguuaccccuaugacgucccugauuacgcaucucugcggucguugguggccucaagcggcacccucgaauuuaauaacgagaguuucaauuggacugguguuacacaaaacgggaccuccucugcuugcauccgcaagagcuccucaaguuucuucagccgacugaauuggcugacgcaucucaaguauacuuacccagcauuaaacgugaccaugcccaauaacgagcaguuugacaaacuguauauuuggggaguccaccauccuggcacagauaaggaccagaucuuccuuuacgcccguucuuccggcagaauaacugugucaaccaaaaggagccagcaagcuguaauuccaaacaucgggagucggccccgcauuagagauaucccuucuaggaucuccauuuacuggacaauaguuaagccaggagacaucuugcugauuaauagcaccgguaaccuaaucgccccgcggggcuauuuuaaaauacgcucggggaagucuuccauuaugcgaucagacgcgcccaucggaaaguguaaaagugaaugcaucacgccuaauggcagcauuccaaacgauaagcccuuccagaaugugaacagaaucacuuacggugcauguccuagguaugucaaacacuccacacucaagcuggccaccgggaugcggaaugugccagagaaacagacucguggaauuuuuggcgcuauagccggcuucaucgaaaacgggugggagggaaugguggacgguugguacggcuuucgccaccaaaauucugaggggagaggacaggcagcugaucuuaagagcacacaggccgcgauugaccagaucaacggcaaacugaauagguugaucgguaagaccaacgaaaaguuccaucaaauugagaaagaauuuucagaggucgaagggcggauacaggaucucgagaaguauguugaggacacgaaaaucgaucuguggaguuacaaugccgaauuacugguggcacucgagaaccagcacaccauugaccuuacagauuccgaaaugaauaagcuguuugagaaaacuaagaagcaguugcgagaaaacgcugaggacaugggcaacggaugcuucaaaaucuaucauaagugugauaaugccugcauuggcagcauccgcaacgggaccuacgaccacaauguauacagagacgaggcucuaucuaacagguuucaaauaaaaggaguggaacugaagucagguuauaaagauuggauccucuggauuaguuucgccaucagcugcuuucugcuuugugucgcacuguugggcuucauuaugugggccugccagaaggggaauauccgguguaacauaugcauuuga

SEQ ID NO: 141635 - RNA, 1701 nt, Artificial Sequence; identical to SEQ ID NO: 141202
  derived and/or modified CDS sequence (opt3) from hemagglutinin__InfluenzaA__ALE32103

SEQ ID NO: 141636 - RNA, 1701 nt, Artificial Sequence
  derived and/or modified CDS sequence (opt3) from hemagglutinin__InfluenzaA__ALE32104
augaagaccaucauugcccugagcuacauacucugccuuguguucgcucagaaaauccccggcaacgacaauuccacagcaacucuguguuuggggcaccaugccgucccuaacggaacgauuguuaagaccaucacaaaugaucaaauugaggugacuaacgcgaccgaauuaguacaaaauucuucaaucggugagauaugcgacaguccacaccagauccuggauggcgaaaacuguacacuaauugacgcucuccugggggauccgcagugcgacggauuucagaauaaaaagugggaucuuuucguggagagaagcaaagccuauuccaacuguuaccccuaugacgucccugauuacgcaucucugaggucguugguggccucaagcggcacccucgaauuuaauaacgagaguuucaauuggacugguguuacacagaacgggaccuccucugcuugcauccggcgcagcuccucaaguuucuucagccgacugaauuggcugacgcaucucaacuauacuuacccagcauuaaaugugaccaugcccaacaacgagcaguuugacaagcuguauauuuggggaguccaccauccuggcacagauaaggaccagaucuuccuuuacgcccaaucuuccggccguauaacugugucaaccaaaagaagccagcaggcuguaauuccaaauaucgggaguaggccccggauucgcgauaucccuucuagaaucuccauuuacuggacaauaguuaagccaggagacaucuugcugauuaacagcaccgguaaucuaaucgccccgaggggcuauuuuaaaauacggucggggaagucuuccauuaugcgcucagacgcgcccaucggaaaauguaagagugaaugcaucacgccuaacggcagcauuccaaaugauaagcccuuccagaacgugaaucgaaucacuuacggugcauguccuagauaugucaaacacuccacacucaagcuggccaccgggaugaggaacgugccagagaaacaaacucggggaauuuuuggcgcuauagccggcuucaucgaaaaugggugggagggaaugguggacgguugguacggcuuucgucaccagaacucugaggggcgcggacaggcagcugaucuuaagagcacacaagccgcgauugaccagaucaauggcaaacugaacagauugaucgguaagaccaaugaaaaauuccaucagauugagaaggaauuuucagaggucgaagggaggauacaggaucucgagaaguauguugaggacacgaaaaucgaucuguggaguuacaacgccgaauuacugguggcacucgagaaucaacacaccauugaccuuacagauuccgaaaugaacaagcuguuugagaaaacuaagaaacaguugcgggaaaacgcugaggacaugggcaauggaugcuucaagaucuaucauaagugugauaacgccugcauuggcagcauccgaaaugggaccuacgaccacaacguauaccgcgacgaggcucuaaauaacagauuucagauaaaaggaguggaacugaagucugguuauaaagauuggauccucuggauuucauucgccaucaguugcuuucugcuuugugucgcacuguugggcuucauuaugugggccugccagaaggggaauaucagguguaacauaugcauuuga

SEQ ID NO: 141637 - RNA, 1701 nt, Artificial Sequence; identical to SEQ ID NO: 141147
  derived and/or modified CDS sequence (opt3) from hemagglutinin__InfluenzaA__ALE32105

SEQ ID NO: 141638 - RNA, 1701 nt, Artificial Sequence; identical to SEQ ID NO: 141147
  derived and/or modified CDS sequence (opt3) from hemagglutinin__InfluenzaA__ALE32106

SEQ ID NO: 141639 - RNA, 1701 nt, Artificial Sequence; identical to SEQ ID NO: 141202
  derived and/or modified CDS sequence (opt3) from hemagglutinin__InfluenzaA__ALE32107

SEQ ID NO: 141640 - RNA, 1701 nt, Artificial Sequence; identical to SEQ ID NO: 141432
  derived and/or modified CDS sequence (opt3) from hemagglutinin__InfluenzaA__ALE32108

SEQ ID NO: 141641 - RNA, 1701 nt, Artificial Sequence; identical to SEQ ID NO: 141046
  derived and/or modified CDS sequence (opt3) from hemagglutinin__InfluenzaA__ALE32109

SEQ ID NO: 141642 - RNA, 1701 nt, Artificial Sequence; identical to SEQ ID NO: 141033
  derived and/or modified CDS sequence (opt3) from hemagglutinin__InfluenzaA__ALE32110

SEQ ID NO: 141643 - RNA, 1701 nt, Artificial Sequence; identical to SEQ ID NO: 140489
  derived and/or modified CDS sequence (opt3) from hemagglutinin__InfluenzaA__ALE32111

SEQ ID NO: 141644 - RNA, 1701 nt, Artificial Sequence
  derived and/or modified CDS sequence (opt3) from hemagglutinin__InfluenzaA__ALE32112
augaagaccaucauugcccugagcuacauacucugccuuguguucgcucagaaaauccccggcaacgacaauuccacagcaacucuguguuuggggcaccaugccgucccuaacggaacgauuguuaagaccaucacaaaugauagaauugaggugacuaacgcgaccgaauuaguacaaaauucuucaaucggugagauaugcgacaguccacaccagauccuggauggcgaaaacuguacacuaauugacgcucuccugggggauccgcagugcgacggauuucagaauaaaaagugggaucuuuucguggagaggagcaaagccuauuccaacuguuaccccuaugacgucccugauuacgcaucucugcggucguugguggccucaagcggcacccucgaauuuaauaacgagaguuucaauuggacugguguuacacaaaacgggaccuccucugcuugcauccgccgaagcuccucaaguuucuucagccgucugaauuggcugacgcaucucaacuaugcauacccagccuuaaaugugacuaugcccaacaacgagcaguuugacaagcuguauauuuggggaguccaccauccuggcaccgauaaggaccagaucuuccuuuacgcucagucuuccggcagaauaacagugucaacuaaaaggagccaacaggccguaauuccaaauaucgggagucggccccgcauuagagauaucccuucuaggaucuccauuuacuggaccauaguuaagccaggagacaucuugcugauuaacagcacagguaaucuaaucgcgccgcggggcuauuuuaaaauacgcucggggaagucuuccauuaugcgaucagacgcacccaucggaaaauguaagagugaaugcaucaccccuaacggcagcauuccaaaugauaagcccuuccagaacgugaauagaaucacguacggugccuguccuagguaugucaaacacuccacucucaagcuggcuacagggaugcggaacgugccagagaaacagacccguggaauuuuuggcgccauagcaggcuucaucgaaaaugggugggagggaaugguggacgguugguacggcuuucgccaccaaaacucugaggggagaggacaggcugccgaucuuaagagcacucaggcggccauugaccaaaucaauggcaaacugaacagguugaucgguaagacaaaugaaaaauuccaucagauugagaaggaauuuucagaggucgaagggcggauacaggaucucgagaaguauguugaggacaccaaaaucgaucuguggaguuacaacgcagaauuacugguggcucucgagaaucagcacacgauugaccuuaccgauuccgaaaugaacaagcuguuugagaaaacaaagaaacaauugcgagaaaacgccgaggacaugggcaauggaugcuucaagaucuaucauaagugugauaacgcuugcauuggcagcauccgcaaugggacuuacgaccacaacguauacagagacgaggcccuaaauaacagguuucagauaaaaggaguggaacugaagucugguuauaaagauuggauccucuggauuucauucgcaaucaguugcuuucugcuuugugucgcccuguugggcuucauuaugugggcuugccagaaggggaauauccgguguaacauaugcauuuga

SEQ ID NO: 141645 - RNA, 1701 nt, Artificial Sequence
  derived and/or modified CDS sequence (opt3) from hemagglutinin__InfluenzaA__ALE32113
augaagaccaucauugcccugagcuacauacucugccuuguguucgcucagaaaauccccggcaacgacaauuccacagcaacucuguguuuggggcaccaugccgucccuaacggaacgguugugaagaccauuacaaaugauagaaucgagguaacuaacgcgaccgaauuagugcaaaauucuucaauuggugagaucugcgacaguccacaccagauacuggauggcgaaaacuguacacuaaucgacgcucuccugggggauccgcagugcgacggauuucagaauaaaaagugggaucuuuucgucgagaggagcaaagccuauuccaacuguuaccccuaugacgugccugauuacgcaucucugcggucguugguugccucaagcggcacccucgaauuuaauaacgagaguuucaauuggacuggugugacacaaaacgggaccuccucugcuugcauucgcggaagcuccucaaguuucuucagccgacugaauuggcugacgcaucucaacuauacuuacccagcauuaaaugucaccaugcccaacaacgagcaguuugacaagcuguauaucuggggcgugcaccauccuggcacagauaaggaccagauuuuccuuuacgcccagucuuccgggcguaucacuguaucaaccaaaagaagccaacaggcuguuauaccaaauauuggaaguaggccccggauccgcgauauuccuucuagaaucuccaucuacuggacaauugugaagccaggugacauauugcugaucaacagcaccggcaaucuaauugccccgaggggguauuuuaaaaugcggucgggaaagucuuccaucaugcgcucagacgcgcccauaggcaaauguaagagugaaugcauuacgccuaacgguagcaucccaaaugauaagcccuuccagaacgucaaucgaaucacuuacggggcauguccuagauaugugaaacacuccacacucaagcuggccaccggaaugaggaacgugccagagaaacagacucggggcauuuuuggcgcuaucgccggguucauugaaaauggaugggaggguauggucgacggcugguacggguuucgucaccaaaacucugagggacgcggccaggcagcugaucuuaagagcacacaggccgcgauagaccaaaucaaugguaaacugaacagauugauugggaagaccaaugaaaaauuccaucagaucgagaaggaauuuucagagguugaaggcaggauccaggaucucgagaaguauguggaggacacgaaaauugaucuguggaguuacaacgccgaauuacugguagcacucgagaaucagcacaccauagaccuuacagauuccgaaaugaacaagcuguuugagaaaacuaagaaacaauugcgggaaaacgcugaggacaugggaaauggcugcuucaagaucuaucauaagugugauaacgccugcauugggagcauccgaaauggaaccuacgaccacaacguguaccgcgacgaggcucuaaauaacagauuucagauuaaaggugucgaacugaagucuggcuauaaagauuggauccucuggauaucauucgccaucaguugcuuucugcuuuguguggcacuguugggguucauuaugugggccugccagaagggaaauaucagguguaacauuugcaucuga

SEQ ID NO: 141646 - RNA, 1701 nt, Artificial Sequence; identical to SEQ ID NO: 141033
  derived and/or modified CDS sequence (opt3) from hemagglutinin__InfluenzaA__ALE32114

SEQ ID NO: 141647 - RNA, 1701 nt, Artificial Sequence; identical to SEQ ID NO: 141033
  derived and/or modified CDS sequence (opt3) from hemagglutinin__InfluenzaA__ALE32115

SEQ ID NO: 141648 - RNA, 1701 nt, Artificial Sequence
  derived and/or modified CDS sequence (opt3) from hemagglutinin__InfluenzaA__ALE32116
augaagaccaucauugcccugagcuacauacucugccuuguguucgcucagaaaauccccggcaacgacaauuccacagcaacucuguguuuggggcaccaugccgucccuaacggaacgauuguuaagaccaucacaaaugauagaauugaggugacuaacgcgaccgaauuaguacaaaauucuucaaucggugagauaugcgacaguccacaccagauccuggauggcgaaaacuguacacuaauugacgcucuccugggggauccgcagugcgacggauuucagaauaaaaagugggaucuuuucguggagaggagcaaagccuauuccaacuguuaccccuaugacgucccugauuacgcaucucugcggucguugguggccucaagcggcacccucgaauuuaauaacgagaguuucaauuggacugguguuacacaaaacgggaccuccucugcuugcauccgccgaagcuccucaaguuucuucagccgucugaauuggcugacgcaucucaacuauacuuacccagcauuaaaugugaccaugcccaacaacgagcaguuugacaagcuguauauuuggggaguccaccauccuggcacagauaaggaccagaucuuccuuuacgcccagucuuccggcagaauaacugugucaaccaaaaggagccaacaggcuguaauuccaaauaucgggagucggccccgcauuagagauaucccuucuaggaucuccauuuacuggacaauaguuaagccaggagacaucuugcugauuaacagcaccgguaaucuaaucgccccgcggggcuauuuuaaaauacgcucggggaagucuuccauuaugcgaucagacgcgcccaucggaaaauguaagagugaaugcaucacgccuaacggcagcauuccaaaugauaagcccuuccagaacgugaauagaaucacuuacggugcauguccuagguaugucaaacacuccacacucaagcuggccaccgggaugcggaacgugccagagaaacagacucguggaauuuuuggcgcuauagccggcuucaucgaaaaugggugggagggaaugguggacgguugguacggcuuucgccaccaaaacucugaggggagaggacaggcagcugaucuuaagagcacacaggccgcgauugaccaaaucaauggcaaacugaacagguugaucgguaagaccaaugaaaaauuccaucagauugagaaggaauuuucagaggucgaagggcggauacaggaucucgagaaguauguugaggacacgaaaaucgaucuguggaguuacaacgccgaauuacugguggcacucgagaaucagcacaccauugaccuuacagauuccgaaaugaacaagcuguuugagaaaacuaagaaacaauugcgagaaaacgcugaggacaugggcaauggaugcuucaagaucuaucauaagugugauaacgccugcauuggcagcauccgcaaugggaccuacgaccacaacguauacagagacgaggcucuaaauaacagguuucagauaaaaggaguggaacugaagucugguuauaaagauuggauccucuggauuucauucgccaucaguugcuuucugcuuugugucgcacuguugggcuucauuaugugggccugccagaaggggaaugugcgguguaacaucugcauauga

SEQ ID NO: 141649 - RNA, 1701 nt, Artificial Sequence
  derived and/or modified CDS sequence (opt3) from hemagglutinin__InfluenzaA__ALE32117
augaagaccaucauugcccugagcuacauacucugccuuguguucgcucagaaaauccccggcaacgacaauuccacagcaacucuguguuuggggcaccaugccgucccuaacggaacgauuguuaagaccaucacaaaugauagaauugaggugacuaacgcgaccgaauuaguacaaaauucuucaaucggugagauaugcgacaguccacaccagauccuggauggcgaaaacuguacacuaauugacgcucuccugggggauccgcagugcgacggauuucagaauaaaaagugggaucuuuucguggagaggagcaaagccuauuccaacuguuaccccuaugacgucccugauuacgcaucucugcggucguugguggccucaagcggcacccucgaauuuaauaacgagaguuucaauuggacugguguuacacaaaacgggaccuccucugcuugcauccgccgaagcuccucaaguuucuuuagccgucugaauuggcugacgcaucucaacuauacuuacccagcauuaaaugugaccaugcccaacaacgagcaguuugacaagcuguauauuuggggaguccaccauccuggcacagauaaggaccagaucuuccuuuacgcccagucuuccggcagaauaacugugucaaccaaaaggagccaacaggcuguaauuccaaauaucgggagucggccccgcauuagagauaucccuucuaggaucuccauuuacuggacaauaguuaagccaggagacaucuugcugauuaacagcaccgguaaucuaaucgccccgcggggcuauuuuaaaauacgcucggggaagucuuccauuaugcgaucagacgcgcccaucggaaaauguaagagugaaugcaucacgccuaacggcagcauuccaaaugauaagcccuuccagaacgugaauagaaucacuuacggugcauguccuagguaugucaaacacuccacacucaagcuggccaccgggaugcggaacgugccagagaaacagacucguggaauuuuuggcgcuauagccggcuucaucgaaaaugggugggagggaaugguggacgguugguacggcuuucgccaccaaaacucugaggggagaggacaggcagcugauuucaagagcacacaggccgcgauugaccaaaucaauggcaaacuuaacaggcugaucgguaagaccaaugaaaaauuccaucagauugagaaggaauuuucagaggucgaagggcggauacaggauuuggagaaguauguugaggacacgaaaaucgaucucuggaguuacaacgccgaacuguuaguggcacuggagaaucagcacaccauugaccucacagauuccgaaaugaacaaacuuuucgagaagacuaagaaacaacugcgagaaaacgcugaggacaugggcaauggaugcuuuaagaucuaucauaagugugauaacgccugcauuggcagcauccgcaaugggaccuacgaccacaacguauacagagacgaggcuuugaauaacagguuccagauaaaaggaguggaacuaaagucugaguauaaagauuggauccuguggauuucauuugccaucaguugcuuccuccugugugucgcacuucuggguuuuauuaugugggccugccagaagggcaauauccgguguaacauaugcauuuga

SEQ ID NO: 141650 - RNA, 1701 nt, Artificial Sequence; identical to SEQ ID NO: 141095
  derived and/or modified CDS sequence (opt3) from hemagglutinin__InfluenzaA__ALE32118

SEQ ID NO: 141651 - RNA, 1701 nt, Artificial Sequence; identical to SEQ ID NO: 130717
  derived and/or modified CDS sequence (opt3) from hemagglutinin__InfluenzaA__ALM06086

SEQ ID NO: 141652 - RNA, 1701 nt, Artificial Sequence; identical to SEQ ID NO: 138088
  derived and/or modified CDS sequence (opt3) from hemagglutinin__InfluenzaA__ALM06087

SEQ ID NO: 141653 - RNA, 1701 nt, Artificial Sequence
  derived and/or modified CDS sequence (opt3) from hemagglutinin__InfluenzaA__ALM06088
augaaggccauccuggugguccuccuuuacaccuucgcuacagcaaacgccgacacucugugcauuggcuaucacgcgaauaacagcacggauaccguugacacaguguuggagaagaauguaacugugacccauuccgucaacuuacuggaagauaagcacaaugggaaacuauguaagcucagaggaguggcuccccugcaucuugguaaaugcaacauagccggcuggauccuggggaauccugagugugaaucuuugucaacagcaaguagcugguccuacauuguugagaccucuucgucagacaacggaacuugcuauccaggcgauuuuaucaauuacgaagaacucagggagcagcugagcaguguguccucuuucgaacgguuugagauuuucccgaagacaagcuccuggcccaaccacgacucaaauaagggugucaccgccgcuuguccucaugcaggggccaaaaguuuuuauaagaaccugaucuggcucgugaaaaagggaaauagcuacccaaaauuaucucaauccuauauaaacgauaagggcaaggaaguacugguucuuuggggcauccaccaccccucaacgacugcugaccagcagagcuuguaccagaaugccgaugcguacguguucgucgggaccagucgcuauucuaaaaaguuuaaaccugagauugcaauccgaccaaaggugcguggacaagaggguagaaugaacuacuauuggacacugguggaacccggcgacaaaauuacuuucgaggccaccgggaaccuagucguuccuagguacgcuuuuacaauggaacggaaugccggauccggcaucauaauuagcgauaccccagugcaugacugcaacacgacuugucagacaccggagggugcaaucaauaccucgcuccccuuccagaacauucacccuaucacuaucgggaagugcccaaaauauguaaagucuacaaagcugcgccuugcuaccggacugagaaaugugcccuccauucagucaaggggcuuguuuggcgccauagcgggguucaucgaaggagguuggacgggcauggucgaugggugguacggauaucaucaccaaaacgagcagggcagugguuacgccgcagaccucaaaagcacccagaaugcuauugacaagaucacaaacaaaguuaauuccgugauagagaagaugaacacucaguuuaccgccguggggaaagaguucaaucaccuggagaagcggauugaaaacuuaaauaagaaagucgaugacggcuuccuggauaucuggacauacaacgcugagcuccuugugcuguuggaaaaugagcgcacucuagacuaucaugauucuaacguaaagaaccuguacgagaaaguucgaaaucaacucaagaacaaugccaaagaaaucggaaacggcuguuuugaguucuaucacaagugcgacaauaccuguauggaaagcgugaagaacgggacauacgauuauccuaaauacucagaggaagcaaagcugaauagagagaaaauugacggagucaaacuugagaguaccaggaucuaucagauucuggccauauacuccacuguggcuagcucuuugguccucgugguuucacugggugcgaucaguuuuuggaugugcagcaacggcuccuuacagugccggauuuguaucuga

SEQ ID NO: 141654 - RNA, 1701 nt, Artificial Sequence; identical to SEQ ID NO: 138088
  derived and/or modified CDS sequence (opt3) from hemagglutinin__InfluenzaA__ALM06089

SEQ ID NO: 141655 - RNA, 1701 nt, Artificial Sequence
  derived and/or modified CDS sequence (opt3) from hemagglutinin__InfluenzaA__ALN39661
augaagaccaucauugcccugagcuacauacucugccuuguguucgcucagaaaauccccggcaacgacaauuccacagcaacucuguguuuggggcaccaugccgucccuaacggaacgauuguuaagaccaucacaaaugauagaauugaggugacuaacgcgaccgaauuaguacaaaauucuucaaucggugagauaugcgacaguccacaccagauccuggauggcgaaaacuguacacuaauugacgcucuccugggggauccgcagugcgacggauuucagaauaaaaagugggaucuuuucguggagaggagcaaagccuauuccaacuguuaccccuaugacgucccugauuacgcaucucugcggucguugguggccucaagcggcacccucgaauuuaauaacgagaguuucaauuggacugguguuacacaaaacgggaccuccucugcuugcauccgccgaagcuccucaaguuucuucagccgucugaauuggcugacgcaucucaacuauacuuacccagcauuaaaugugaccaugcccaacaacgagcaguuugacaagcuguauauuuggggaguccaccauccuggcacagauaaggaccagaucuuccuuuacgcccagucuuccggcagaauaacugugucaaccaaaaggagccaacaggcuguaauuccaaauaucgggagucggccccgcauuagagauaucccuucuaggaucuccauuuacuggacaauaguuaagccaggagacaucuugcugauuaacagcaccgguaaucuaaucgccccgcggggcuauuuuaaaauacgcucggggaagucuuccauuaugcgaucagacgcgcccaucggaaaauguaagagugaaugcaucacgccuaacggcagcauuccaaaugauaagcccuuccagaacgugaauagaaucacuuacggugcauguccuagguaugucaaacacuccacacucaagcuggccaccgggaugcggaacgugccagagaaacagacucguggaauuuuuggcgcuauagccggcuucaucgaaaaugggugggagggaaugguggacgguugguacggcuuucgccaccaaaacucugaggggagaggacaggcagcugaucuuaagagcacacaggccgcgauugaccaaaucaauggcaaacugaacagguugaucgguaagaccaaugaaaaauuccaucagauugagaaggaauuuucagaggucgaagggcggauacaggaucucgagaaguauguugaggacacgaaaaucgaucuguggaguuacaacgccgaauuacugguggcacucgagaaucagcacaccauugaccuuacagauuccgaaaugaacaagcuguuugagaaaacuaagaaacaauugcgagaaaacgcugaggacaugggcaauggaugcuucaagaucuaucauaagugugauaacgccugcauuggcagcauccgcaaugggaccuacgaccacaacguauacagagacgaggcucuaaauaacagguuucagauaaaaggaguggaacugaagucugguuauaaagauuggauccucuggauuucauucgccaucaguugcuuucugcuuuguauugcacuguugggcuucaucaugugggccugccagaaggggaauauacgguguaacauuugcaucuga

SEQ ID NO: 141656 - RNA, 1701 nt, Artificial Sequence; identical to SEQ ID NO: 141022
  derived and/or modified CDS sequence (opt3) from hemagglutinin__InfluenzaA__ALN39662

SEQ ID NO: 141657 - RNA, 1701 nt, Artificial Sequence; identical to SEQ ID NO: 140489
  derived and/or modified CDS sequence (opt3) from hemagglutinin__InfluenzaA__ALN39663

SEQ ID NO: 141658 - RNA, 1701 nt, Artificial Sequence
  derived and/or modified CDS sequence (opt3) from hemagglutinin__InfluenzaA__ALN39664
augaagaccaucauugcccugagcuacauacucugccuuguguucgcucagaaacugcccggcaacgacaauuccacagcaacuuuguguuuagggcaccaugccgucccuaacggaacgaucguuaagaccauuacaaaugauagaaucgaggugacuaacgcgaccgaacugguacaaaauucuucaauuggugagaucugcgacaguccacaccagauacuagauggcgaaaacuguacacucaucgacgcucugcuuggggauccgcagugcgacggauuucagaauaaaaagugggaucuguucguggagaggagcaaagccuauuccaacuguuaccccuaugacgucccugauuacgcaucuuugcggucgcucguggccucaagcggcacccuggaauuuaauaacgagaguuucaauugggcugguguuacucaaaacgggacauccucuagcugcauucgcggauccaauucaaguuucuucagccgacugaacuggcucacccauuuaaauucuaaguauccagcacugaacgugacgaugcccaacaaugagcaguuugacaagcuguacaucuggggcguccaccauccuggcacugauaaagaccagauuuucuuguaugcccagccauccgggcgugugaccguaucaacaaagagaagccaacaggcuguuauccccaacauaggaaguaggccucggauucgcgauaucccaucuagaauuuccaucuacuggacuaucgugaaaccgggugacauucugcuaauaaauagcaccggcaaccucaucgcccccaggggguacuuuaagauucggucgggaaaaucuuccaucaugcgcucagacgcgccuauaggcaaguguaagagugaaugcauuacaccaaaugguagcauccccaacgauaaaccuuuccagaaugucaaccgaaucaccuauggggcauguccaagauacgugaagcaguccacgcugaaacuugccacuggaaugaggaaugugcccgagcggcaaacacguggcauuuuuggcgcuaucgccggguucauugaaaacggaugggaggguauggucgacggcugguauggguuucgccaccaaaauucugagggaagaggccaggcagcugaucuuaagagcacccaggccgcgauagaccagaucaacgguaaauugaauaggcucauugggaagacuaacgaaaaauuccaccagaucgagaaggaauuuucagagguugaaggccggauccaggaucuggagaaguacguggaggacacaaaaauugauuuauggaguuauaaugccgaacugcucguagcacuugagaaccaacauaccauagaccugacggauuccgaaaugaacaaguuguuugagaaaaccaagaaacagcuacgagaaaaugcugaggacaugggaaacggcugcuucaagaucuaccacaagugugauaaugccugcauugggagcauccgcaacggaacauaugaccaugacguguacagagaugaggcucugaauaacagguuucagauuaaaggugucgaacucaagucuggcuacaaagacuggauccuguggauaucauucgccaucaguugcuuucuucuguguguggcauugcucggguucauuaugugggccugccagaagggaaauauccgguguaacauuugcaucuga

SEQ ID NO: 141659 - RNA, 1701 nt, Artificial Sequence; identical to SEQ ID NO: 140489
  derived and/or modified CDS sequence (opt3) from hemagglutinin__InfluenzaA__ALN39665

SEQ ID NO: 141660 - RNA, 1701 nt, Artificial Sequence; identical to SEQ ID NO: 141095
  derived and/or modified CDS sequence (opt3) from hemagglutinin__InfluenzaA__ALN39666

SEQ ID NO: 141661 - RNA, 1701 nt, Artificial Sequence
  derived and/or modified CDS sequence (opt3) from hemagglutinin__InfluenzaA__ALN39667
augaagaccaucauugcccugagcuacauacucugccuuguguucgcucagaaacugcccggcaacgacaauuccacagcaacuuuguguuuagggcaccaugccgucccuaacggaacgaucguuaagaccauuacaaaugauagaaucgaggugacuaacgcgaccgaacugguacaaaauucuucaauuggugagaucugcaacaguccacaccagauacuagacggcgaaaauuguacacucaucgaugcucugcuuggggacccgcagugcgauggauuucagaacaaaaagugggaccuguucguggagaggagcaaagccuauuccaauuguuaccccuaugaugucccugacuacgcaucuuugcggucgcucguggccucaagcggcacccuggaauuuaacaaugagaguuucaacugggcugguguuacucaaaaugggacauccucugcaugcauucgcggaagcaacuccucauuuuucagucgacugaauuggcucacccauagcaacuuuaaguauccagccuuaaacgugacgaugcccaauaacgagcaguucgauaagcuguacaucuggggcguccaccauccuggcacugacaaagaucagauuuuucuuuaugcucagucuuccgggcguaucaccgugucaacaaagagaagccaacaggccguaacuccaaauauaggaaguaggccccggauucgcaacaucccuucuagaauuuccaucuacuggaccaucguuaaaccaggugacauuuugcugauaaauagcacaggcaaccuaaucgcgccgaggggguacuucaagauucggucgggaaaaucuuccaucaugcgcucagaugcacccauaggcaaguguaagagugaaugcauuaccccuaaugguagcaucccaaacgacaaacccuuucagaaugugaaccgaaucacguauggggccuguccuagauacgucaagcaguccacucucaaacuggcuacaggaaugaggaaugugccagagaagcaaacccggggcauuuucggcgccaucgcaggguuuauugaaaacggaugggaggguaugaaagacggcugguauggguuccgucaccaaaauucugagggacgcggccaggcugccgaucuuaagagcacucaggcggccauagaccagaucaacgguaaacugaauagauugauugggaagacaaacgaaaaguuccaccagaucgagaaagaauuuucagagguggaaggcaggauccaggaucucgagaaguacgucgaggacaccaaaauugaucuguggaguuauaacgcagaauuacugguugcucucgagaaucaacauacgauagaccuuaccgauuccgaaaugaacaagcuguucgagaaaacaaagaagcaguugcgggaaaaugccgaggacaugggaaacggcugcuuuaaaaucuaccacaagugugauaaugcuugcauugggagcauccgaaacggaacuuaugaccaugauguguaccgcaaugaggcccuaaacaauagauuccagauuaaagguguagaacugaagucuggcuacaaagacuggauccucuggauaucauuugcaaucaguugcuuccugcuuuguguggcccuguugggguuuauuaugugggcuugccagaagggaaacaucagguguaauauuugcaucuga

SEQ ID NO: 141662 - RNA, 1701 nt, Artificial Sequence; identical to SEQ ID NO: 141564
  derived and/or modified CDS sequence (opt3) from hemagglutinin__InfluenzaA__ALN39668

SEQ ID NO: 141663 - RNA, 1701 nt, Artificial Sequence
  derived and/or modified CDS sequence (opt3) from hemagglutinin__InfluenzaA__ALN39669
augaagaccaucauugcccugagcuacauacucugccuuguguucgcucagaaaauccccggcaacgacaauuccacagcaacucuguguuuggggcaccaugccgucccuaacggaacgauuguuaagaccaucacaaaugauagaauugaggugacuaacgcgaccgaauuaguacaaaauucuucaaucggugagauaugcgacaguccacaccagauccuggauggcgaaaacuguacacuaauugacgcucuccugggggauccgcagugcgacggauuucagaauaaaaagugggaucuuuucguggagaggagcaaagccuauuccaacuguuaccccuaugacgucccugauuacgcaucucugcggucguugguggccucaagcggcacccucgaauuuaauaacgagaguuucaauuggacugguguuacacaaaacgggaccuccucugcuugcauccgccgaagcuccucaaguuucuucagccgucugaauuggcugacgcaucucaacuauacuuacccagcauuaaaugugaccaugcccaacaacgagcaguuugacaagcuguauauuuggggaguccaccauccuggcacagauaaggaccagaucuuccuuuacgcccaguugucuggcagaauaacuguguccaccaaaaggucacaacaggcuguaauuccaaauaucgggagccggccccgcauuagagauaucccuaguaggaucucuauuuacuggacaauaguuaagccaggagacauccugcuaauuaacuccaccgguaaucucaucgccccgcggggcuauuuuaaaauacgcagcgggaagucgucuauuaugcgauccgacgcgcccaucggaaaauguaagucagaaugcaucacgccuaacggcaguauuccaaaugauaagcccuuccagaacgugaauagaaucacuuacggugcauguccuagguaugucaaacacagcacacugaaacuugccaccgggaugcggaacgugccagagaagcagacucguggaauuuuuggcgcuauagccggcuucaucgaaaaugggugggagggaaugguggacgguugguacggcuuucgccaccaaaacuccgaggggagaggacaggcagcugaucugaagucuacacaggccgcgauugaccaaaucaauggcaaauugaacaggcucaucgguaagaccaaugaaaaauuccaucagauugagaaggaauuuagcgaggucgaagggcggauacaggaucuggagaaguauguugaggacacgaaaaucgauuuauggucauacaacgccgaacugcucguggcacuugagaaucagcacaccauugaccugacagauagugaaaugaacaaguuguuugagaaaacuaagaaacaacuacgagaaaacgcugaggacaugggcaauggaugcuucaagaucuaucauaagugugauaacgccugcauuggcuccauccgcaaugggaccuacgaccacaacguauacagagacgaggcucugaauaacagguuucagauaaaaggaguggaacucaagagcgguuauaaagauuggauccuguggauuucuuucgccaucucaugcuuucuucugugugucgcauugcucggcuucauuaugugggccugccagaaggggaauauccgguguaacauaugcauuuga

SEQ ID NO: 141664 - RNA, 1701 nt, Artificial Sequence; identical to SEQ ID NO: 140489
  derived and/or modified CDS sequence (opt3) from hemagglutinin__InfluenzaA__ALN39670

SEQ ID NO: 141665 - RNA, 1701 nt, Artificial Sequence
  derived and/or modified CDS sequence (opt3) from hemagglutinin__InfluenzaA__ALN39671
augaagaccaucauugcccugagcuacauacucugccuuguguucgcucagaaaauccccggcaacgacaauuccacagcaacucuguguuuggggcaccaugccgucccuaacggaacgauuguuaagaccaucacaaaugauagaauugaggugacuaacgcgaccgaauuaguacaaaauucuucaaucggugagauaugcgacaguccacaccagauccuggauggcgaaaacuguacacuaauugacgcucuccugggggauccgcagugcgacggauuucagaauaaaaagugggaucuuuucguggagaggagcaaagccuauuccaacuguuaccccuaugacgucccugauuacgcaucucugcggucguugguggccucaagcggcacccucgaauuuaauaacgagaguuucaauuggacugguguuacacaaaacgggaccuccucugcuugcauccgccgaagcuccucaaguuucuucagccgucugaauuggcugacgcaucucaacuauacuuacccagcauuaaaugugaccaugcccaacaacgagcaguuugacaagcuguauauuuggggaguccaccauccuggcacagauaaggaccagaucuuccuuuacgcccagucuuccggcagaauaacugugucaaccaaaaggagccaacaggcuguaauuccaaauaucgggagucggccccgcauuagagauaucccuucuaggaucuccauuuacuggacaauaguuaagccaggagacaucuugcugauuaacagcaccgguaaucuaaucgccccgcggggcuauuuuaaaauacgcucggggaagucuuccauuaugcgaucagacgcgcccaucggaaaauguaagagugaaugcaucacgccuaacggcagcauuccaaaugauaagcccuuccagaacgugaauagaaucacuuacggugcauguccuagguaugucaaacacuccacacucaagcuggccaccgggaugcggaacgugccagagaaacagacucguggaauuuuuggcgcuauagccggcuucaucgaaaaugggugggagggaaugguggacgguugguacggcuuucgccaccaaaacucugaggggagaggacaggcagcugaucuuaagagcacacaggccgcgauugaccaaaucaauggcaaacugaacagguugaucgguaagaccaaugaaaaauuccaucagauugagaaggaauuuucagaggucgaagggcggauacaggaucucgagaaguauguugaggacacgaaaaucgaucuguggaguuacaacgccgaauuacugguggcacucgagaaucagcacaccauugaccuuacagauuccgaaaugaacaagcuguuugagaaaacucgaaagcaauugcgcgaaaacgcugaggacaugggcaauggaugcuucaaaaucuaucauaagugugauaacgccugcauuggcagcaucagaaaugggaccuacgaccacaacguauacagggacgaggcucuaaauaaccgguuucagauaaagggaguggaacugaaaucugguuauaaggauuggauccucuggauuucauucgccaucaguugcuuucugcuuugugucgcacuguugggcuucauuaugugggccugccagaaagggaauauccgcuguaacauaugcauuuga

SEQ ID NO: 141666 - RNA, 1701 nt, Artificial Sequence; identical to SEQ ID NO: 140489
  derived and/or modified CDS sequence (opt3) from hemagglutinin__InfluenzaA__ALN39672

SEQ ID NO: 141667 - RNA, 1701 nt, Artificial Sequence
  derived and/or modified CDS sequence (opt3) from hemagglutinin__InfluenzaA__ALN39673
augaagaccaucauugcccugagcuacauacucugccuuguguucgcucagaaaauccccggcaacgacaauuccacagcaacucuguguuuggggcaccaugccgucccuaacggaacgauuguuaagaccaucacaaaugauagaauugaggugacuaacgcgaccgaauuaguacaaaauucuucaaucggugagauaugcgacaguccacaccagauccuggauggcgaaaacuguacacuaauugacgcucuccugggggauccgcagugcgacggauuucagaauaaaaagugggaucuuuucguggagaggagcaaagccuauuccaacuguuaccccuaugacgucccugauuacgcaucucugcggucguugguggccucaagcggcacccucgaauuuaauaacgagaguuucaauuggacugguguuacacaaaacgggaccuccucugcuugcauccgccgaagcuccucaaguuucuucagccgucugaauuggcugacgcaucucaacuauacuuacccagcauuaaaugugaccaugcccaacaacgagcaguuugacaagcuguauauuuggggaguccaccauccuggcacagauaaggaccagaucuuccuuuacgcccagucuuccggcagaauaacugugucaaccaaaaggagccaacaggcuguaauuccagauaucgggagucggccccgcauuagagacaucccuucuaggaucuccauuuacuggacaauaguuaagccaggagacaucuugcugauuaauagcaccgguaaccuaaucgccccgcggggcuauuuuaaaauacgcucggggaagucuuccauuaugcgaucagaugcgcccaucggaaaauguaagagugaaugcaucacgccuaauggcagcauuccaaacgacaagcccuuccagaaugugaacagaaucacuuacggugcauguccuagguaugucaaacacuccacacucaagcuggccaccgggaugcggaaugugccagagaaacagacucguggaauuuuuggcgcuauagccggcuucaucgaaaacgggugggagggaaugguggaugguugguacggcuuucgccaccaaaauucugaggggagaggacaggcagcugaccuuaagagcacacaggccgcgauugaucaaaucaacggcaaacugaauagguugaucgguaagaccaacgaaaaauuccaucagauugagaaggaauuuucagaggucgaagggcggauacaggaccucgagaaguauguugaggauacgaaaaucgaccuguggaguuacaaugccgaauuacugguggcacucgagaaccagcacaccauugaucuuacagacuccgaaaugaauaagcuguuugagaaaacuaagaaacaauugcgagaaaacgcugaggauaugggcaacggaugcuucaagaucuaucauaagugugacaaugccugcauuggcagcauccgcaacgggaccuacgaccacaauguauacagagaugaggcucuaaacaauagguuucagauaaaaggaguggaacugaagucugguuauaaagacuggauccucuggauuucauucgccaucaguugcuuucugcuuugugucgcacuguugggcuucauuaugugggccugccagaaggggaacauccgguguaauauaugcauuuga

SEQ ID NO: 141668 - RNA, 1701 nt, Artificial Sequence; identical to SEQ ID NO: 141029
  derived and/or modified CDS sequence (opt3) from hemagglutinin__InfluenzaA__ALN39674

SEQ ID NO: 141669 - RNA, 1701 nt, Artificial Sequence; identical to SEQ ID NO: 140489
  derived and/or modified CDS sequence (opt3) from hemagglutinin__InfluenzaA__ALN39675

SEQ ID NO: 141670 - RNA, 1701 nt, Artificial Sequence
  derived and/or modified CDS sequence (opt3) from hemagglutinin__InfluenzaA__ALN39676
augaagaccaucauugcccugagcugcauacucugucuuguguucgcucagaaacugcccggcaacgacaauuccacagcaacuuugugcuuagggcaccaugccgucccuaacggaacgaucguuaagaccauuacaaaugauagaaucgaggugacuaacgcgaccgaacugguacaaaauucuucaauuggugagaucugugacaguccacaccagauacuagauggcgaaaacugcacacucaucgacgcucugcuuggggauccgcagugugacggauuucagaauaaaaagugggaucuguucguggagaggagcaaagccuacuccaacugcuaucccuacgacgucccugauuaugcaucuuugcggucgcucguggccucaagcggcacccuggaauuuaauaacgagaauuucaacugggcugguguuacucaaaaugggacaaguuccucuuguauucgcggaagcaacuccucauuuuucagucgacugaauuggcucacccauuuaaacagcaaguacccagcacugaacgugacgaugcccaauaacgagcaguuugacaaacuuuauaucuggggcguccaccauccuggcacugauaaggaccagauuuucuuguacgcccagucuuccgggcguaucaccgugucaacaaagagaagccaacaggcuguaauaccaaauauuggaaguaggccccggauccgcgauauuccuucuagaaucuccaucuauuggacuauuguuaaaccaggugacauacugcuaaucaacagcaccggcaaucucauugccccgaggggguacuuucggauccgcucgggaaagucuuccauaaugcgaucagacgcgcccauuggcaaaugcaagagugaauguaucacaccuaacgguagcaucccaaaugauaagcccuuccagaacgugaauagaauuaccuacggggcaugcccuagguaugucaaacagaacacgcugaaacuugccacuggaaugcggaaugugccagagcgucaaacacgcggcaucuuuggcgcuauugccggguucauagaaaacggaugggaggguaugguggacggcugguacggguuuagacaccaaaauuccgagggaaggggccaggcagcugaucugaagucuacccagagcgccaucgaccagauuaacgguaaguugaaucggcucaucgggaaaacuaacgaaaaguuccaccagaucgagaaagaguucucagaagucgaaggccgcauucaggaucuggagaaguauguugaggacacaaagauagauuuauggaguuacaacgcggaacugcucguggcccuugagaaucaacauaccaucgaccugacggauuccgaaaugaacaaauuguuugagaagaccaaaaagcagcuacgagaaaaugcagaggacaugggaaacggcuguuucaaaauuuaucacaagugcgauaaugcuugcaucgggagcauuagaaacggaacauacgaccaugacguauauagggaugaggcccugaauaaccgguuucagaucaaggguguggaacucaaaucuggcuacaaggacuggauacuguggaucucauucgcuauuaguuguuuucuucugugcgucgccuugcucggguucaucaugugggcaugucagaaaggaaauauucgcugcaacaucuguauauga

SEQ ID NO: 141671 - RNA, 1701 nt, Artificial Sequence
  derived and/or modified CDS sequence (opt3) from hemagglutinin__InfluenzaA__ALN39677
augaagaccaucauugcccugggcuacauacucugccuuguguucgcucagaaaauccccgggaacgacaauagcacagcaacucuguguuugggacaccaugccgucccuaacgguacgauuguuaagaccaucacaaaugauagaauugaggugacuaacgcgaccgaauuaguacaaaauuccucuaucggcgagauaugcgacucaccacacaaaauccuggauggggaaaacuguacacuaauugacgcucuccugggagauccgcagugcgacggcuuucagaauaagaaaugggaucuuuucguggagaggaguaaggccuauagcaacuguuaccccuaugacgucccugauuacgcaucccugcggucuuugguggccucgucagguacccucgaauuuaauaacgagagcuucaauuggacugggguuacacagaacggaaccaguuccgcuugcauccgccgaucuagcuccucauuuuucagucgucugaauuggcugacgcaucucaacuaugcauacccagccuuaaaugugacuaugcccaacaacgagcaauuugacaagcuguauauuuggggcguccaccauccuggcaccgauaaagaccagaucuuccuuuacgcucagagcucugggagaauaacaguguccacuaagaggucacagcaagccguaauuccaaauaucggaagccggccccgcauuagagauaucccuaguaggaucucuauuuacuggaccauaguuaaaccaggugacaucuugcugauuaacuccacaggcaaucuaaucgcgccgcggggguauuuuaagauacgcagcggaaaaucgucuauuaugcgauccgacgcacccaucggcaaguguaagucagaaugcaucaccccuaacgguaguauuccaaaugauaaacccuuccagaacgugaauagaaucacguacggggccuguccuagguaugucaagcacagcacucucaaacuggcuacaggaaugcggaacgugccagagaagcagacccguggcauuuuuggcgccauagcaggguucaucgaaaauggaugggaggguaugguggacggcugguacggguuucgccaccagaacuccgagggaagaggccaagcugccgaucuuaaaucuacucaggcggccauugaccagaucaaugguaagcugaacagguugaucgggaaaacaaaugaaaaguuccaucaaauugagaaggaguucagcgaagucgaaggccggauacaggaucucgagaaauauguugaggacaccaagaucgaucuguggucauacaacgcagaauuacugguggcucucgagaaucagcacacgauugaccuuaccgauagugaaaugaacaaacuguuugagaagacuaaaaagcaguugcgagaaaacgccgaggacaugggaaauggcugcuucaagaucuaucauaaaugugauaacgcuugcauuggguccauccgcaauggaacauacgaccacaacguauacagagacgaggcccuaaauaacagguuucaaauaaaggguguggaacugaaaagcggcuauaaggauuggauccucuggauuucuuucgcaaucucaugcuuucugcuuugugucgcccuguugggguucauuaugugggcuugccagaaaggaaauauccgguguaacauaugcauuuga

SEQ ID NO: 141672 - RNA, 1701 nt, Artificial Sequence; identical to SEQ ID NO: 141376
  derived and/or modified CDS sequence (opt3) from hemagglutinin__InfluenzaA__ALN39678

SEQ ID NO: 141673 - RNA, 1701 nt, Artificial Sequence
  derived and/or modified CDS sequence (opt3) from hemagglutinin__InfluenzaA__ALN39679
augaagaccaucauugcccugggcuacauacucugccuuguguucgcucagaaaauccccgggaacgacaauagcacagcaacucuguguuugggacaccaugccgucccuaacgguacgguugugaagaccauuacaaaugauagaaucgagguaacuaacgcgaccgaauuagugcaaaauuccucuauuggcgagaucugcgacucaccacacaaaauacuggauggggaaaacuguacacuaaucgacgcucuccugggagauccgcagugcgacggcuuucagaauaagaaaugggaucuuuucgucgagaggaguaaggccuauagcaacuguuaccccuaugacgugccugauuacgcaucccugcggucuuugguugccucgucagguacccucgaauuuaauaacgagagcuucaauuggacuggggugacacagaacggaaccaguuccgcuugcauucgccgaucuagcuccucauuuuucagucgucugaauuggcugacgcaucucaacuauacuuacccagcauuaaaugucaccaugcccaacaacgagcaauuugacaagcuguauaucuggggcgugcaccauccuggcacagauaaagaccagauuuuccuuuacgcccagagcucugggagaaucacuguauccaccaagaggucacagcaagcuguuauaccaaauauuggaagccggccccgcaucagagauauuccuaguaggaucucuaucuacuggacaauugugaaaccaggugacauauugcugaucaacuccaccggcaaucuaauugccccgcggggguauuuuaagauccgcagcggaaaaucgucuauaaugcgauccgacgcgcccauuggcaaguguaagucagaaugcaucacgccuaacgguaguaucccaaaugauaaacccuuccagaacgucaauagaauuacuuacggggcauguccuagguaugugaagcacagcacacucaaacuggccaccggaaugcggaacgugccagagaagcagacucguggcaucuuuggcgcuauugccggguucauagaaaauggaugggaggguauggucgacggcugguacggguuucgccaccagaacuccgagggaagaggccaagcagcugaucuuaaaucuacacaggccgcgaucgaccagauuaaugguaagcugaacagguugaucgggaaaaccaaugaaaaguuccaucaaaucgagaaggaguucagcgaaguugaaggccggauucaggaucucgagaaauauguggaggacacgaagauagaucuguggucauacaacgccgaauuacugguagcacucgagaaucagcacaccaucgaccuuacagauagugaaaugaacaaacuguuugagaagacuaaaaagcaguugcgagaaaacgcugaggacaugggaaauggcugcuucaagauuuaucauaaaugugauaacgccugcaucggguccauucgcaauggaaccuacgaccacaacguguacagagacgaggcucuaaauaacagguuucaaaucaagggugucgaacugaaaagcggcuauaaggauuggauacucuggaucucuuucgccauuucaugcuuucugcuuuguguggcacuguugggguucaucaugugggccugccagaaaggaaauauucgguguaacaucugcauauga

SEQ ID NO: 141674 - RNA, 1701 nt, Artificial Sequence; identical to SEQ ID NO: 141376
  derived and/or modified CDS sequence (opt3) from hemagglutinin__InfluenzaA__ALN39680

SEQ ID NO: 141675 - RNA, 1701 nt, Artificial Sequence; identical to SEQ ID NO: 141376
  derived and/or modified CDS sequence (opt3) from hemagglutinin__InfluenzaA__ALN39681

SEQ ID NO: 141676 - RNA, 1701 nt, Artificial Sequence; identical to SEQ ID NO: 141376
  derived and/or modified CDS sequence (opt3) from hemagglutinin__InfluenzaA__ALN39682

SEQ ID NO: 141677 - RNA, 1701 nt, Artificial Sequence; identical to SEQ ID NO: 141376
  derived and/or modified CDS sequence (opt3) from hemagglutinin__InfluenzaA__ALN39683

SEQ ID NO: 141678 - RNA, 1701 nt, Artificial Sequence; identical to SEQ ID NO: 141376
  derived and/or modified CDS sequence (opt3) from hemagglutinin__InfluenzaA__ALN39684

SEQ ID NO: 141679 - RNA, 1701 nt, Artificial Sequence; identical to SEQ ID NO: 141376
  derived and/or modified CDS sequence (opt3) from hemagglutinin__InfluenzaA__ALN39685

SEQ ID NO: 141680 - RNA, 1701 nt, Artificial Sequence
  derived and/or modified CDS sequence (opt3) from hemagglutinin__InfluenzaA__ALN39686
augaagaccaucauugcccugggcuacauacucugccuugcuuucgcacagaaaauccccgggaacgacaauagcacagccacucuguguuugggacaccaugcggugccuaacgguacgauugucaagaccaucacaaaugauagaauugagguuacuaacgcuaccgaauuagugcaaaauuccucuaucggcgagauaugcgacucaccacacaaaauccuggauggggaaaacuguacacuaauugacgcccuccugggagauccgcagugcgacggcuuucagaauaagaaaugggaucuuuucguagagaggaguaaggcauauagcaacuguuaccccuaugacgugccugauuacaccucccugcggucuuuggucgccucgucagguacucucgaauuuaauaacgagagcuucaauuggacaggggugacccagaacggaacgaguuccgcuugcauccgccgaucuagcuccucauuuuucagucgucugaauuggcugacucaucucaacuauaccuacccagcauuaaauguuacaaugcccaacaacgagcaauuugacaagcuguauauuuggggcgugcaccauccuggcacugauaaagaccagaucuuccuuuacgcccagagcucugggagaauaaccgucuccacaaagaggucacagcaagcugugauuccaaauaucggaagccggccccgcauuagagauaucccuaguaggaucucuauuuacuggaccauaguaaaaccaggugacaucuugcugauuaacuccacgggcaaucuaaucgccccgcggggguauuuuaagauacgcagcggaaaaucgucuauuaugcgauccgacgcgcccaucggcaaguguaagucagaaugcaucacuccuaacgguaguauuccaaaugauaaacccuuccagaacguuaauagaaucacauacggggcauguccuagguaugugaagcacagcacccucaaacuggccacuggaaugcggaacgucccagagaagcagacacguggcauuuuuggcgcuauagccggguucaucgaaaauggaugggaggguaugguggacggcugguacggguuucgccaccagaacuccgagggaagaggccaagcagcugaucuuaaaucuacccaggccgcgauugaccagaucaaugguaagcugaacagguugaucgggaaaacgaaugaaaaguuccaucaaauugagaaggaguucagcgaaguggaaggccggauacaggaucucgagaaauaugucgaggacaccaagaucgaucuguggucauacaacgccgaauuacugguugcacucgagaaucagcacacaauugaccuuacugauagugaaaugaacaaacuguuugagaagaccaaaaagcaguugcgagaaaacgcugaggacaugggaaauggcugcuucaagaucuaucauaaaugugauaacgccugcauuggguccauccgcaauggaacauacgaccacaacguguacagagacgaggcucuaaauaacagguuucaaauaaaggguguagaacugaaaagcggcuauaaggauuggauccucuggauuucuuucgccaucucaugcuuucugcuuuguguggcacuguugggguucauuaugugggccugccagaaaggaaauauccgguguaacauaugcauuuga

SEQ ID NO: 141681 - RNA, 1701 nt, Artificial Sequence; identical to SEQ ID NO: 141376
  derived and/or modified CDS sequence (opt3) from hemagglutinin__InfluenzaA__ALN39687

SEQ ID NO: 141682 - RNA, 1701 nt, Artificial Sequence
  derived and/or modified CDS sequence (opt3) from hemagglutinin__InfluenzaA__ALN39688
augaagaccaucauugcccugggcuacauacucugccuuguguucgcucagaaaauccccgggaacgacaauagcacagcaacucuguguuugggacaccaugccgucccuaacgguacgauuguuaagaccaucacaaaugauagaauugaggugacuaacgcgaccgaauuaguacaaaauuccucuaucggcgagauaugcgacucaccacacaaaauccuggauggggaaaacuguacacuaauugacgcucuccugggagauccgcagugcgacggcuuucagaauaagaaaugggaucuuuucguggagaggaguaaggccuauagcaacuguuaccccuaugacgucccugauuacgcaucccugcggucuuugguggccucgucagguacccucgaauuuaauaacgagagcuucaauuggacugggguuacacagaacggaaccaguuccgcuugcauccgccgaucuagcuccucauuuuucagucgucugaauuggcugacgcaucucaacuauauuuacccagcauuaaaugugacuaugcccaacaacgagcaauuugacaagcuguauaucuggggcguccaccauccuggcaccgauaaagaccagauauuccuuuacgcccagagcucugggagaauuacaguguccacuaagaggucacagcaagcuguaaucccaaauauuggaagccggccccgcaucagagauaucccuaguaggauuucuauauacuggaccaucguuaaaccaggugacauuuugcugaucaacuccacaggcaaucuaauagccccgcggggguauuuuaagauucgcagcggaaaaucgucuaucaugcgauccgacgcgcccaucggcaaguguaagucagaaugcauuaccccuaacgguaguaucccaaaugauaaacccuuccagaacgugaauagaauuacguacggggcauguccuagguaugucaagcacagcacucucaaacuggccacaggaaugcggaacgugccagagaagcagacccguggcauauuuggcgcuaucgccggguucauugaaaauggaugggaggguaugguggacggcugguacggguuucgccaccagaacuccgagggaagaggccaagcagcugaucuuaaaucuacucaggccgcgaucgaccagaucaaugguaagcugaacagguugauugggaaaacaaaugaaaaguuccaucaaauagagaaggaguucagcgaagucgaaggccggauccaggaucucgagaaauauguugaggacaccaagauugaucuguggucauacaacgccgaauuacugguggcacucgagaaucagcacacgaucgaccuuaccgauagugaaaugaacaaacuguuugagaagacuaaaaagcaguugcgagaaaacgcugaggacaugggaaauggcugcuucaagauuuaucauaaaugugauaacgccugcaucggguccauacgcaauggaacauacgaccacaacguauacagagacgaggcucuaaauaacagguuucaaaucaaggguguggaacugaaaagcggcuauaaggauuggauucucuggaucucuuucgccauuucaugcuuucugcuuugugucgcacuguugggguucaucaugugggccugccagaaaggaaauauacgguguaacauuugcaucuga

SEQ ID NO: 141683 - RNA, 1701 nt, Artificial Sequence
  derived and/or modified CDS sequence (opt3) from hemagglutinin__InfluenzaA__ALN39689
augaagaccaucauugcccugggcuacauacucugccuuguguucgcucagaaaauccccgggaacgacaauagcacagcaacucuguguuugggacaccaugccgucccuaacgguacgauuguuaagaccaucacaaaugauagaauugaggugacuaacgcgaccgaauuaguacaaaauuccucuaucggcgagauaugcgacucaccacacaaaauccuggauggggaaaacuguacacuaauugacgcucuccugggagauccgcagugcgacggcuuucagaauaagaaaugggaucuuuucguggagaggaguaaggccuauagcaacuguuaccccuaugacgucccugauuacgcaucccugcggucuuugguggccucgucagguacccucgaauuuaauaacgagagcuucaauuggacugggguuacacagaacggaaccaguuccgcuugcauccgccgaucuagcuccucauuuuucagucgucugaauuggcugacgcaucucaacuauacuuacccagcauuaaaugugaccaugcccaacaacgagcaauuugacaagcuguauauuuggggcguccaccauccuggcacagauaaagaccagaucuuccuuuacgcccagagcucugggagaauaacuguguccaccaagaggucacagcaagcuguaauuccaaauaucggaagccggccccgcauuagagauaucccuaguaggaucucuauuuacuggacaauaguuaaaccaggugacaucuugcugauucacuccaccggcaaccuaaucgccccgcggggguauuuuaagauacgcagcggaaaaucgucuauuaugcgauccgacgcgcccaucggcaaguguaagucagaaugcaucacgccuaaugguaguauuccaaacgauaaacccuuccagaaugugaacagaaucacuuacggggcauguccuagguaugucaagcacagcacacucaaacuggccaccggaaugcggaaugugccagagaagcagacucguggcauuuuuggcgcuauagccggguucaucgaaaacggaugggaggguaugguggacggcugguacggguuucgccaucaaaauuccgagggaagaggccaggcagcugaucuuaaaucuacacaggccgcgauugaccagaucaacgguaagcugaauagguugaucgggaaaaccaacgaaaaguuccaccaaauugagaaggaguucagcgaagucgaaggccggauacaggaucucgagaaauauguugaggacacgaagaucgaucuguggucauacaaugccgaauuacugguggcacucgagaaccagcauaccauugaccuuacagauagugaaaugaauaaacuguuugagaagacuaaaaagcaguugcgagaaaacgcugaggacaugggaaacggcugcuucaagaucuaucacaaaugugauaaugccugcauuggguccauccgcaacggaaccuacgaccacaauguauacagagacgaggcucuaaacaauagguuucaaauaaaggguguggaacugaaaagcggcuauaaggauuggauccucuggauuucuuucgccaucucaugcuuucugcuuugugucgcacuguugggguucauuaugugggccugccagaaaggaaacauccgguguaauauaugcauuuga

SEQ ID NO: 141684 - RNA, 1701 nt, Artificial Sequence
  derived and/or modified CDS sequence (opt3) from hemagglutinin__InfluenzaA__ALN39690
augaagaccaucauugcccugagcuacauacucugccuuguguucgcucagaaacugcccggcaacgacaauuccacagcaacuuuguguuuagggcaccaugccgucccuaacggaacgaucguuaagaccauuacaaaugauagaaucgaggugacuaacgcgaccgaacugguacaaaauucuucaauuggugagaucugcgacaguccacaccagauacuagauggcaaaaacuguacacucaucgacgcucugcuuggggauccgcagugcgacggauuucagaauaagaaaugggaucuguucguggaaaggagcaaggcccauuccaacuguuaucccuacgacgucccugauuaugcaucuuugcggucgcucguggccucaagcggcacccuggaguuuaauaacgaaaguuucaauugggcugguguuacucaaaacgggacauccucuagcugcauucgcggauccaauucaaguuucuuuagccgacugaacuggcucacccacuuaaauucuaucuacccagcacugaacgugacgaugcccaacaaugagcaguuugacaaacuuuauauuuggggcguccaucacccuggcacugauaaagaccagaucuucuuguacgcccaguccucagggcguauaaccgugagcacaaagagaagucaacaggcuguaauuccaaacaucggaucuaggccccggauucgcgauaucccuuccagaaucagcauuuauuggacuauaguuaaaccaggugacauccugcuaauuaauucgaccggcaaccucaucgccccgaggggguacuuuaagauacggucuggaaaauccucaauuaugcgcagugacgcgcccaucggcaaguguaagagcgagugcaucacaccuaaugguuccauuccaaacgauaaacccuuccagaaugugaaccgaaucaccuacggggcauguccuagauaugucaagcagucuacgcugaaacuugccacuggaaugaggaaugugccagaacggcaaacacguggcauuuuuggcgcuauagccggguucaucgagaacggaugggaagguaugguggacggcugguacggguuucgccaccagaauagcgagggaagaggccaggcagcugaucugaagucaacccaagccgcgauugaccagaucaacgguaaauugaauaggcucaucgggaagacuaacgagaaauuccaucagauugaaaaggaguucagugaagucgagggccggauacaggaucuggaaaaguauguugaggacacaaaaaucgauuuaugguccuacaaugccgagcugcucguggcacuugaaaaccaacacaccauugaccugacggauagcgagaugaacaaguuguuugaaaagaccaagaaacagcuacgagagaaugcugaagacaugggaaacggcugcuucaagaucuaucauaagugugauaaugccugcauugggucuauccgcaacggaacauacgaccacaauguauauagagacgaggcucugaacaauagguuucagauaaaagguguggagcucaagucaggcuacaaagauuggauccuguggauuaguuucgccaucagcugcuuucuucugugugucgcauugcucggguucauuaugugggccugccagaagggaaacauccgguguaauauaugcauuuga

SEQ ID NO: 141685 - RNA, 1701 nt, Artificial Sequence
  derived and/or modified CDS sequence (opt3) from hemagglutinin__InfluenzaA__ALN39691
augaagaccaucauugcccugagcuacauacucugccuuguguucgcucagaaacugcccggcaacgacaauuccacagcaacuuuguguuuagggcaccaugccgucccuaacggaacgaucguuaagaccauuacaaaugauagaaucgaggugacuaacgcgaccgaacugguacaaaauucuucaauuggugagaucugcgacaguccacaccagauacuagauggcaaaaacuguacacucaucgacgcucugcuuggggauccgcagugcgacggauuucagaauaagaaaugggaucuguucguggaaaggagcaaggcccauuccaacuguuaucccuacgacgucccugauuaugcaucuuugcggucgcucguggccucaagcggcacccuggaguuuaauaacgaaaguuucaauugggcugguguuacucaaaacgggacauccucuagcugcauucgcggauccaauucaaguuucuuuagccgacugaacuggcucacccacuuaaauucuaaguacccagcacugaacgugacgaugcccaacaaugagcaguuugacaaacuuuauaucuggggcguccaucacccuggcacugauaaggaccagauuuucuuguacgcccagccauccgggcguaucaccgugucaacaaaaagaagccaacaggcuguaauacccaacauuggaaguaggccucggauccgcgauauuccaucuagaaucuccaucuauuggacuauuguuaagccgggugacauacugcuaaucaauagcaccggcaaccucauugcccccaggggguacuuuaaaauccggucgggaaagucuuccauaaugcgcucagacgcgccuauuggcaaguguaaaagugagugcaucacaccaaaugguagcauccccaacgauaagccuuuccagaaugugaaccgaauuaccuacggggcauguccaagauaugucaaacaguccacgcugaaacuugccacuggaaugaggaaugugcccgaaaagcaaacacggggcaucuuuggcgcuauugccggguucauagagaacggaugggaagguaugaaggacggcugguacggguuucgucaccaaaauucugagggacgcggccaggcagcugaucugaaaagcacccaggccgcgaucgaccagauuaacgguaaguugaauagacucaucgggaagacuaacgagaaauuccaucagaucgaaaaggaguucucagaaguggagggcaggauucaggaucuggaaaaauaugucgaggacacaaagauagauuuauggaguuacaaugccgagcugcucguugcacuugaaaaccaacacaccaucgaccugacggauuccgagaugaacaaauuguuugaaaagaccaagaaacagcuacgggagaaugcugaagacaugggaaacggcugcuucaagauuuaucauaaaugugauaaugccugcaucgggagcauucgaaacggaacauacgaccacgacguguaucgcgaugaggcucugaauaacagauuucagaucaaggguguagagcucaaaucuggcuacaaggacuggauacuguggaucucauucgccauuaguugcuuucuucuguguguggcauugcucggguucaucaugugggccugccagaagggaaauauuagguguaacaucugcauauga

SEQ ID NO: 141686 - RNA, 1701 nt, Artificial Sequence; identical to SEQ ID NO: 141376
  derived and/or modified CDS sequence (opt3) from hemagglutinin__InfluenzaA__ALN39692

SEQ ID NO: 141687 - RNA, 1701 nt, Artificial Sequence; identical to SEQ ID NO: 141376
  derived and/or modified CDS sequence (opt3) from hemagglutinin__InfluenzaA__ALN39693

SEQ ID NO: 141688 - RNA, 1701 nt, Artificial Sequence; identical to SEQ ID NO: 141376
  derived and/or modified CDS sequence (opt3) from hemagglutinin__InfluenzaA__ALN39694

SEQ ID NO: 141689 - RNA, 1701 nt, Artificial Sequence; identical to SEQ ID NO: 141376
  derived and/or modified CDS sequence (opt3) from hemagglutinin__InfluenzaA__ALN39695

SEQ ID NO: 141690 - RNA, 1701 nt, Artificial Sequence; identical to SEQ ID NO: 141376
  derived and/or modified CDS sequence (opt3) from hemagglutinin__InfluenzaA__ALN39696

SEQ ID NO: 141691 - RNA, 1701 nt, Artificial Sequence; identical to SEQ ID NO: 141046
  derived and/or modified CDS sequence (opt3) from hemagglutinin__InfluenzaA__ALN39697

SEQ ID NO: 141692 - RNA, 1701 nt, Artificial Sequence
  derived and/or modified CDS sequence (opt3) from hemagglutinin__InfluenzaA__ALN39698
augaagaccaucauugcccugagccacauacucugccuuguguucgcucagaaaauccccggcaacgacaauuccacagcaacucuguguuuggggcaucacgccgucccuaacggaacgauuguuaagaccaucacaaaugauagaauugaggugacuaacgcgaccgaauuaguacaaaauucuucaaucggugagauaugcgacaguccacaucagauccuggauggcgaaaacuguacacuaauugacgcucuccugggggauccgcagugcgacggauuucagaauaaaaagugggaucuuuucguggagaggagcaaagccuacuccaacuguuaucccuacgacgucccugauuaugcaucucugcggucguugguggccucaagcggcacccucgaauuuaauaacgagaguuucaauuggacugguguuacacaaaacgggaccuccucugcuugcauccgccgaagcuccucaaguuucuucagccgucugaauuggcugacgcaccucaacuacacuuauccagcauuaaaugugaccaugcccaacaacgagcaguuugacaagcuguacauuuggggaguccaucacccuggcacagauaaggaccagaucuuccuuuaugcccagucuuccggcagaauaacugugucaaccaaaaggagccaacaggcuguaauuccaaauaucgggagucggccccgcauuagagauaucccuucuaggaucuccauuuacuggacaauaguuaagccaggagacaucuugcugauuaacagcaccgguaaucuaaucgccccgcggggcuacuuuaaaauacgcucggggaagucuuccauuaugcgaucagacgcgcccaucggaaaauguaagagugaaugcaucacgccuaacggcagcauuccaaaugauaagcccuuccagaacgugaauagaaucacuuauggugcauguccuagguacgucaaacacuccacacucaagcuggccaccgggaugcggaacgugccagagaaacagacucguggaauuuuuggcgcuauagccggcuucaucgaaaaugggugggagggaaugauggacgguugguauggcuuucgccaucaaaacucugaggggagaggacaggcagcugaucuuaagagcacacaggccgcgauugaccaaaucaauggcaaacugaacagguugaucgguaagaccaaugaaaaauuccaccagauugagaaggaauuuucagagguggaagggcggauacaggaucucgagaaguacgucgaggacacgaaaaucgaucuguggaguuauaacgccgaauuacugguugcacucgagaaucagcauaccauugaccuuacagauuccgaaaugaacaagcuguuugagaaaacuaagaaacaauugcgagaaaacgcugaggacaugggcaauggaugcuucaagaucuaccacaagugugauaacgccugcaugggcagcauucgcaaugggaccuaugaccacaacguguacagaaaugaggcucuaaacaauagguuucagaucaaaggaguagaacugaagucugguuacaaagacuggauacucuggaucucauucgccauuaguugcuuucugcuuuguguggcacuguugggcuucaucaugugggccugccagaaggggaacauucgguguaauaucugcauauga

SEQ ID NO: 141693 - RNA, 1701 nt, Artificial Sequence
  derived and/or modified CDS sequence (opt3) from hemagglutinin__InfluenzaA__ALN39700
augaagaccaucauugcccugagcuacauacucugccuuguguucgcucagaaaauccccggcaacgacaauuccacagcaacucuguguuuggggcaccaugccgucccuaacggaacgauuguuaagaccaucacaaaugauagaauugaggugacuaacgcgaccgaauuaguacaaaauucuucaaucggugagauaugcgacaguccacaccagauccuggauggcgaaaacuguacacuaauugacgcucuccugggggauccgcagugcgacggauuucagaauaaaaagugggaucuuuucguggagaggagcaaagccuauuccaacuguuaccccuaugacgucccugauuacgcaucucugcggucguugguggccucaagcggcacccucgaauuuaauaacgagaguuucaauuggacugguguuacacaaaacgggaccuccucugcuugcauccgccgaagcuccucaaguuucuucagccgucugaauuggcugacgcaucucaacuauacuuacccagcauuaaaugugaccaugcccaacaacgagcaguuugacaagcuguauauuuggggaguccaccauccuggcacagauaaggaccagaucuuccuuuacgcccagucuuccggcagaauaacugugucaaccaaaaggagccaacaggcuguaauuccaaauaucgggagucggccccgcauuagagauaucccuucuaggaucuccauuuacuggacaauaguuaagccaggagacaucuugcugauuaacagcaccgguaaucuaaucgccccgcggggcuauuuuaaaauacgcucggggaagucuuccauuaugcgaucagacgcgcccaucggaaaauguaagagugaaugcaucacgccuaacggcagcauuccaaaugauaagcccuuccagaacgugaauagaaucacuuacggugcauguccuagguaugucaaacacuccacacucaagcuggccaccgggaugcggaacgugccagagaaacagacucguggaauuuuuggcgcuauagccggcuucaucgaaaaugggugggagggaaugguggacgguugguacggcuuucgccaccaaaacucugaggggagaggacaggcagcugaucuuaagagcacacaggccgcgauugaccaaaucaauggcaaacugaacagguugaucgguaagaccaaugaaaaauuccaucagauugagaaggaauuuucagaggucgaagggcggauacaggaucucgagaaguauguugaggacacgaaaaucgaucuguggaguuacaacgccgaauuacugguggcacucgagaaucagcacaccauugaccuuacagauuccgaaaugaacaagcuguuugagaaaacuaagaaacaauugcgagaaaacgcugaggacaugggcaauggaugcuucaagaucuaucauaagugugauaacgccugcauuggcagcauccgcaaugggaccuacgaccacaacguauacagagacgaggcucuaaauaacagguuucagauaaaaggaguggaacugaagucugguuauaaagauuggauccucuggauuucauucgccaucaguugcuuucugcuuugugucgcacuguugggcuucauuaugugggccugccagaaggggaauaucaaauguaacauaugcauuuga

SEQ ID NO: 141694 - RNA, 1701 nt, Artificial Sequence; identical to SEQ ID NO: 141095
  derived and/or modified CDS sequence (opt3) from hemagglutinin__InfluenzaA__ALN39701

SEQ ID NO: 141695 - RNA, 1701 nt, Artificial Sequence
  derived and/or modified CDS sequence (opt3) from hemagglutinin__InfluenzaA__ALN39702
augaagaccaucauugcccugagcuacauacucugccuuguguucgcucagaaaauccccggcaacgacaauuccacagcaacucuguguuuggggcaccaugccgucccuaacggaacgauuguuaagaccaucacaaaugauagaauugaggugacuaacgcgaccgaauuaguacaaaauucuucaaucggugagauaugcgacaguccacaccagauccuggauggcgaaaacuguacacuaauugacgcucuccugggggauccgcagugcgacggauuucagaauaaaaagugggaucuuuucguggagaggagcaaagccuauuccaacuguuaccccuaugacgucccugauuacgcaucucugcggucguugguggccucaagcggcacccucgaauuuaauaacgagaguuucaauuggacugguguuacacaaaacgggaccuccucugcuugcauccgcaagagcuccucaaguuucuucagccgacugaauuggcugacgcaucucaacuauacuuacccagcauuaaaugugaccaugcccaacaacgagcaguuugacaagcuguauauuuggggaguccaccauccuggcacagauaaagaccagaucuuccuuuacgcccguucuuccggcagaauaacugugucaaccaagaggagccagcaagcuguaauuccaaauaucgggagucggccccgcauuagagauaucccuucuaggaucuccauuuacuggacaauaguuaaaccaggagacaucuugcugauuaacagcaccgguaaucuaaucgccccgcggggcuauuuuaagauacgcucggggaaaucuuccauuaugcgaucagacgcgcccaucggaaaguguaagagugaaugcaucacgccuaacggcagcauuccaaaugauaaacccuuccagaacgugaauagaaucacuuacggugcauguccuagguaugucaagcacuccacacucaaacuggccaccgggaugcggaacgugccagagaagcagacucguggaauuuuuggcgcuauagccggcuucaucgaaaaugggugggagggaaugguggacgguugguacggcuuucgccaccagaacucugaggggagaggacaagcagcugaucuuaaaagcacacaggccgcgauugaccagaucaauggcaagcugaacagguugaucgguaaaaccaaugaaaaguuccaucaaauugagaaggaauuuucagaggucgaagggcggauacaggaucucgagaaauauguugaggacacgaagaucgaucuguggaguuacaacgccgaauuacugguggcacucgagaaucagcacaccauugaccuuacagauuccgaaaugaacaaacuguuugagaagacuaaaaagcaguugcgagaaaacgcugaggacaugggcaauggaugcuucaagaucuaucauaaaugugauaacgccugcauuggcagcauccgcaaugggaccuacgaccacaacguauacagagacgaggcucuaaauaacagguuucaaauaaagggaguggaacugaaaucugguuauaaggauuggauccucuggauuucauucgccaucaguugcuuucugcuuugugucgcacuguugggcuucauuaugugggccugccagaaagggaauauccgguguagcauaugcauuuga

SEQ ID NO: 141696 - RNA, 1701 nt, Artificial Sequence
  derived and/or modified CDS sequence (opt3) from hemagglutinin__InfluenzaA__ALN39703
augaagaccaucauugcccugagcuacauacucugccuuguguucgcucagaaaauccccggcaacgacgauuccacagcaacucuguguuuggggcaccaugccgucccuaauggaacgauuguuaagaccaucacaaacgacagaauugaggugacuaaugcgaccgaauuaguacaaaacucuucaaucggugagauaugcgauaguccacaccagauccuggacggcgaaaauuguacacuaauugaugcucuccugggggacccgcagugcgauggauuucagaacaaaaagugggaccuuuucguggagaggagcaaagccuauuccaauuguuaccccuaugaugucccugacuacgcaucucugcggucguugguggccucaagcggcacccucgaauuuaacaaugagaguuucaacuggacugguguuacacaaaaugggaccuccucugcuugcauccgccgaagcuccucaaguuucuucagccgucugaacuggcugacgcaucucaauuauacuuacccagcauuaaacgugaccaugcccaauaacgagcaguuugauaagcuguauauuuggggaguccaccauccuggcacagacaaggaucagaucuuccuuuacgcccagucuuccggcagaauaacugugucaaccaaaaggagccaacaggcuguaauuccaaacaucgggagucggccccgcauuagagacaucccuucuaggaucuccauuuacuggacaauaguuaagccaggagacaucuugcugauuaauagcaccgguaaccuaaucgccccgcggggcuauuuuaaaauacgcucggggaagucuuccauuaugcgaucagaugcgcccaucggaaaauguaagagugaaugcaucacgccuaauggcagcauuccaaacgacaagcccuuccagaaugugaacagaaucacuuacggugcauguccuagguaugucaaacacuccacacucaagcuggccaccgggaugcggaaugugccagagaaacagacucguggaauuuuuggcgcuauagccggcuucaucgaaaacgggugggagggaaugguggaugguugguacggcuuucgccaccaaaauucugaggggagaggacaggcagcugaccuuaagagcacacaggccgcgauugaucaaaucaacggcaaacugaauagguugaucgguaagaccaacgaaaaauuccaucagauugagaaggaauuuucagaggucgaagggcggauacaggaccucgagaaguauguugaggauacgaaaaucgaccuguggaguuacaaugccgaauuacugguggcacucgagaaccagcacaccauugaucuuacagacuccgaaaugaauaagcuguuugagaaaacuaagaaacaauugcgagaaaacgcugaggauaugggcaacggaugcuucaagaucuaucauaagugugacaaugccugcauuggcagcauccgcaacgggaccuacgaccacaauguauacagagaugaggcucuaaacaauagguuucagauaaaaggaguggaacugaagucugguuauaaagacuggauccucuggauuucauucgccaucaguugcuuucugcuuugugucgcacuguugggcuucauuaugugggccugccagaaggggaacauccgguguaauauaugcauuuga

SEQ ID NO: 141697 - RNA, 1701 nt, Artificial Sequence; identical to SEQ ID NO: 141095
  derived and/or modified CDS sequence (opt3) from hemagglutinin__InfluenzaA__ALN39704

SEQ ID NO: 141698 - RNA, 1701 nt, Artificial Sequence; identical to SEQ ID NO: 140489
  derived and/or modified CDS sequence (opt3) from hemagglutinin__InfluenzaA__ALN39705

SEQ ID NO: 141699 - RNA, 1701 nt, Artificial Sequence
  derived and/or modified CDS sequence (opt3) from hemagglutinin__InfluenzaA__ALN39706
augaagaccaucauugcccugagcuacauacucugccuuguguucgcucagaaacugcccggcaacgacaauuccacagcaacuuuguguuuagggcaccaugccgucccuaacggaaugaucguuaagacgauuaccaaugauagaaucgaggugacaaacgcgacugaacugguacaaaauucuucaauuggugagaucugcgacaguccacaccagauacuagauggcaaaaacuguacccucaucgacgcucugcuuggggauccgcagugcgacgauuuucagaauaagaggugggaccuguucguggaacggagcaaagccuauuccaacuguuaccccuaugaugucccugacuacgcaucuuugcgcucgcucguggccucaagcggaacacuggaguuuaaugaugaaaguuucaacugggcuggcguuacccaaaaugguacuuccucugcaugcauucgagggagcaacuccucauuuuucagucgucugaauuggcucacacauagcaacuuuaaguauccagccuuaaaugugaccaugcccaacaacgagcaguucgacaagcuguacaucuggggaguccaccauccuggcacggauaaagaccagauuuuucuuuaugcucagucuuccggcagaaucacugugucaaccaagaggagccaacaggccguaauaccaaauauugggagucggccccgcaucagaaacauuccuucuaggaucuccaucuacuggacaauuguuaaaccaggagacauauugcugaucaauagcacugguaaccuaauugcgccgcggggcuacuucaagauccagucggggaaaucuuccauaaugcgcucagaugcacccauuggaaaguguaagagugagugcaucaccccuaauggcagcaucccaaacgacaaacccuuucagaaugugaaccgaauuacauauggugccuguccuagauacgucaagcaauccacccucaaacuggcuacggggaugaggaaugugccagaaaagcagacucggggaaucuucggcgccauugcaggcuuuauagagaacgggugggaaggaaugaaagaugguugguauggcuuccgucaccaaaauucugaggggcgcggacaggcugccgaccuuaagagcacacaggcggccaucgaucagauuaacggcaaacugaauagauugaucgguaagaccaacgagaaguuccaccagaucgaaaaagaguuuucagaaguggaggggaggauucaagaccucgaaaaguacgucgaggauacuaaaauagaccuguggaguuauaaugcagaguuacugguugcucucgaaaaccagcauacaaucgaucuuaccgacuccgagaugaacaagcuguucgagaaaacgaagaagcaguugcgggaaaaugccgaagauaugggcaacggaugcuuuaaaauuuaccacaagugugacaaugcuugcaucggcagcauucgaaacgggaccuaugaccaugauguguaccgcgacgaggcccuaaauaacagauuccagaucaaaggaguagagcugaagucugguuacaaagauuggauacucuggaucucauuugcaauuaguugcuuccugcuuuguguggcccuguugggcuuuaucaugugggcuugccaaaaggggaauauuagguguaacaucugcauauga

SEQ ID NO: 141700 - RNA, 1701 nt, Artificial Sequence; identical to SEQ ID NO: 140489
  derived and/or modified CDS sequence (opt3) from hemagglutinin__InfluenzaA__ALN39707

SEQ ID NO: 141701 - RNA, 1701 nt, Artificial Sequence; identical to SEQ ID NO: 141095
  derived and/or modified CDS sequence (opt3) from hemagglutinin__InfluenzaA__ALN39708

SEQ ID NO: 141702 - RNA, 1701 nt, Artificial Sequence
  derived and/or modified CDS sequence (opt3) from hemagglutinin__InfluenzaA__ALN39709
augaagaccaucauugcccugagcuacauacucugccuuguguucgcucagaaacugcccggcaacgacaauuccacagcaacuuuguguuuagggcaccaugccgucccuaacggaacgaucguuaagaccauuacaaaugauagaaucgaggugacuaacgcgaccgaacugguacaaaauucuucaauuggugagaucugcgacaguccacaccagauacuagauggcgaaaacuguacacucaucgacgcucugcuuggggauccgcagugcgacggauuucagaauaaaaagugggaucuguucguggagaggagcaaagccuauuccaacuguuaccccuaugacgucccugauuacgcaucuuugcggucgcucguggccucaagcggcacccuggaauuuaauaacgagaguuucaauugggcugguguuacucaaaacgggacauccucuagcugcaugcgcggauccaauucaaguuucuucagccgacugaacuggcucacccauuuaaauucuaaguauccagcacugaacgugacgaugcccaacaaugagcaguuugacaaacuuuacauuuggggcguccaccauccuggcacugauaaggaccagaucuucuuguaugcccaguccucagggcguauuaccgugagcacaaagagaagucaacaggcuguaacuccaaacaucggaucuaggccccggauacgcgauauuccuuccagaaucagcauuuacuggaccaucguuaaaccaggugacauccugcuaauuaauucgacaggcaaccucauagccccgaggggguacuuuaagauccggucuggaaaauccucaauuaugcgcagugacgcgcccaucggcaaguguaagagcgaaugcauaaccccuaaugguuccauuccaaacgauaaacccuuccagaaugugaaccgaaucacguauggggcauguccuagauacgucaagcagucuacucugaaacuugccacaggaaugaggaaugugccagagcggcaaacccguggcaucuuuggcgcuauugccggguucaucgaaaacggaugggaggguaugguggacggcugguauggguuucgccaccagaauagcgagggaagaggccaggcagcugaucugaagucaacucaagccgcgauugaccagauaaacgguaaauugaauaggcucaucgggaagacaaacgaaaaauuccaccagauugagaaggaauuuagugaggucgaaggccggauccaggaucuggagaaguacguugaggacaccaaaaucgauuuaugguccuauaaugccgaacugcucguggcacuugagaaccaacauacgauugaccugaccgauagcgaaaugaacaaguuguuugagaaaacaaagaaacagcuacgagaaaaugcugaggacaugggaaacggcugcuucaagauauaccacaagugugauaaugccugcaucgggucuauucgcaacggaacuuaugaccaugacguauacagagaugaggcucugaauaacagguuucagaucaaagguguggaacucaagucaggcuacaaagacuggauucuguggaucaguuucgccauaagcugcuuucuucugugugucgcauugcucggguucaucaugugggccugccagaagggaaauauucgguguaacaucugcauuuga

SEQ ID NO: 141703 - RNA, 1701 nt, Artificial Sequence; identical to SEQ ID NO: 141419
  derived and/or modified CDS sequence (opt3) from hemagglutinin__InfluenzaA__ALN39710

SEQ ID NO: 141704 - RNA, 1701 nt, Artificial Sequence; identical to SEQ ID NO: 141095
  derived and/or modified CDS sequence (opt3) from hemagglutinin__InfluenzaA__ALN39711

SEQ ID NO: 141705 - RNA, 1701 nt, Artificial Sequence; identical to SEQ ID NO: 140489
  derived and/or modified CDS sequence (opt3) from hemagglutinin__InfluenzaA__ALN39712

SEQ ID NO: 141706 - RNA, 1701 nt, Artificial Sequence
  derived and/or modified CDS sequence (opt3) from hemagglutinin__InfluenzaA__ALN39713
augaagaccaucauugcccugagcuacauacucugccuuguguucgcucagaaaauccccggcaacgacaauuccacagcaacucuguguuuggggcaccaugccgucccuaacggaacgauuguuaagaccaucacaaaugauagaauugaggugacuaacgcgaccgaauuaguacaaaauucuucaaucggugagauaugcgacaguccacaccagauccuggauggcgaaaacuguacacuaauugacgcucuccugggggauccgcagugcgacggauuucagaauaaaaagugggaucuuuucguggagaggagcaaagccuauuccaacuguuaccccuaugacgucccugauuacgcaucucugcggucguugguggccucaagcggcacccucgaauuuaauaacgagaguuucaauuggacugguguuacacaaaacgggaccuccucugcuugcauccgcggaagcuccucaaguuucuucagccgacugaauuggcugacgcaucucaacuauacuuacccagcauuaaaugugaccaugcccaacaacgagcaguuugacaagcuguauauuuggggcguccaccauccuggcacagauaaggaccagaucuuccuuuacgcccagucuuccgggcguauaacugugucaaccaaaagaagccaacaggcuguaauuccaaauaucggaaguaggccccggauucgcgauaucccuucuagaaucuccauuuacuggacaauaguuaagccaggugacaucuugcugauuaacagcaccggcaaucuaaucgccccgaggggguauuuuaaaauacggucgggaaagucuuccauuaugcgcucagacgcgcccaucggcaaauguaagagugaaugcaucacgccuaacgguagcauuccaaaugauaagcccuuccagaacgugaaucgaaucacuuacggggcauguccuagauaugucaaacacuccacacucaagcuggccaccggaaugaggaacgugccagagaaacagacucggggcauuuuuggcgcuauagccggguucaucgaaaauggaugggaggguaugguggacggcugguacggguuucgucaccaaaacucugagggacgcggccaggcagcugaucuuaagagcacacaggccgcgauugaccaaaucaaugguaaacugaacagauugaucgggaagaccaaugaaaaauuccaucagauugagaaggaauuuucagaggucgaaggcaggauacaggaucucgagaaguauguugaggacacgaaaaucgaucuguggaguuacaacgccgaauuacugguggcacucgagaaucagcacaccauugaccuuacagauuccgaaaugaacaagcuguuugagaaaacuaagaaacaauugcgggaaaacgcugaggacaugggaaauggcugcuucaagaucuaucauaagugugauaacgccugcauugggagcauccgaaauggaaccuacgaccacaacguauaccgcgacgaggcucuaaauaacagauuucagauaaaagguguggaacugaagucuggcuauaaagauuggauccucuggauuucauucgccaucaguugcuuucugcuuugugucgcacuguugggguucauuaugugggccugccagaagggaaauaucagguguaacauaugcauuuga

SEQ ID NO: 141707 - RNA, 1701 nt, Artificial Sequence
  derived and/or modified CDS sequence (opt3) from hemagglutinin__InfluenzaA__ALN39714
augaagaccaucauugcccugagcuacauacucugccuuguguucgcucagaaaauccccggcaacgacaauuccacagcaacucuguguuuggggcaccaugccgucccuaacggaacgauuguuaagaccaucacaaaugauagaauugaggugacuaacgcgaccgaauuaguacaaaauucuucaaucggugagauaugcgacaguccacaccagauccuggauggcgaaaacuguacacuaauugacgcucuccugggggauccgcagugcgacggauuucagaauaaaaagugggaucuuuucguggagaggagcaaagccuauuccaacuguuaccccuaugacgucccugauuacgcaucucugcggucguugguggccucaagcggcacccucgaauuuaauaacgagaguuucaauugggcugguguuacucaaaacgggacauccucuagcugcauccgcggauccaauucaaguuucuucagccgacugaacuggcugacccaucucaauucuaaguauccagcauuaaacgugacgaugcccaacaaugagcaguuugacaagcuguacauuuggggcguccaccauccuggcacugauaaagaccagaccuuccuuuaugcccagccauccgggcguaucacagugucaacuaagagaagccaacaggcuguaauacccaacauuggaaguaggccucggauccgcgauauuccaucuagaaucuccaucuacuggaccauuguuaaaccgggugacauauugcugaucaauagcacaggcaaccuaauugcccccaggggguacuuuaagauccggucgggaaaaucuuccauaaugcgcucagacgcgccuauuggcaaguguaagagugaaugcaucaccccaaaugguagcauccccaacgauaaaccuuuccagaaugugaaccgaauuacguauggggcauguccaagauacgucaagcaguccacucucaaacuggccacaggaaugaggaaugugcccgagcggcaaacccguggcaucuuuggcgcuauugccggguucauagaaaacggaugggaggguaugguggacggcugguauggguuucgccaccaaaauucugagggaagaggccaggcagcugaucuuaagagcacucaggccgcgaucgaccagauuaacgguaaacugaauagguugaucgggaagacaaacgaaaaauuccaccagaucgagaaggaauuuucagaggucgaaggccggauucaggaucucgagaaguacguugaggacaccaaaauagaucuguggaguuauaaugccgaauuacugguggcacucgagaaccaacauacgaucgaccuuaccgauuccgaaaugaacaagcuguuugagaaaacaaagaaacaguugcgagaaaaugcugaggacaugggaaacggcugcuucaagauuuaccacaagugugauaaugccugcaucgggagcauucgcaacggaacuuaugaccaugacguauacagagaugaggcucuaaauaacagguuucagaucaaagguguggaacugaagucuggcuacaaagacuggauacucuggaucucauucgccauuaguugcuuucugcuuugugucgcacuguugggguucaucaugugggccugccagaagggaaauauucgguguaacaucugcauauga

SEQ ID NO: 141708 - RNA, 1701 nt, Artificial Sequence; identical to SEQ ID NO: 141147
  derived and/or modified CDS sequence (opt3) from hemagglutinin__InfluenzaA__ALN39715

SEQ ID NO: 141709 - RNA, 1701 nt, Artificial Sequence; identical to SEQ ID NO: 140489
  derived and/or modified CDS sequence (opt3) from hemagglutinin__InfluenzaA__ALN39716

SEQ ID NO: 141710 - RNA, 1701 nt, Artificial Sequence; identical to SEQ ID NO: 140489
  derived and/or modified CDS sequence (opt3) from hemagglutinin__InfluenzaA__ALN39717

SEQ ID NO: 141711 - RNA, 1701 nt, Artificial Sequence; identical to SEQ ID NO: 141527
  derived and/or modified CDS sequence (opt3) from hemagglutinin__InfluenzaA__ALN39718

SEQ ID NO: 141712 - RNA, 1701 nt, Artificial Sequence; identical to SEQ ID NO: 140489
  derived and/or modified CDS sequence (opt3) from hemagglutinin__InfluenzaA__ALN39734

SEQ ID NO: 141713 - RNA, 1701 nt, Artificial Sequence
  derived and/or modified CDS sequence (opt3) from hemagglutinin__InfluenzaA__ALN39735
augaagaccaucauugcccugagcuacauacucugccuuguguucgcucagaaaauccccggcaacgacaauuccacagcaacucuguguuuggggcaccaugccgucccuaacggaacgauuguuaagaccaucacagaugacagaauugaggugacuaaugcgaccgaauuaguacaaaacucuucaaucggugagauaugcgauaguccacaccagauccuggacggcgaaaauuguacacuaauugaugcucuccugggggacccgcagugcgauggauuucagaacaaaaagugggaccuuuucguggagaggagcaaagccuauuccaauuguuaccccuaugaugucccugacuacgcaucucugcggucguugguggccucaagcggcacccucgaauuuaacaaugagaguuucaacuggacugguguuacacaaaaugggaccuccucugcuugcauccgccgaagcuccucaaguuucuucagccgucugaacuggcugacgcaucucaauuauacuuacccagcauuaaacgugaccaugcccaauaacgagcaguuugauaagcuguauauuuggggaguccaccauccuggcacagacaaggaucagaucuuccuuuacgcccagucuuccggcagaauaacugugucaaccaaaaggagccaacaggcuguaauuccaaacaucgggagucggccccgcauuagagacaucccuucuaggaucuccauuuacuggacaauaguuaagccaggagacaucuugcugauuaauagcaccgguaaccuaaucgccccgcggggcuauuuuaaaauacgcucggggaagucuuccauuaugcgaucagaugcgcccaucggaaaauguaagagugaaugcaucacgccuaauggcagcauuccaaacgacaagcccuuccagaaugugaacagaaucacuuacggugcauguccuagguaugucaaacacuccacacucaagcuggccaccgggaugcggaaugugccagagaaacagacucguggaauuuuuggcgcuauagccggcuucaucgaaaacgggugggagggaaugguggaugguugguacggcuuucgccaccaaaauucugaggggagaggacaggcagcugaccuuaagagcacacaggccgcgauugaucaaaucaacggcaaacugaauagguugaucgguaagaccaacgaaaaauuccaucagauugagaaggaauuuucagaggucgaagggcggauacaggaccucgagaaguauguugaggauacgaaaaucgaccuguggaguuacaaugccgaauuacugguggcacucgagaaccagcacaccauugaucuuacagacuccgaaaugaauaagcuguuugagaaaacuaagaaacaauugcgagaaaacgcugaggauaugggcaacggaugcuucaagaucuaucauaagugugacaaugccugcauuggcagcauccgcaacgggaccuacgaccacaauguauacagagaugaggcucuaaacaauagguuucagauaaaaggaguggaacugaagucugguuauaaagacuggauccucuggauuucauucgccaucaguugcuuucugcuuugugucgcacuguugggcuucauuaugugggccugccagaaggggaacauccgguguaauauaugcauuuga

SEQ ID NO: 141714 - RNA, 1701 nt, Artificial Sequence
  derived and/or modified CDS sequence (opt3) from hemagglutinin__InfluenzaA__ALN39736
augaagaccaucauugcccugagcuacauacucugccuuguguucgcucagaaaauccccggcaacgacaauuccacagcaacucuguguuuggggcaccaugccgucccuaacggaacgauuguuaagaccaucacaaaugauagaauugaggugacuaacgcgaccgaauuaguacaaaauucuucaaucggugagauaugcgacaguccacaccagauccuggauggcgaaaacuguacacuaauugacgcucuccugggggauccgcagugcgacggauuucagaauaaaaagugggaucuuuucguggagaggagcaaagccuauuccaacuguuaccccuaugacgucccugauuacgcaucucugcggucguugguggccucaagcggcacccucgaauuuaauaacgagaguuucaauuggacugguguuacacaaaacgggaccuccucugcuugcauccgccgaagcuccucaaguuucuucagccgucugaauuggcugacgcaucucaacuauacuuacccagcauuaaaugugaccaugcccaacaacgagcaguuugacaagcuguauauuuggggaguccaccauccuggcacagauaaggaccagaucuuccuuuacgcccagccaucuggcagaauaacuguguccaccaaaaggucacaacaggcuguaauucccaauaucgggagccggccucgcauuagagauaucccaaguaggaucucuauuuacuggacaauaguuaagccgggagacaucuugcugauuaacuccaccgguaaucuaaucgcgccccggggcuauuuuaaaauacgcgggggaaagagcucgauuaugcgaucugacgccccuaucggcaaauguaaguccgaaugcaucacgccaaacgguucaauucccaaugauaagccuuuccagaacgugaauagaaucacuuacggggcauguccaagguaugucaaacacaguacacucaagcuggccaccggaaugcggaacgugcccgagaaacagacucguggcauuuuuggcgcuauagccggguucaucgaaaauggaugggaggguaugguggacggcugguacggguuucgccaccaaaacagcgagggaagaggccaggcagcugaucuuaaguccacacaggccgcgauugaccaaaucaaugguaaacugaacagguugaucgggaagaccaaugaaaaauuccaucagauugagaaggaauuuucugaggucgaaggccggauacagaaccucgagaaguauguugaggauacgaaaaucgaccuguggagcuacaaugccgaauuacugguggcacucgagaaccagcacaccauugaucuuacagacucagaaaugaacaagcuguuugagaaaacuaagaaacaauugcgagaaaaugcugaggauaugggaaacggcugcuucaagaucuaucauaagugugacaaugccugcauugggaguauccgcaacggaaccuacgaucacaauguauacagagacgaggcucuaaacaauagguuucagauaaaagguguggaacugaaguccggcuauaaagacuggauccucuggauuagcuucgccaucucuugcuuucugcuuugugucgcacuguugggguucauuaugugggccugccagaagggaaacauccgguguaauauaugcauuuga

SEQ ID NO: 141715 - RNA, 1701 nt, Artificial Sequence; identical to SEQ ID NO: 141095
  derived and/or modified CDS sequence (opt3) from hemagglutinin__InfluenzaA__ALN39737

SEQ ID NO: 141716 - RNA, 1701 nt, Artificial Sequence
  derived and/or modified CDS sequence (opt3) from hemagglutinin__InfluenzaA__ALN39738
augaagaccaucauugcccugagcuacauacucugccuuguguucgcucagaaaauccccggcaacgacaauuccacagcaacucuguguuuggggcaccaugccgucccuaacggaacgauuguuaagaccaucacaaaugauagaauugaggugacuaacgcgaccgaauuaguacaaaauucuucaaucggugagauaugcgacaguccacaccagauccuggauggcgaaaacuguacacuaauugacgcucuccugggggauccgcuuugcgacggauuucagaauaaaaagugggaucuguucguggagaggagcaaagccuauuccaacuguuaccccuaugacgucccugauuacgcaucuuugcggucgcucguggccucaagcggcacccuggaauuuaauaacgagaguuucaauuggacugguguuacacagaacgggaccuccucugcuugcauccgccgaagcuccucaaguuucuucagccgucugaauuggcucacgcauuuaaacuauacuuacccagcacugaaugugaccaugcccaacaacgagcaauuugacaagcuguauauuuggggaguccaccauccuggcacagauaaggaccagaucuucuuguacgcccagucuuccggcagaauaacugugucaaccaaaaggagccagcaagcuguaauuccaaauaucgggagucggccccgcauuagagauaucccuucuaggaucuccauuuacuggacaauaguuaagccaggagacauccugcuaauuaacagcaccgguaaucucaucgccccgcggggcuauuuuaaaauacgcucggggaagucuuccauuaugcgaucagacgcgcccaucggaaaauguaagagugaaugcaucacgccuaacggcagcauuccaaaugauaagcccuuccagaacgugaauagaaucacuuacggugcauguccuagguaugucaaacacuccacacugaaacuugccaccgggaugcggaacgugccagagaagcagacucguggaauuuuuggcgcuauagccggcuucaucgaaaaugggugggagggaaugguggacgguugguacggcuuucgccaccagaacucugaggggagaggacaagcagcugaucuuaagagcacacaggccgcgauugaccagaucaauggcaaauugaacaggcucaucgguaagaccaaugaaaaauuccaucaaauugagaaggaauuuucagaggucgaagggcggauacaggaucuggagaaguauguugaggacacgaaaaucgauuuauggaguuacaacgccgaacugcucguggcacuugagaaucagcacaccauugaccugacagauuccgaaaugaacaaguuguuugagaaaacuaagaaacagcuacgagaaaacgcugaggacaugggcaauggaugcuucaagaucuaucauaagugugauaacgccugcauuggcagcauccgcaaugggaccuacgaccacaacguauacagagacgaggcucugaauaacagguuucaaauaaaaggaguggaacucaagucugguuauaaagauuggauccuguggauuucauucgccaucaguugcuuucuucugugugucgcauugcucggcuucauuaugugggccugccagaaggggaauauccgguguaacauaugcauuuga

SEQ ID NO: 141717 - RNA, 1701 nt, Artificial Sequence
  derived and/or modified CDS sequence (opt3) from hemagglutinin__InfluenzaA__ALN39739
augaagaccaucauugcccugggcuacauacucugccuuguguucgcucagaaaauccccgggaacgacaauagcacagcaacucuguguuugggacaccaugccgucccuaacgguacgauuguuaagaccaucacaaaugauagaauugaggugacuaacgcgaccgaauuaguacaaaauuccucuaucggcgagauaugcgacucaccacacaaaauccuggauggggaaaacuguacacuaauugacgcucuccugggagauccgcagugcgacggcuuucagaauaagaaaugggaucuuuucguggagaggaguaaggccuauagcaacuguuaccccuaugacgucccugauuacgcaucccugcggucuuugguggccucgucagguacccucgaauuuaauaacgagagcuucaauuggacugggguuacacagaacggaaccaguuccgcuugcauccgccgaucuagcuccucauuuuucagucgucugaauuggcugacgcaucucgacuauacuuacccagcauuaaacgugaccaugcccaauaacgagcaauuugauaagcuguauauuuggggcguccaccauccuggcacagacaaagaucagaucuuccuuuacgcccagagcucugggagaauaacuguguccaccaagaggucacagcaagcuguaauuccaaacaucggaagccggccccgcauuagagacaucccuaguaggaucucuauuuacuggacaauaguuaaaccaggugacaucuugcugauuaauuccaccggcaaccuaaucgccccgcggggguauuuuaagauacgcagcggaaaaucgucuauuaugcgauccgaugcgcccaucggcaaguguaagucagaaugcaucacgccuaaugguaguauuccaaacgacaaacccuuccagaaugugaacagaaucacuuacggggcauguccuagguaugucaagcacagcacacucaaacuggccaccggaaugcggaaugugccagagaagcagacucguggcauuuuuggcgcuauagccggguucaucgaaaacggaugggaggguaugguggauggcugguacggguuucgccaccaaaauuccgagggaagaggccaggcagcugaccuuaaaucuacacaggccgcgauugaucagaucaacgguaagcugaauagguugaucgggaaaaccaacgaaaaguuccaucaaauugagaaggaguucagcgaagucgaaggccggauacaggaccucgagaaauauguugaggauacgaagaucgaccuguggucauacaaugccgaauuacugguggcacucgagaaccagcacaccauugaucuuacagacagugaaaugaauaaacuguuugagaagacuaaaaagcaguugcgagaaaacgcugaggauaugggaaacggcugcuucaagaucuaucauaaaugugacaaugccugcauuggguccauccgcaacggaaccuacgaccacaauguauacagagaugaggcucuaaacaauagguuucaaauaaaggguguggaacugaaaagcggcuauaaggacuggauccucuggauuucuuucgccaucucaugcuuucugcuuugugucgcacuguugggguucauuaugugggccugccagaaaggaaacauccgguguaauauaugcauuuga

SEQ ID NO: 141718 - RNA, 1701 nt, Artificial Sequence
  derived and/or modified CDS sequence (opt3) from hemagglutinin__InfluenzaA__ALN39740
augaagaccaucauugcccugagcuacauacucugccuuguguucgcucagaaaauccccggcaacgacaauuccacagcaacucuguguuuggggcaccaugccgucccuaacggaacgauuguuaagaccaucacaaaugauagaauugaggugacuaacgcgaccgaauuaguacaaaauucuucaaucggugagauaugcgacaguccacaccagauccuggauggcgaaaacuguacacuaauugacgcucuccugggggauccgcagugcgacggauuucagaauaaaaagugggaucuuuucguggagaggagcaaagccuauuccaacuguuaccccuaugacgucccugauuacgcaucucugcggucguugguggccucaagcggcacccucgaauuuaauaacgagaguuucaauuggacugguguuacacaaaacgggaccuccucugcuugcauccgcaagagcuccucaaguuucuucagccgacugaauuggcugacgcaucucaacuauacuuacccagcauuaaaugugaccguccccaacaacgagcaguuugacaagcuguauauuuggggagugcaccauccuggcacagauaaagaccagaucuuccuuuacgcccguucuuccggcagaauaacuguaucaaccaagaggagccagcaagcuguuauuccaaauaucggguaccggccccgcauuagagauaucccuaguaggaucucuauuuauuggacaauagugaaaccaggagacaucuugcugauuaacuccaccgguaaucuaaucgccccgcggggcuacuuuaagauacgcagcgggaaaucgucuauuaugcgauccgacgcgcccaucggaaaguguaagucagaaugcaucacgccuaacggcaguauuccaaaugauaaacccuuccagaacgucaauagaaucacuuauggugcauguccuagguacgugaagcacagcacacucaaacuggccaccgggaugcggaacgugccagagaagcagacucguggaauuuuuggcgcuauagccggcuucaucgaaaaugggugggagggaauggucgacgguugguauggcuuucgccaccagaacuccgaggggagaggacaagcagcugaucuuaaaucuacacaggccgcgauugaccagaucaauggcaagcugaacagguugaucgguaaaaccaaugaaaaguuccaucaaauugagaaggaauuuagcgagguugaagggcggauacaggaucucgagaaauacguggaggacacgaagaucgaucuguggucauauaacgccgaauuacugguagcacucgagaaucagcacaccauugaccuuacagauagugaaaugaacaaacuguuugagaagacuaaaaagcaguugcgagaaaacgcugaggacaugggcaauggaugcuucaagaucuaccauaaaugugauaacgccugcauuggcuccauccgcaaugggaccuacgaccacaacguguauagagacgaggcucuaaauaacagguuucaaauaaagggagucgaacugaaaagcgguuacaaggauuggauccucuggauuucuuucgccaucucaugcuuucugcuuuguguggcacuguugggcuucauuaugugggccugccagaaagggaauauccgguguaacauaugcauuuga

SEQ ID NO: 141719 - RNA, 1701 nt, Artificial Sequence; identical to SEQ ID NO: 140489
  derived and/or modified CDS sequence (opt3) from hemagglutinin__InfluenzaA__ALN39741

SEQ ID NO: 141720 - RNA, 1701 nt, Artificial Sequence
  derived and/or modified CDS sequence (opt3) from hemagglutinin__InfluenzaA__ALN39742
augaagaccaucauugcccugagcuacauacucugccuuguguucgcucagaaaauccccggcaacgacaauuccacagcaacucuguguuuggggcaccaugccgucccuaacggaacgauuguuaagaccaucacaaaugauagaauugaggugacuaacgcgaccgaauuaguacaaaauucuucaaucggugagauaugcgacaguccacaccagauccuggauggcgaaaacuguacacuaauugacgcucuccugggggauccgcagugcgacggauuucagaauaaaaagugggaucuuuucguggagaggagcaaagccuauuccaacuguuaccccuaugacgucccugauuacgcaucucugcggucguugguggccucaagcggcacccucgaauuuaauaacgagaguuucaauuggacugguguuacacaaaacgggaccuccucugcuugcauccgccgaagcuccucaaguuucuucagccgucugaauuggcugacgcaucucaacuauacuuacccagcauuaaaugugaccaugcccaacaacgagcaguuugacaagcuguauauuuggggaguccaccauccuggcacagauaaggaccagaucuuccuuuacgcccagucuuccggcagaauaacugugucaaccaaaaggagccaacaggcuguaauuccaaauaucgggagucggccccgcauuagagauaucccuucuaggaucuccauuuacuggacaauaguuaagccaggagacaucuugcugauuaacagcaccgguaaucuaaucgccccgcggggcuauuuuaaaauacgcucggggaagucuuccauuaugcgaucagacgcgcccaucggaaaauguaagagugaaugcaucacgccuaacggcagcauuccaaaugauaagcccuuccagaacgugaauagaaucacuuacggugacuguccuagguaugucaaacacuccacacucaagcuggcaaccgggaugcggaacgugccagagaaacagacucguggaauuuuuggcgccauagcuggcuucaucgaaaaugggugggagggaaugguggaugguugguacggcuuucgccaccaaaacucugaggggagaggacaggccgcagaccuuaagagcacacaggcugccauugaucaaaucaauggcaaacugaacagguugaucgguaagaccaaugaaaaauuccaucagauugagaaggaauuuucagaggucgaagggcggauacaggaccucgagaaguauguugaggauacgaaaaucgaccuguggaguuacaacgcggaauuacugguggcccucgagaaucagcacaccauugaucuuacagacuccgaaaugaacaagcuguuugagaaaacuaagaaacaauugcgagaaaacgcagaggauaugggcaauggaugcuucaagaucuaucauaagugugacaacgcuugcauuggcagcauccgcaaugggaccuacgaccacaacguauacagagaugaggcccuaaauaacagguuucagauaaaaggaguggaacugaagucugguuauaaagacuggauccucuggauuucauucgcuaucaguugcuuucugcuuugugucgcccuguugggcuucauuaugugggcaugccagaaggggaauauccgguguaacauaugcauuuga

SEQ ID NO: 141721 - RNA, 1701 nt, Artificial Sequence
  derived and/or modified CDS sequence (opt3) from hemagglutinin__InfluenzaA__ALN39743
augaagaccaucauugcccugagcuacauacucugccuuguguucgcucagaaaauccccggcaacgacaauuccacagcaacucuguguuuggggcaccaugccgucccuaacggaacgauuguuaagaccaucacaaaugauagaauugaggugacuaacgcgaccgaauuaguacaaaauucuucaaucggugagauaugcgacaguccacaccagauccuggauggcgaaaacuguacacuaauugacgcucuccugggggauccgcagugcgacggauuucagaauaaaaagugggaucuuuucguggagaggagcaaagccuauuccaacuguuaccccuaugacgucccugauuacgcaucucugcggucguugguggccucaagcggcacccucgaauuuaauaacgagaguuucaauuggacugguguuacacaaaacgggaccuccucugcuugcauccgcaagagcuccucaaguuucuucagccgacugaauuggcugacgcaucucaacuauauuuacccagcauuaaaugugacuaugcccaacaacgagcaguuugacaagcuguauaucuggggaguccaccauccuggcaccgauaaagaccagauauuccuuuacgcccagucuuccggccguauuacagugucaacuaagagaagccaacaggcuguaaucccaaauauugggaguaggccccggauccgcgauaucccuucuagaauuuccauauacuggaccaucguuaaaccaggagacauuuugcugaucaacagcacagguaaucuaauagccccgaggggcuauuuuaagauucggucggggaaaucuuccaucaugcgcucagacgcgcccaucggaaaguguaagagugaaugcauuaccccuaacggcagcaucccaaaugauaaacccuuccagaacgugaaucgaauuacguacggugcauguccuagauaugucaagcacuccacucucaaacuggccacagggaugaggaacgugccagagaagcagacccggggaauauuuggcgcuaucgccggcuucauugaaaaugggugggagggaaugguggacgguugguacggcuuucgucaccaaaacucugaggggcgcggacaggcagcugaucuuaaaagcacucaggccgcgaucgaccaaaucaauggcaagcugaacagauugauugguaaaacaaaugaaaaguuccaucagauagagaaggaauuuucagaggucgaagggaggauccaggaucucgagaaauauguugaggacaccaagauugaucuguggaguuacaacgccgaauuacugguggcacucgagaaucagcacacgaucgaccuuaccgauuccgaaaugaacaaacuguuugagaagacuaaaaagcaauugcgggaaaacgcugaggacaugggcaauggaugcuucaagauuuaucauaaaugugauaacgccugcaucggcagcauacgaaaugggacauacgaccacaacguauaccgcgacgaggcucuaaauaacagauuucagaucaagggaguggaacugaaaucugguuauaaggauuggauucucuggaucucauucgccauuaguugcuuucugcuuugugucgcacuguugggcuucaucaugugggccugccagaaagggaauauaagguguaacauuugcaucuga

SEQ ID NO: 141722 - RNA, 1701 nt, Artificial Sequence
  derived and/or modified CDS sequence (opt3) from hemagglutinin__InfluenzaA__ALN39744
augaagaccaucauugcccugagcuacauacucugccuuguguucgcucagaaaauccccggcaacgacaauuccacagcaacucuguguuuggggcaccaugccgucccuaacggaacgauuguuaagaccaucacaaaugauagaauugaggugacuaacgcgaccgaauuaguacaaaauucuucaaucggugagauaugcgacaguccacaccagauccuggauggcgaaaacuguacacuaauugacgcucuccugggggauccgcagugcgacggauuucagaauaaaaagugggaucuuuucguggagaggagcaaagccuauuccaacuguuaccccuaugacgucccugauuacgcaucucugcggucguugguggccucaagcggcacccucgaauuuaauaacgagaguuucaauuggacugguguuacacaaaacgggaccuccucugcuugcauccgcaagagcuccucaaguuucuucagccgacugaauuggcugacgcaucucaacuauacuuacccagcauuaaaugugaccaugcccaacaacgagcaguuugacaagcuguauauuuggggaguccaccauccuggcacagauaaagaccagaucuuccuuuacgcccagucuuccggccguauaacugugucaaccaagagaagccaacaggcuguaauuccaaauaucgggaguaggccccggauucgcgauaucccuucuagaaucuccauuuacuggacaauaguuaaaccaggagacaucuugcugauuaacagcaccgguaaucuaaucgccccgaggggcuauuuuaagauacggucggggaaaucuuccauuaugcgcucagacgcgcccaucggaaaguguaagagugaaugcaucacgccuaacggcagcauuccaaaugauaaacccuuccagaacgugaaucgaaucacuuacggugcauguccuagauaugucaagcacuccacacucaaacuggccaccgggaugaggaacgugccagagaagcagacucggggaauuuuuggcgcuauagccggcuucaucgaaaaugggugggagggaaugguggacgguugguacggcuuucgucaccaaaacucugaggggcgcggacaggcagcugaucuuaaaagcacacaggccgcgauugaccaaaucaauggcaagcugaacagauugaucgguaaaaccaaugaaaaguuccaucagauugagaaggaauuuucagaggucgaagggaggauacaggaucucgagaaauauguugaggacacgaagaucgaucuguggaguuacaacgccgaauuacugguggcacucgagaaucagcacaccauugaccuuacagauuccgaaaugaacaaacuguuugagaagacuaaaaagcaauugcgggaaaacgcugaggacaugggcaauggaugcuucaagaucuaucauaaaugugauaacgccugcauuggcagcauccgaaaugggaccuacgaccacaacguauaccgcgacgaggcucuaaauaacagauuucagauaaagggaguggaacugaaaucugguuauaaggauuggauccucuggauuucauucgccaucaguugcuuucugcuuugugucgcacuguugggcuucauuaugugggccugccagaaagggaauaucagguguaacauaugcauuuga

SEQ ID NO: 141723 - RNA, 1701 nt, Artificial Sequence
  derived and/or modified CDS sequence (opt3) from hemagglutinin__InfluenzaA__ALN39745
augaagaccaucauugcccugagcuacauacucugccuuguguucgcucagaaaauccccggcaacgacaauuccacagcaacucuguguuuggggcaccaugccgucccuaacggaacgauuguuaagaccaucacaaaugauagaauugaggugacuaacgcgaccgaauuaguacaaaauucuucaaucggugagauaugcgacaguccacaccagauccuggauggcgaaaacuguacacuaauugacgcucuccugggggauccgcagugcgacggauuucagaauaaaaagugggaucuuuucguggagaggagcaaagccuauuccaacuguuaccccuaugacgucccugauuacgcaucucugcggucguugguggccucaagcggcacccucgaauuuaauaacgagaguuucaauuggacugguguuacacaaaacgggaccuccucugcuugcauccgcaagagcuccucaaguuucuucagccgacugaauuggcugacgcaucucaacuauaaguacccagcauuaaaugugacuaugcccaacaacgagcaguuugacaaacuguauauuuggggaguccaccauccuggcaccgauaaggaccagaucuuccuuuacgcccagucuuccggccguauaacagugucaacuaaaagaagccaacaggcuguaauuccaaauaucgggaguaggccccggauucgcgauaucccuucuagaaucuccauuuacuggaccauaguuaagccaggagacaucuugcugauuaacagcacagguaaucuaaucgccccgaggggcuauuuuaaaauacggucggggaagucuuccauuaugcgcucagacgcgcccaucggaaaguguaaaagugaaugcaucaccccuaacggcagcauuccaaaugauaagcccuuccagaacgugaaucgaaucacguacggugcauguccuagauaugucaaacacuccacucucaagcuggccacagggaugaggaacgugccagagaaacagacccggggaauuuuuggcgcuauagccggcuucaucgaaaaugggugggagggaaugguggacgguugguacggcuuucgucaccaaaacucugaggggcgcggacaggcagcugaucuuaagagcacucaggccgcgauugaccaaaucaauggcaaacugaacagauugaucgguaagacaaaugaaaaguuccaucagauugagaaagaauuuucagaggucgaagggaggauacaggaucucgagaaguauguugaggacaccaaaaucgaucuguggaguuacaacgccgaauuacugguggcacucgagaaucagcacacgauugaccuuaccgauuccgaaaugaacaagcuguuugagaaaacaaagaagcaauugcgggaaaacgcugaggacaugggcaauggaugcuucaaaaucuaucauaagugugauaacgccugcauuggcagcauccgaaaugggacuuacgaccacaacguauaccgcgacgaggcucuaaauaacagauuucagauaaaaggaguggaacugaagucugguuauaaagauuggauccucuggauuucauucgccaucaguugcuuucugcuuugugucgcacuguugggcuucauuaugugggccugccagaaggggaauaucagguguaacauaugcauuuga

SEQ ID NO: 141724 - RNA, 1701 nt, Artificial Sequence; identical to SEQ ID NO: 141722
  derived and/or modified CDS sequence (opt3) from hemagglutinin__InfluenzaA__ALN39746

SEQ ID NO: 141725 - RNA, 1701 nt, Artificial Sequence; identical to SEQ ID NO: 141417
  derived and/or modified CDS sequence (opt3) from hemagglutinin__InfluenzaA__ALN39747

SEQ ID NO: 141726 - RNA, 1701 nt, Artificial Sequence
  derived and/or modified CDS sequence (opt3) from hemagglutinin__InfluenzaA__ALN39748
augaagaccaucauugcccugagcuacauacucugccuuguguucgcucagaaaauccccggcaacgacaauuccacagcaacucuguguuuggggcaccaugccgucccuaacggaacgauuguuaagaccaucacaaaugauagaauugaggugacuaacgcgaccgaauuaguacaaaauucuucaaucggugagauaugcgacaguccacaccagauccuggauggcgaaaacuguacacuaauugacgcucuccugggggauccgcagugcgacggauuucagaauaaaaagugggaucuuuucguggagaggagcaaagccuauuccaacuguuaccccuaugacgucccugauuacgcaucucugcggucguugguggccucaagcggcacccucgaauuuaauaacgagaguuucaauuggacugguguuacacaaaacgggaccuccucugcuugcauccgccgaagcuccucaaguuucuucagccgucugaauuggcugacgcaucucaacuaugcauacccagccuuaaaugugacuaugcccaacaacgagcaguuugacaagcuguauauuuggggaguccaccauccuggcaccgauaaggaccagaucuuccuuuacgcucagucuuccggcagaauaacagugucaacuaaaaggagccaacaggccguaauuccaaauaucgggagucggccccgcauuagagauaucccuucuaggaucuccauuuacuggaccauaguuaagccaggagacaucuugcugauuaacagcacagguaaucuaaucgcgccgcggggcuauuuuaaaauacucucggggaagucuuccauuaugcgcucagacgcacccaucggaaaauguaagagugaaugcaucaccccuaacggcagcauuccaaaugauaagcccuuccagaacgugaaucgaaucacguacggugccuguccuagauaugucaaacacuccacucugaagcuggcuacagggaugaggaacgugccagagaaacagacccggggaauuuuuggcgccauagcaggcuucaucgaaaaugggugggagggaaugguggacgguugguacggcuuucgucaccaaaacucugaggggcgcggacaggcugccgaucuuaagagcacucaggcggccauugaccaaaucaauggcaaauugaacagacucaucgguaagacaaaugaaaaauuccaucagauugagaaggaauuuucagaggucgaagggaggauacaggaucuggagaaguauguugaggacaccaaaaucgauuuauggaguuacaacgcagaacugcucguggcucuugagaaucagcacacgauugaccugaccgauuccgaaaugaacaaguuguuugagaaaacaaagaaacaacuacgggaaaacgccgaggacaugggcaauggaugcuucaagaucuaucauaagugugauaacgcuugcauuggcagcauccgaaaugggacuuacgaccacaacguauaccgcgacgaggcccugaauaacagauuucagauaaaaggaguggaacucaagucugguuauaaagauuggauccuguggauuucauucgcaaucaguugcuuucuucugugugucgccuugcucggcuucauuaugugggcuugccagaaggggaauaucagguguaacauaugcauuuga

SEQ ID NO: 141727 - RNA, 1701 nt, Artificial Sequence
  derived and/or modified CDS sequence (opt3) from hemagglutinin__InfluenzaA__ALN39749
augaagaccaucauugcccugagcuacauacucugccuuguguucgcucagaaacugcccggcaacgacaauuccacagcaacuuuguguuuagggcaccaugccgucccuaacggaacgaucguuaagaccauuacaaaugauagaaucgaggugacuaacgcgaccgaacugguacaaaauucuucaauuggugagaucugcaacaguccacaccagauacuagacggcgaaaauuguacacucaucgaugcucugcuuggggacccgcagugcgauggauuucagaacaaaaagugggaccuguucguggagaggagcaaagccuauuccaauuguuaccccuaugaugucccugacuacgcaucuuugcggucgcucguggccucaagcggcacccuggaauuuaacaaugagaguuucaacugggcugguguuacucaaaaugggacauccucuagcugcauucgcggauccaacucaaguuucuucagccgacugaauuggcucacccauuuaaacucuaaguauccagcacugaacgugacgaugcccaauaacgagcaguuugauaagcuguacaucuggggcguccaccauccuggcacugacaaagaucagauuuucuuguaugcccagccauccgggcguaucaccgugucaacaaagagaagccaacaggcuguaauacccaauauuggaaguaggccucggauccgcgacauuccaucuagaaucuccaucuacuggacuauuguuaaaccgggugauauacugcuaaucaacagcaccggcaaucucauugcccccaggggguacuuuaagauccggucgggaaaaucuuccauaaugcgcucagacgcgccuauuggcaaguguaagagugaaugcaucacaccaaacgguagcauccccaaugacaaaccuuuccagaacgugaaucgaauuaccuauggggcauguccaagauacgucaagcaguccacgcugaaacuugccacuggaaugaggaacgugcccgagcggcaaacacguggcaucuuuggcgcuauugccggguucauagaaaauggaugggaggguaugguggauggcugguauggguuucgccaccagaacucugagggaagaggccaggcagcugaccuuaagagcacccaagccgcgaucgaucagauuaaugguaaauugaacaggcucaucgggaagacuaaugaaaaauuccaccagaucgagaaggaauuuucagaggucgaaggccggauucaggaccuggagaaguacguugaggauacaaaaauagacuuauggaguuauaacgccgaacugcucguggcacuugagaaccaacauaccaucgaucugacggacuccgaaaugaauaaguuguuugagaaaaccaagaaacagcuacgagaaaacgcugaggauaugggaaauggcugcuucaagauuuaccacaagugugacaacgccugcaucgggagcauucgcaauggaacauaugaucaugacguauacagagacgaggcucugaacaauagguuucagaucaaagguguggaacucaagucuggcuacaaagauuggauacuguggaucucauucgccauuaguugcuuucuucugugugucgcauugcucggguucaucaugugggccugccagaagggaaacauucgguguaauaucugcauauga

SEQ ID NO: 141728 - RNA, 1701 nt, Artificial Sequence; identical to SEQ ID NO: 140489
  derived and/or modified CDS sequence (opt3) from hemagglutinin__InfluenzaA__ALN39750

SEQ ID NO: 141729 - RNA, 1701 nt, Artificial Sequence; identical to SEQ ID NO: 140489
  derived and/or modified CDS sequence (opt3) from hemagglutinin__InfluenzaA__ALN39789

SEQ ID NO: 141730 - RNA, 1701 nt, Artificial Sequence; identical to SEQ ID NO: 141019
  derived and/or modified CDS sequence (opt3) from hemagglutinin__InfluenzaA__ALO75895

SEQ ID NO: 141731 - RNA, 1701 nt, Artificial Sequence
  derived and/or modified CDS sequence (opt3) from hemagglutinin__InfluenzaA__ALO75907
auggagaagaucgugcugcuccuugccauugucagccugguuaaaggcgaccagauaugcaucggguaccacgcuaacaauuccaccgaacaaguggauacaauuauggagaagaacguaacugugacgcaugcacaggacaucuuggaaaagacccacaauggaaaguuaugugaucugaacggugucaaaccccuaauucucaaggacugcucuguggccggcugguuccuggggaauagaaugugugaugaguuuaucaggguuccugaauggucauauauaguggagcgggcgaacccagcuaaugaccuuugcuacccgggaaaccugaaugauuaugaggaauugaagcaucuccugagucgcaucaaccacuucgagaaaacacugauuauccccaagagcuccuggccuaaucauacuucuucgggcgucucagccgcauguccauaccaggguaugcccagcuuuuuccgaaacgugguauggcucaccaaaaagaaugacgccuauccuacaauuaaaaugaguuacaacaauaccuaucgugaagauuuacugauccuuugggggauacaccacuccaacaacgcugcagagcagacuaauuuguacaagaacccaacaaccuacguuucugugggaacgagcacucugaaucaaagacuagagcccaagauugccaccaggucccaggucaacggccagcggggccgcauggacuuuuucuggacaauccucaaaccuaaugaugcuauucauuuugaaucaaacgggaauuucaucgccccagaguaugcguacaagaucgugaaaaagggagacaguacuauuaugaaaagcgaaauggaguauggucacugcaacaccaagugucagacaccgauaggcgcaaucaauucuuccaugcccuuucauaacauucacccucugaccaucggggaaugcccaaaauacgugaagucaaauaaacuuguccuggccacgggauugagaaacagcccccucagggagcggcgccgaaaaagaggccuguucggugcuauagccggguuuauugagggaggcuggcaaggcaugguugaugggugguauggauaccaccauaguaaugaacaggguucuggcuaugcagcugacagggaguccacucagaaggccaucgacggggugacaaacaaaguaaauagcaucauugauaagaugaacacccaguucgaagcggugggacgggaguuuaacaauuuagaacgucgcaucgagaaccugaauaaaaagauggaggacggcuuccucgaugucuggacuuacaacgccgaacuucugguguugauggagaaugaaagaacacuagacuuccacgauucgaacguuaagaaucuguacgacaaagugaggcuccaacugcgggauaacgcaaaggagcuugguaauggguguuuugaguucuaucauaaaugcgacaacgaauguauggagucuguccgaaauggcaccuacgauuauccucuguacuccgaagaggcucgcuugaagagagaagagauuucaggagugaaacucgagaguauaggcacguaucagauccugagcaacuacuccaccguagccucuagcuuagcucuggccauuaucguugcagggcuaucacucuggaugugcaguaauggaucccugcagugcaggaucuguauuuga

SEQ ID NO: 141732 - RNA, 1701 nt, Artificial Sequence
  derived and/or modified CDS sequence (opt3) from hemagglutinin__InfluenzaA__ALO75919
auggagaagaucgugcugcuccuugccauugucagccugguuaaaggcgaccagauaugcaucggguaccacgcuaacaauuccaccgaacaaguggauacaauuauggagaagaacguaacugugacgcaugcacaggacaucuuggaaaagacccacaauggaaaguuaugugaucugaacggugucaaaccccuaauucucaaggacugcucuguggccggcuggcugcaugggaauagaaugugugaugaguucaucaggguuccugaauggucauauauaguggagcgggcgaacccagcuaaugaccuuugcuacccgggaaaccugaaugauuaugaggaauugaagcaccuccugagucgcaucaaccauuuugagaaaacacugauuauccccaagagcuccuggccuaaucacacuucuucgggcgucucagccgcauguccauaccaggguaugcccagcuucuuucgaaacgugguauggcucaccaaaaagaaugacgccuauccuacaauuaaaaugaguuacaacaauaccuaucgugaagauuuacugauccuuugggggauacaccauuccaacaacgcugcagagcagacuaauuuguacaagaacccaacaaccuacguuucugugggaacgagcacucugaaucaaagacuagagcccaagauugccaccaggucccaggucaacggccagcggggccgcauggacuucuuuuggacaauccucaaaccuaaugaugcuauucacuucgaaucaaacgggaauuuuaucgccccagaguaugcguacaagaucgugaaaaagggagacaguacuauuaugaaaagcgaaauggaguauggucauugcaacaccaagugucagacaccgauaggcgcaaucaauucuuccaugcccuuccacaacauucacccucugaccaucggggaaugcccaaaauacgugaagucaaauaaacuuguccuggccacgggauugagaaacagcccccucagggagcggcgccgaaaaagaggccuguuuggugcuauagccggguucauugagggaggcuggcaaggcaugguugaugggugguauggauaccaucacaguaaugaacaggguucuggcuaugcagcugacagggaguccacucagaaggccaucgacggggugacaaacaaaguaaauagcaucauugauaagaugaacacccaguuugaagcggugggacgggaguucaacaauuuagaacgucgcaucgagaaccugaauaaaaagauggaggacggcuuucucgaugucuggacuuacaacgccgaacuucugguguugauggagaaugaaagaacacuagacuuccaugauucgaacguuaagaaucuguacgacaaagugaggcuccaacugcgggauaacgcaaaggagcuugguaauggguguuucgaauuuuaucacaaaugcgacaacgaguguauggagucuguccgaaauggcaccuacgauuauccucuguacuccgaagaggcuucauugaagcgcgaagagauuaguggagugaaacucgagagcauaggcacguaucagauccuguccauuuacucuaccguagccagcucauuagcucuggccaucaucguugcagggcuaagucucuggaugugcuccaacggaagccugcagugcagaauuuguauauga

SEQ ID NO: 141733 - RNA, 1683 nt, Artificial Sequence
  derived and/or modified CDS sequence (opt3) from hemagglutinin__InfluenzaA__ALT20080
auggagaccgugagccugaucacaauucuccuugucgccacuguuuccaacgcugacaagauaugcaucggcuaccagucuacuaauucaaccgaaacaguggauacucugaccgagaacaauguacccgugacacacgcaaaagaauuguuacauaccgagcacaacgggaugcugugugccacgagucuaggacaaccucucauucuggacacaugcaccaucgaaggucuuauuuauggcaauccaagcugugaucuguccuuggaggggagagaguggucuuacaucgucgaaaggccgucggcggugaacggacucugcuaucccggcaauguugagaaccuggaggaacugcggucacucuucagcagugcucgcuccuaccagcgaauacagaucuuuccugacacgauuuggaaugugucuuaugaugguacuagcaccgccuguuccgggucauucuaccguaguaugagaugguuaacaaggaagaacggagacuauccaauccaggaugcacaauacacuaauaaccagggcaaaaauauucuguuuauguggggcaucaaccaucccccuaccgacacaacccagcgggaucuuuacacgcgcacugacacaaccacuagcgucgccacagaggaaauaaauagaauuuucaagccauugaucgggcccaggccucuggugaacggacuaaugggucggauugauuauuacuggucuguacucaaaccaggccagacccugcgcaucaaguccgacgggaaccuuaucgcuccgugguuuggacacauucugucaggcgagagccauggucgaauauugaagacgaaucucaaaagagggaguugcaccguucaaugucagacagaaaagggaggccugaacacuaccuuacccuuccagaaugugucuaaauaugcauuuggcaacugcuccaaguacaucgggauuaaaagccugaagcucgccgucggacuuaggaaugugccuucgcggucuucccguggucuguucggcgcuaucgccggguuuauagagggaggcuggucagguuugguggcggggugguauggcuuccagcacaguaacgaucaaggagucggcauggcagccgaccgcgacagcacacagaaggcuauugauaaaaucacuuccaagguuaauaacaucguggacaaaaugaauaagcaguacgaaauuaucgaucacgaguuuucugagguagaaaccagacuaaacaugauuaauaacaaaauagacgaucaaauccaggacauuugggccuauaaugcagagcugcucgugcugcuugaaaaccagaagacacuggaugagcaugacgcuaaugucaacaacuuguacaauaaagugaagagggcccucgggagcaacgcgguugaagauggaaaggguuguuucgagcuguaccacaaaugcgacgaucaguguauggagaccauccggaauggcacuuauaaccgacgcaaguaccaagaagagucaaaauuagaaagacagaagaucgagggggugaaacuggaaagugagggaacguauaagauucuaacaauauacuccaccgucgccagcucucucgugaucgcaaugggcuuugcugccuuccuguucugggcuaugucaaaugguaguuguaggugcaacauuugcaucuga

SEQ ID NO: 141734 - RNA, 1701 nt, Artificial Sequence
  derived and/or modified CDS sequence (opt3) from hemagglutinin__InfluenzaA__ALT66860
augaaggccauccuggugguccuccuuuacaccuucacaacugcuaacgcagacacgcugugcauuggcuaucacgccaauaacagcaccgauacaguugacacuguguuggagaagaauguaaccgugacacauuccgucaacuuacuggaagauaagcacaaugggaaacuauguaagcucagaggaguggcgccccugcaucuugguaaaugcaacauagcuggcuggauccuggggaauccugagugugaaucuuugucaaccgccaguagcugguccuacauuguugagacuucuaacucggacaauggaacaugcuauccaggcgauuuuaucaacuacgaagaacucagggagcagcugucaagcgugaguuccuucgaacgguuugagauuuucccgaagaccucuagcuggcccaaucacgacuccaacaagggugucacggcagccuguccucaugcuggggcaaaaucauuuuauaagaaucugaucuggcucgugaaaaagggaaacaguuacccaaaauuaaaucaaagcuauauaaacgauaagggcaaggaaguacugguucuuuggggcauccaccaccccucuacuaccgccgaccagcaguccuuguaccagaacgcugaugccuacguguucgucgggacaucacgcuauagcaaaaaguuuaaaccugagauugcgacucgaccaaaggugcgugaccaagagggaagaaugaauuacuauuggacccugguggaacccggugauaaaaucacauucgaggcaaccggcaaccuagucguuccuagguacgccuuuacgauggaacggaaugcugggaguggaauuaucauaucugacacuccagugcaugauugcaacacaaccugucagacuccggagggcgccauuaauacaucccuccccuuccagaacauccacccuauuaccaucgguaagugcccaaaauauguaaagagcacgaagcugcgccuugcaaccgggcugagaaaugugcccucgauccagucuaggggauuguuuggcgcuauugccggcuucauagaagggggauggacagguauggucgacggcugguacggguaucaucaccaaaacgagcagggauccggcuacgcggccgaccucaaaucaacucagaaugcaaucgauaagauuaccaacaaagugaauaguguuaucgagaagaugaacacacaguuuacugcuguggguaaagaguucaaucaccuggagaagcggauagaaaacuuaaauaagaaagucgacgauggguuccuggacauuuggaccuacaacgccgagcuccuugugcuguuggaaaacgagcgcacacuagauuaucaugacagcaauguaaagaaccuguacgagaaaguucgaaaucaacucaagaacaaugcuaaagaaaucggcaacggauguuuugaguucuaucacaagugcgauaauaccuguauggaauccgugaagaacggcacuuacgacuauccuaaauacucugaggaagccaagcugaauagagagaaaaucgauggggucaaacuugagagcacgaggauuuaucagauccuggcaauuuacucaacaguggccaguuccuugguccucgugguuagccugggagcuauaucuuuuuggaugugcucaaacgguaguuuacagugccggaucuguauuuga

SEQ ID NO: 141735 - RNA, 1701 nt, Artificial Sequence
  derived and/or modified CDS sequence (opt3) from hemagglutinin__InfluenzaA__AMA65391
augaaggccauccuggugguccuccuuuacaccuucacaacugcuaacgcagacacgcugugcauuggcuaucacgccaauaacagcaccgauacaguugacacuguguuggagaagaauguaaccgugacacauuccgucaacuuacuggaagauaagcacaaugggaaacuauguaagcucagaggaguggcgccccugcaucuugguaaaugcaacauagcuggcuggauccuggggaauccugagugugaaucuuugucaaccgccaguagcugguccuacauuguugagacuucuaacucggacaauggaacaugcuauccaggcgauuuuaucaacuacgaagaacucagggagcagcugucaagcgugaguuccuucgaacgguuugagauuuucccgaagaccucuagcuggcccaaucacgacuccaacaagggugucacggcagccuguccucaugcuggggcaaaaucauuuuauaagaaucugaucuggcucgugaaaaagggaaacaguuacccaaaauuaaaucaaagcuauauaaacgauaagggcaaggaaguacugguucuuuggggcauccaccaccccucuacuaccgccgaccagcaguccuuguaccagaacgcugaugccuacguguucgucgggacaucacgcuauagcaaaaaguuuaaaccugagauugcgacucgaccaaaggugcguggacaagaggguagaaugaauuacuauuggacccugguggaacccggcgacaaaaucacauucgaggcaaccgggaaccuagucguuccuagguacgccuuuacgauggaacggaaugcuggaaguggcauuaucauaucugauacuccagugcaugacugcaacacaaccugucagacuccggagggugccauuaauacaucccuccccuuccagaacauccacccuauuaccaucgggaagugcccaaaauauguaaagagcacgaagcugcgccuugcaaccggacugagaaaugugcccucgauccagucuaggggcuuguuuggcgcuauugccggguucauagaaggagguuggacaggcauggucgaugggugguacggauaucaucaccaaaacgagcagggcuccgguuacgcggccgaccucaaaucaacucagaaugcaaucgacaagauuaccaacaaagugaauaguguuaucgagaagaugaacacacaguuuacugcuguggggaaagaguucaaucaccuggagaagcggauagaaaacuuaaauaagaaagucgaugacggcuuccuggauauuuggaccuacaacgccgagcuccuugugcuguuggaaaacgagcgcacacuagacuaucaugauagcaauguaaagaaccuguacgagaaaguucgaaaucaacucaagaacaaugcuaaagaaaucggaaacggcuguuuugaguucuaucacaagugcgacaauaccuguauggaauccgugaagaacgggacuuacgauuauccuaaauacucugaggaagccaagcugaauagagagaaaaucgacggagucaaacuugagagcacgaggauuuaucagauccuggcaauuuacucaacaguggccaguuccuugguccucgugguuuuucugggugcuaucagcuucuggaugugcucuaacggcucauuacagugccggauauguauuuga

SEQ ID NO: 141736 - RNA, 1701 nt, Artificial Sequence
  derived and/or modified CDS sequence (opt3) from hemagglutinin__InfluenzaA__AMA65393
augaaggccauccuggugguccuccuuuacaccuucacaacugcuaacgcagacacgcugugcauuggcuaucacgccaauaacagcaccgauacaguugacacuguguuggagaagaauguaaccgugacacauuccgucaacuuacuggaagauaagcacaaugggaaacuauguaagcucagaggaguggcgccccugcaucuugguaaaugcaacauagcuggcuggauccuggggaauccugagugugaaucuuugucaaccgccaguagcugguccuacauuguugagacuucuaacucggacaauggaacaugcuauccaggcgauuuuaucaacuacgaagaacucagggagcagcugucaagcgugaguuccuucgaacgguuugagauuuucccgaagaccucuagcuggcccaaucacgacuccaacaagggugucacggcagccuguccucaugcuggggcaaaaucauuuuauaagaaucugaucuggcucgugaaaaagggaaacaguuacccaaaauuaaaucaaagcuauauaaacgauaagggcaaggaaguacugguucuuuggggcauccaccaccccucuacuaccgccgaccagcaguccuuguaccagaacgcugaugccuacguguucgucgggacaucacgcuauagcaaaaaguuuaaaccugagauugcgacucgaccaaaggugcgugaccaagagggaagaaugaauuacuauuggacccugguggaacccggugauaaaaucacauucgaggcaaccggcaaccuagucguuccuagguacgccuuuacgauggaacggaaugcugggaguggaauuaucauaucugacacuccagugcaugauugcaacacaaccugucagacuccggagggcgccauuaauacaucccuccccuuccagaacauccacccuauuaccaucgguaagugcccaaaauauguaaagagcacgaagcugcgccuugcaaccgggcugagaaaugugcccucgauccagucuaggggauuguuuggcgcuauugccggcuucauagaagggggauggacagguauggucgacggcugguacggguaucaucaccaaaacgagcagggauccggcuacgcggccgaccucaaaucaacucagaaugcaaucgauaagauuaccaacaaagugaauaguguuaucgagaagaugaacacacaguuuacugcuguggguaaagaguucaaucaccuggagaagcggauagaaaacuuaaauaagaaagucgacgauggguuccuggacauuuggaccuacaacgccgagcuccuugugcuguuggaaaacgagcgcacacuagauuaucaugacagcaauguaaagaaccuguacgagaaaguucgaaaucaacucaagaacaaugcuaaagaaaucggcaacggauguuuugaguucuaucacaagugcgauaauaccuguauggaauccgugaagaacggcacuuacgacuauccuaaauacucugaggaagccaagcugaauagagagaaaaucgauggggucaaacuugagagcacgaggauuuaucagauccuggcaauuuacucaccaguggccaguuccuugguccucgugguuuuucugggagcuaucagcuucuggaugugcucuaacgguucauuacagugccggauauguauuuga

SEQ ID NO: 141737 - RNA, 1701 nt, Artificial Sequence
  derived and/or modified CDS sequence (opt3) from hemagglutinin__InfluenzaA__BAA02768
augaaggccaaacugcucgugcuucugugcgcuuucaccgcaacagacgccgauacuaucuguauuggcuaccacgcgaacaauagcacggacaccgucgauacaguuuuggagaagaacgugacuguaacccauuccgugaauuuacuggaagacucucacaacgggaaacuaugcagacucaagggaauagcuccccugcagcuugguaauuguucaaucgccggcuggauucuggggaacccugagugcgaaaguuuguuuagcaaagaguccuggucuuauaucgcagaaacaccaaauucggagaacggaaccuguuacccgggcuauuucgccgauuacgaggaacucagggagcaacugucaagcgucaguuccuuugaacgguucgagauuuuucccaaggagucuagcuggccuaaucauacugugacaaaggguguuaccgcuuccugcucacacaacgggaaaaguagcuucuaucgcaaucugcucugguuaacgggaaagaacggccuguacccaaaucuuucuaaauccuaugugaacaauaaggaaaaagaggucuuggugcuguggggcguacaucaccccucaaacaucggggaccagcgagcaauauaccacacugaaaacgccuacguuagcguggucaguucucauuauucccguagauuuaccccugagaucgcuaagaggccaaaggugcggggacaggaaggucgcauuaauuacuauuggacacuacucgagcccggcgauacuaucauuuucgaggccaacgggaaucugaucgcgccuugguacgcauuugcccuuagcagaggauucggcucggguauaauuaccucuaacgcuuccauggacgaaugugaugccaaaugccagacaccacaaggggcaaucaauucaagucugccguuucagaacgugcaccccgucaccauuggagaguguccuaaguauguuaggagcacgaaauugcggauggugacuggccuccgcaauaucccauccauccagucucgaggccuguucggggcuauugccggauuuauagaagguggcuggacagggaugaucgacggaugguacggcuaucaucaccagaacgagcaagguagcggguacgcggccgaucagaagucaacccagaaugcaauuaacggcaucacuaauaaaguaaacagugugauagaaaagaugaauacacaguucaccgcugucggaaaagaguucaacaaguuagagagaaggauggaauaccugaauaagaaaguggacgauggcuuucucgacauuuggacguauaacgccgagcuucugguuuugcuagaaaacgagcggacccuggacuuccacgauuccaaugugaagaaccucuacgaaaaagucaagagccaacugaaaaauaacgcuaaggagaucggguauggaugcuuugaguucuaccauaaguguaauaacgaaugcauggagucugugaaaaaugguacauaugacuaccccaaguauucagaagagaguaaacuuaaccgugagaagaucgauggcguaaaacuggaaagcauggggguuuaccagauuuuggccaucuacuccacuguggcaucuucgcucguccuguuagugagccugggagccauuuccuuuuggaugugcucaaauggcagucuacagugucgcauaugcaucuga

SEQ ID NO: 141738 - RNA, 1701 nt, Artificial Sequence
  derived and/or modified CDS sequence (opt3) from hemagglutinin__InfluenzaA__BAA02769
augaaggccaaacugcucgugcuucugugcgcuuucaccgcaacagacgccgauacuaucuguauuggcuaccacgcgaacaauagcacggacaccgucgauacaguuuuggagaagaacgugacuguaacccauuccgugaauuuacuggaagacucucacaacgggaaacuaugcagacucaagggaauagcuccccugcagcuugguaauuguucaaucgccggcuggauucuggggaacccugagugcgaaaguuuguuuagcaaagaguccuggucuuauaucgcagaaacaccaaauucggagaacggaaccuguuacccgggcuauuucgccgauuacgaggaacucagggagcaacugucaagcgucaguuccuuugaacgguucgagauuuuucccaaggagucuagcuggccuaaucauacugugacaaaggguguuaccgcuuccugcucacacaacgggaaaaguagcuucuaucgcaaucugcucugguuaacgggaaagaacggccuguacccaaaucuuucuaaauccuaugugaacaauaaggaaaaagaggucuuggugcuguggggcguacaucaccccucaaacauccgagaccagcgugcaauauaccacacugaaaacgccuacguuagcguggucaguucucauuauuccagaagguuuaccccugagaucgcuaagcggccaaaggugcgcgaucaggaagggagaauuaauuacuauuggacacuacucgagcccggagacacuaucauuuucgaggccaacgguaaucugaucgcgccuugguacgcauuugcccuuagcaggggcuucgggucgggaauaauuaccucuaacgcuuccauggaugaaugugacgccaaaugccagacaccacaaggcgcaaucaauucaagucugccguuucagaacgugcaccccgucaccauuggugaguguccuaaguauguucggagcacgaaauugcgcauggugaaggggcuccgaaauaucccauccauccagucuagaggacuguucggcgcuauugccggcuuuauagaagggggauggacugguaugaucgauggcugguacggguaucaucaccagaacgagcaaggaagcggcuacgcggccgaccagaaaucaacacagaaugcaauuaacgguaucaccaauaagguaaacagugugauagaaaagaugaauacucaguucacagcugucgggaaggaguucaacaaguuagagaggcggauggaauaccugaauaaaaagguggaugacggcuuucucgacauuuggaccuauaacgccgagcuucugguuuugcuagaaaacgagcguacgcuggauuuccacgacuccaaugugaaaaaccucuacgaaaaggucaaaagccaacugaagaauaacgcuaaggagaucggauauggcugcuuugaguucuaccauaaauguaauaacgaaugcauggagucugugaagaaugggaccuaugauuaccccaaauauucagaagagaguaaacuuaaccgcgagaaaaucgacggaguaaagcuggaaagcauggguguuuaccagauuuuggccaucuacuccacaguggcaucuucgcucguccuguuagugagccugggcgccauuuccuuuuggaugugcucaaaugggagucuacaguguagaauaugcaucuga

SEQ ID NO: 141739 - RNA, 1689 nt, Artificial Sequence
  derived and/or modified CDS sequence (opt3) from hemagglutinin__InfluenzaA__BAC43764
auggccaucauuuaccugauacuccuuuucaccgcugugagaggcgaccagaucugcauuggguaucacgcaaacaauagcacagagaaggucgauacuauccuggaaaggaacguuacggugacccaugccaaaaauauuuuggagaagacacacaacggaaaauuauguaagcugaaugguauacccccucuagaacucggcgacugcuccauagcgggguggcugcuuggaaacccagagugugaucggcuguugaucguaccggaauggucuuacauuauggagaaagagaauccccgcgacggccucugcuauccugguucauuuaacgauuacgaagaacugaagcaucugcucaguagcgugaagcacuucgaaaaagucaagaucuuaccaaaagaccgauggacucaacauaccacaaccgggggaucccgugcuugugccgugucuggcaaucccucguuuuucagaaacaugguuuggcugacuaagaaaggcucaaauuauccuguggcaaaggggagcuacaacaauacaaguggagagcagaugcuuauuaucugggguguccaccacccaauagaugagaccgaacagauuacguuguaucagaacgugggcacuuacguauccguugggaccucuacacugaauaagaggagcacucccgagaucgccacccggccuaaagugaacggacuaggcucccgcauggaauuuucauggacacuccuggacaugugggauaccauuaacuucgagaguacggguaaucuuaucgcuccagaauacggguuuaagaucagcaaaagaggaucuuccggcauuaugaagacugagggcacacuggagaacugcgaaaccaaaugucaaacuccguugggggcaauaaauacaacccuccccuuccauaacguccacccucugacgaucggagagugcccaaaguaugugaaaucagaaaaguuagugcuggccaccggucucaggaaugucccccagauugagagccggggccuuuuuggggcuaucgccggauucauagaaggcgguuggcaggggaugguugacggcugguacggauaucaucacaguaacgaucagggcucuggguacgcggcagacaaggaguccacacaaaaagccuuugauggaauuacuaauaaggugaacagcguaaucgagaaaaugaauacccaguucgaagcuguggguaaggaguuuucgaaccuggaacgccgauuggagaaucuaaacaaaaagauggaagacggcuuccuggacgucuggacauauaaugccgagcuccuggugcuuauggagaacgaaagaacucuggauuuccacgacucuaauguuaagaacuuguacgauaaagugaggaugcagcuccgggacaacgucaaggagcuggggaauggauguuuugaguucuaucauaaaugcgaugacgaguguaugaacuccgugaagaauggcaccuacgauuacccuaaauaugaggaagagucaaaguuaaaccguaaugaaaucaaggguguaaaacugaguagcauggggguuuaccagauucuagcaaucuaugcuacaguggccggcucccucucucuggcgauuaugauggccggaaucagcuuuuggaugugcucaaacggcagucuucaauuccgcaucugcauuuga

SEQ ID NO: 141740 - RNA, 1707 nt, Artificial Sequence
  derived and/or modified CDS sequence (opt3) from hemagglutinin__InfluenzaA__BAE07201
auggagaagaucgugcuccuguucgccauugucagccuuguuaaauccgaccagauaugcaucggcuaccacgcuaacaauucuaccgaacaaguggauacaauuauggagaagaacguaacugugacgcaugcacaggacauccuggagaaaacccacaaugggaaguugugugauuuagacggagucaaaccccugauucuaagagauugcucaguggccgguuggcuccugggcaacccuaugugugacgaauuuaucaauguuccagaauggaguuauauaguggagaaggcgaacccggcuaaugaucuuugcuaccccggggacuucaacgauuaugaggaacugaagcauuugcucagcaggaucaaucacuuugagaaaauucagaucauuccuaagaacuccuggucuucgcaugaagccucacugggagucagcagugcauguccauaccagggcaaauccucuuucuuucggaaugugguauggcugaucaagaaaaacaaugccuaucccacaauaaagcgcagcuacaacaauacuaaccaagaggaccucuuaguucugugggguauucaccacccuaacgaugcugcagagcagacccgacuuuaucagaauccaacaaccuacaucuccguggggacuucaacauugaaccagcgucugguccccaagauugccaccagaaguaaagugaauggacaaaacggcaggauggaguucuuuuggacgauccuaaagccuaaugacgcuaucaacuucgaaagcaauggcaacuuuauugccccagaauacgcguauaaaauagugaagaaaggggauucugcaaucaugaaguccgagcucgaauacggaaauugcaacacuaaaugucagaccccgaugggugccauuaauucaagcaugcccuuccauaacauccacccucugacaauaggcgagugcccaaaguaugucaagaguaaucggcuuguucuggcuacuggguugcgcaacucuccccagagagagaggcggcgcaaaaagcgaggacucuuuggcgccauugcagguuucaucgaagggggauggcagggcaugguggacggcugguacggguaucaucacuccaaugagcaaggaagcgguuacgcugccgacaaagaaucgacccagaaggcgaucgauggcguaacaaacaaagugaacucuauuaucgacaagaugaauacccaguuugaggccgucgggagagaguucaacaaucuggaaaggcggauugagaacuuaaauaagaaaauggaagauggauuccuggacguguggacguauaacgcagagcuccuuguucugauggaaaaugagcguacuuuggauuuucacgacuccaacgugaagaaucuauacgauaaaguccgccugcaacucagagacaacgcuaaggaacugggcaaugguuguuucgaguuuuaccauaaaugcgauaacgaguguauggaaucagugaggaaugggacauaugacuacccucaguauagugaggaagcccggcuuaagcgagaggagauaagcggcguaaagcuggaauccaucggaaccuaccagauuuugucuaucuauagcacuguugcuucaagucucgcccuggcaaucaugguggccggcuuaucccuguggaugugcagcaacgggucucuacagugccgcauuuguauauga

SEQ ID NO: 141741 - RNA, 1701 nt, Artificial Sequence
  derived and/or modified CDS sequence (opt3) from hemagglutinin__InfluenzaA__BAH95823
augaaggccauccuggugguccuccuuuacaccuucgcuacagcaaacgccgacacucugugcauuggcuaucacgcgaauaacagcacggauaccguugacacaguguuggagaaaaauguaacugugacccauuccgucaacuuacuggaagauaagcacaaugggaaacuauguaagcucagaggaguggcuccccugcaucuugguaaaugcaacauagccggcuggauccuggggaauccugagugugaaucuuugucaacagcaaguagcugguccuacauuguugagaccucuucgucagacaacggaacuugcuauccaggcgauuuuaucgacuacgaggagcucagggagcagcugagcaguguguccucuuucgaacgguuugagauuuucccgaagacaagcuccuggcccaaucacgauucaaacaagggugucaccgccgcuuguccucaugcaggggccaaaaguuuuuauaagaaucugaucuggcucgugaaaaagggaaacagcuacccaaaauuaucuaaguccuauauaaaugacaagggcaaagaaguacugguucuuuggggcauccaccaccccucaacgagcgcugaucaacagaguuuguaccagaacgccgacgcguacguguucgucgggucuucccgcuauagcaagaaauuuaagccugagauugcaauccgaccaaaagugcgugaucaggagggaagaaugaauuacuauuggacucugguggaacccggugacaagauuaccuucgaggccacaggcaaccuagucguuccuagguacgcuuuugccauggaacggaacgcagggucgggaaucauaauuucugauacuccagugcaugacugcaauaccacaugucaaaccccgaaaggcgcuaucaacacgucccuccccuuccagaauauucacccuaucacuaucgguaagugcccaaagcauguaaaaucaacaaagcugcgccuugccaccgggcugagaaacgugcccaguauucagagcaggggauuguuuggcgcgauagccggcuucaucgaagggggauggacugguauggucgacggcugguauggguaccaccaccagaaugaacaaggauccggcuaugcagcugaucucaaaucuacacagaacgccauugacgagaucaccaauaaggugaacagcguuauagagaaaaugaauacgcaguuuaccgcuguggguaaggaguucaaccaucuggaaaagcggauugaaaauuuaaacaaaaaggucgaugacggguuccuggauaucuggacauacaaugccgagcuccuugugcuguuggaaaacgagcgcacucuagacuaccacgauucaaauguaaagaaccuguaugagaagguucgaagucagcucaaaaacaaugcaaaggaaaucggcaacggauguuuugaguucuaccauaagugcgacaauaccuguauggaauccgugaaaaacggcacauaugauuacccuaaguauagcgaggaagccaaacugaauagagaggagauugacggggucaaacuugaaucuacuaggaucuaccaaauucuggcuauauauucaaccguggcgaguagcuugguccucgugguuucccugggagcaaucucuuuuuggaugugcucgaacgguagcuuacagugccggauuuguaucuga

SEQ ID NO: 141742 - RNA, 1701 nt, Artificial Sequence; identical to SEQ ID NO: 130704
  derived and/or modified CDS sequence (opt3) from hemagglutinin__InfluenzaA__BAH95824

SEQ ID NO: 141743 - RNA, 1707 nt, Artificial Sequence
  derived and/or modified CDS sequence (opt3) from hemagglutinin__InfluenzaA__BAJ07997
auggagaagaucgugcuccuguucgccauugucagccuuguuaaauccgaccagauaugcaucggcuaccacgcuaacaauucuaccgaacaaguggauacaauuauggagaagaacguaacugugacgcaugcacaggacauccuggagaaaacccacaaugggaaguugugugauuuagacggagucaaaccccugauucuaagagauugcucaguggccgguuggcuccugggcaacccuaugugugacgaauuuaucaauguuccagaauggaguuauauaguggagaaggcgaacccggcuaaugaucuuugcuaccccggggacuucaacgauuaugaggaacugaagcauuugcucagcaggaucaaucacuuugagaaaauucagaucauuccuaagaacuccuggucuucgcaugaagccucacugggagucagcagugcauguccauaccagggcaaauccucuuucuuucggaaugugguauggcugaucaagaaaaacaaugccuaucccacaauaaagcgcagcuacaacaauacuaaccaagaggaccucuuaguucugugggguauucaccacccuaacgaugcugcagagcagacccgacuuuaucagaauccaacaaccuacaucuccguggggacuucaacauugaaccagcgucugguccccaagauugccaccagaaguaaagugaauggacaaagcggcaggauggaguucuuuuggacgauccuaaagccuaacgacgcuaucaauuucgaaucuaacggcaauuuuauugccccagaauacgcguauaaaauagugaagaaaggggauuccgcaaucaugaagucagagcucgaauacggaaacugcaauacuaaaugucagaccccgaugggugccauuaacagcaguaugcccuuccauaauauccacccucugacaauaggcgagugcccaaaguaugucaagucuaaccggcuuguucuggcuacuggguugcgcaauagcccccagagagagaggcggcgcaaaaagcgaggacucuuuggcgccauugcagguuucaucgaagggggauggcagggcaugguggacggcugguacggguaucaucacuccaacgagcaaggaucggguuacgcugccgacaaagaaucuacccagaaggcgaucgauggcguaacaaauaaagugaacuccauuaucgacaagaugaacacccaguuugaggccgucgggagagaguucaauaaccuggaaaggcggauugagaauuuaaacaagaaaauggaagauggauuccuggacguguggacguauaaugcagagcuccuuguucugauggaaaacgagcguacuuuggauuuucacgacucaaaugugaagaaccuauacgauaaaguccgccugcaacucagagacaaugcuaaggaacugggcaacgguuguuucgaguuuuaccauaaaugcgauaaugaguguauggaaagugugaggaacgggacauaugacuacccucaguauagcgaggaagcccggcuuaagcgagaggagauauccggcguaaagcuggaaucuaucggaaccuaccagauuuugagcaucuauucaacuguugcuaguucccucgcccuggcaaucaugguggccggcuuaagccuguggaugugcucuaaugggucacuacagugccgcauuuguauauga

SEQ ID NO: 141744 - RNA, 1701 nt, Artificial Sequence
  derived and/or modified CDS sequence (opt3) from hemagglutinin__InfluenzaA__BAJ39949
augaaggccauccuggugguccuccuuuacaccuucgcuacagcaaacgccgacacucugugcauuggcuaucacgcgaauaacagcacggauaccguugacacaguguuggagaaaaauguaacugugacccauuccgucaacuuacuggaagauaagcacaaugggaaacuauguaagcucagaggaguggcuccccugcaucuugguaaaugcaacauagccggcuggauccuggggaauccugagugugaaucuuugucaacagcaaguagcugguccuacauuguugagaccucuucgucagacaacggaacuugcuauccaggcgauuuuaucgacuacgaggagcucagggagcagcugagcaguguguccucuuucgaacgguuugagauuuucccgaagacaagcuccuggcccaaucacgauucaaacaagggugucaccgccgcuuguccucaugcaggggccaaaaguuuuuauaagaaucugaucuggcucgugaaaaagggaaacagcuacccaaaauuaucuaaguccuauauaaaugacaagggcaaagaaguacugguucuuuggggcauccaccaccccucaacgagcgcugaucaacagaguuuguaccagaacgccgacacuuacguguucgucgggaccucucgcuauuccaagaaauuuaagccugagauugcgauccgaccaaaagugcgugaucaggagggaagaaugaauuacuauuggacacugguggaacccggugacaagauuacuuucgaggcaaccggcaaccuagucguuccuagguacgccuuugcuauggaacggaacgccgggagcggaaucauaauuucggauacaccagugcaugacugcaauaccacgugucaaacuccgaaaggcgcaaucaacacaucucuccccuuccagaauauucacccuaucaccaucgguaagugcccaaaguauguaaaauccacuaagcugcgccuugcuacagggcugagaaacgugcccucaauucagaguaggggauuguuuggcgccauagcgggcuucaucgaagggggauggaccgguauggucgacggcugguacggguaucaucaccagaaugaacaaggaagcggcuacgccgcagaucucaaauccacgcagaacgcuauugacgagaucaccaauaaggugaacucuguuauagagaaaaugaauacacaguuuacugccguggguaaggaguucaaccaccuggaaaagcggauugaaaauuuaaacaaaaaggucgaugacggguuccuggauaucuggaccuacaaugcuaaacuccuugugcuguugaagaacgagcgcacacuagacuaucaugauagcaauguaaagaaccuguacgaaaagguucgaucacagcucaagaacaaugccaaagagaucggcaacggauguuuugaguucuaucacaagugcgacaauacuuguauggaaagugugaaaaacggcaccuacgauuauccuaaguacuccgaggaagcaaaacugaauagagaggaaauugacggggucaaacuugagagcacaaggaucuaucaaauucuggccauauacucuaccguggcuucaaguuugguccucgugguuagccugggagcgaucuccuuuuggaugugcucuaacgguucguuacagugccggauuuguaucuga

SEQ ID NO: 141745 - RNA, 1701 nt, Artificial Sequence
  derived and/or modified CDS sequence (opt3) from hemagglutinin__InfluenzaA__BAJ39950
augaaggccauccuggugguccuccuuuacaccuucgcuacagcaaacgccgacacucugugcauuggcuaucacgcgaauaacagcacggauaccguugacacaguguuggagaagaauguaacugugacccauuccgucaacuuacuggaagauaagcacaaugggaaacuauguaagcucagaggaguggcuccccugcaucuugguaaaugcaacauagccggcuggauccuggggaauccugagugugaaucuuugucaacagcaaguagcugguccuacauugccgagaccucuucgucagacaacggaacuugcuauccaggcgauuuuaucgacuacgaggagcucagggagcagcugagcaguguuuccucuuucgaacgguuugagauuuucccgaagacaagcuccuggcccaaucacgauucaaacaagggugugaccgcugcauguccucaugccggggcuaaaaguuuuuauaagaaucugaucuggcucgucaaaaagggaaacagcuacccaaaauuaucuaaguccuauauaaaugacaagggcaaagaagugcugguacuuuggggcauccaccaccccucaacgagcgccgaucaacagaguuuguaccagaacgcggacgcauacguuuucguggggacuucucgcuauuccaagaaauuuaagccugagauugccauccgaccaaaaguccgugaucaggagggaagaaugaauuacuauuggacccugguggaacccggugacaagauuacauucgaggcuacuggcaaccuaguggucccuagguacgccuuugcaauggaacggaacgcugggagcggaaucauaauuucggauaccccaguucaugacugcaauacaaccugucaaacgccgaaaggcgccaucaacacuucucuccccuuccagaauauucacccuaucacaaucgguaagugcccaaaguaugugaaauccaccaagcugcgccuugcgacugggcugagaaacguacccucaauucagaguaggggauuguuuggcgccauagcaggcuucaucgaagggggauggacagguaugguggacggcugguacggguaucaucaccagaaugaacaaggaagcggcuacgcugccgaucucaaauccacccagaacgcuauugacgagaucacgaauaaggucaacucugugauagagaaaaugaauacccaguuuacagccguugguaaggaguucaaccaccuggaaaagcggauugaaaauuuaaacaaaaagguggaugacggguuccuggauaucuggacuuacaaugcagagcuccuuguccuguuggaaaacgagcgcacccuagacuaucaugauagcaaugugaaaaaccuguacgagaagguacgaucacagcucaaaaacaaugccaaggaaaucggcaacggauguuuugaguucuaucacaagugcgacaauacauguauggaaaguguuaaaaacggcacuuacgauuauccuaaguacuccgaggaagcuaaacugaauagagaggagauugacggggugaaacuugaaagcaccaggaucuaucaaauucuggcgauauacucuacagucgcaucaaguuuggugcucgucgugagccugggagccaucuccuuuuggaugugcucuaacgguucguuacagugccggauuuguaucuga

SEQ ID NO: 141746 - RNA, 1701 nt, Artificial Sequence
  derived and/or modified CDS sequence (opt3) from hemagglutinin__InfluenzaA__BAJ39951
augaaggccauccuggugguccuccuuuacaccuucgcuacagcaaacgccgacacucugugcauuggcuaucacgcgaauaacagcacggauaccguugacacaguguuggagaaaaauguaacugugacccauuccgucaacuuacuggaagauaagcacaaugggaaacuauguaagcucagaggaguggcuccccugcaucuugguaaaugcaacauagccggcuggauccuggggaauccugagugugaaucuuugucaacagcaaguagcugguccuacauuguugagaccucuucgucagacaacggaacuugcuauccaggcgauuuuaucgacuacgaggagcucagggagcagcugagcaguguguccucuuucgaacgguuugagauuuucccgaagacaagcuccuggcccaaucacgauucaaacaagggugucaccgccgcuuguccucaugcaggggccaaaaguuuuuauaagaaucugaucuggcucgugaaaaagggaaacagcuacccaaaauuaucuaaguccuauauaaaugacaagggcaaagaaguacugguucuuuggggcauccaccaccccucaacgagcgcugaucaacagaguuuguaccagaacgccgacacuuacguguucgucgggaccucucgcuauuccaagaaauuuaagccugagauugcgauccgaccaaaagugcgugaucaggagggaagaaugaauuacuauuggacacugguggaacccggugacaagauuacuuucgaggcaaccggcaaccuagucguuccuagguacgccuuugcuauggaacggaacgccgggagcggaaucauaauuucggauacaccagugcaugacugcaauaccacgugucaaacuccgaaaggcgcaaucaacacaucucuccccuuccagaauauucacccuaucaccaucgguaagugcccaaaguauguaaaauccacuaagcugcgccuugcuacagggcugagaaacgugcccucauuucagaguaggggauuguucggcgccauugcgggcuuuauagaagggggauggaccgguauggucgacggcugguacggguaucaucaccagaaugaacaaggaagcggcuacgccgcagaucucaaauccacgcagaacgcuaucgacgagauuaccaauaaggugaacucuguuaucgagaaaaugaauacacaguucacugccguggguaaggaguucaaccaccuggaaaagcggauagaaaauuuaaacaaaaaggucgaugacggguuucuggauauuuggaccuacaaugcugagcuccuugugcuguuggaaaacgagcgcacacuagacuaucaugauagcaauguaaagaaccuguacgagaagguucgaucacagcucaaaaacaaugccaaggaaaucggcaacggauguuucgaguuuuaucacaagugcgacaauacuuguauggaaagugugaaaaacggcaccuacgauuauccuaaguacuccgaggaagcaaaacugaauagagaggagaucgacggggucaaacuugaaagcacaaggauuuaucaaauccuggccauuuacucuaccguggcuucaaguuugguccucgugguuagccugggagcgauauccuucuggaugugcucuaacgguucguuacagugccggaucuguauuuga

SEQ ID NO: 141747 - RNA, 1701 nt, Artificial Sequence; identical to SEQ ID NO: 137320
  derived and/or modified CDS sequence (opt3) from hemagglutinin__InfluenzaA__BAJ39952

SEQ ID NO: 141748 - RNA, 1701 nt, Artificial Sequence
  derived and/or modified CDS sequence (opt3) from hemagglutinin__InfluenzaA__BAJ39953
augaaggccauccuggugguccuccuuuacaccuucgcuacagcaaacgccgacacucugugcauuggcuaucacgcgaauaacagcacggauaccguugacacaguguuggagaaaaauguaacugugacccauuccgucaacuuacuggaagauaagcacaaugggaaacuauguaagcucagaggaguggcuccccugcaucuugguaaaugcaacauagccggcuggauccuggggaauccugagugugaaucuuugucaacagcaaguagcugguccuacauuguugagaccucuucgucagacaacggaacuugcuauccaggcgauuuuaucgacuacgaagaacucagggagcagcugagcaguguguccucuuucgaacgguuugagauuuucccgaagacaagcuccuggcccaaucacgauucaaacaagggugucaccgccgcuuguccucaugcaggggccaaaaguuuuuauaagaaucugaucuggcucgugaaaaagggaaacagcuacccaaaauuaucuaaguccuauauaaaugacaagggcaaagaaguacugguucuuuggggcauccaccaccccucaacgagcgcugaucaacagaguuuguaccagaacgccgacacuuacguguucgucgggaccucucgcuauuccaagaaauuuaagccugagauugcgauccgaccaaaagugcgugaucaggagggaagaaugaauuacuauuggacacugguggaacccggugacaagauuacuuucgaggcaaccggcaaccuagucguuccuagguacgccuuugcuauggaacggaacgccgggagcggaaucauaauuucggauacaccagugcaugacugcaauaccacgugucaaacuccgaaaggcgcaaucaacacaucucuccccuuccagaauauucacccuaucaccaucgguaagugcccaaaguauguaaaauccacuaagcugcgccuugcuacagggcugagaaacgugcccucaauucagaguaggggauuguuuggcgccauagcgggcuucaucgaagggggauggaccgguauggucgacggcugguacggguaucaucaccagaaugaacaaggaagcggcuacgccgcagaucucaaauccacgcagaacgcuauugacgagaucaccaauaaggugaacucuguuauagagaaaaugaauacacaguuuacugccguggguaaggaguucaaccaccuggagaagcggauugaaaauuuaaacaaaaaggucgaugacggguuccuggauaucuggaccuacaaugcuaaacuccuugugcuguuggagaacgaacgcacacuagacuaucaugauagcaauguaaagaaccuguacgagaaaguucgaucacagcucaagaacaaugccaaggagaucggcaacggauguuuugaguucuaucacaaaugcgacaauacuuguauggagagugugaagaacggcaccuacgauuauccuaaauacuccgaagaggcaaagcugaauagagaagagauugacggggucaaacuugagagcacaaggaucuaucaaauucuggccauauacucuaccguggcuucaaguuugguccucgugguuagccugggagcgaucuccuuuuggaugugcucuaacgguucguuacagugccggauuuguaucuga

SEQ ID NO: 141749 - RNA, 1701 nt, Artificial Sequence; identical to SEQ ID NO: 137320
  derived and/or modified CDS sequence (opt3) from hemagglutinin__InfluenzaA__BAJ39954

SEQ ID NO: 141750 - RNA, 1701 nt, Artificial Sequence
  derived and/or modified CDS sequence (opt3) from hemagglutinin__InfluenzaA__BAJ39955
augaaggccauccuggugguccuccuuuacaccuucgcuacagcaaacgccgacacucugagcauuggcuaucacgcgaauaacuccacggauaccguugacacaguguuggagaaaaauguaacugugacccauucugucaacuuacuggaagauaagcacaaugggaaacuaugcaagcucagaggaguggcuccccugcaucuugguaaauguaacauagccggcuggauccuggggaauccugagugcgaaucauugaguacagcaagcuccuggucuuacauuguugagaccucgucaagcgacaacggaacuuguuauccaggcgauuuuaucgacuacgaggagcucagggagcagcugaguuccgugucuagcuucgaacgguuugagauuuucccgaagacauccucauggcccaaucacgauaguaacaagggugucaccgccgcuugcccucaugcaggggccaagagcuuuuauaagaaucugaucuggcucgugaaaaagggaaacucuuacccaaaauuauccaagucauauauaaaugacaagggcaaagaaguacugguucuuuggggcauccaccaccccagcauuagugcugaucaacagucuuuguaccagaacgccgacacguacguguucgucgggacuucccgcuauagcaagaaauuuaagccugagaucgcgauucgaccaaaagugcgugaucaggagggaagaaugaauuacuauuggacccugguggaacccggugacaagaucacauucgaggcaacuggcaaccuagucguuccuagguacgccuuugcuauggaacggaacgccgggucgggaauaauuaucucugauaccccagugcaugacuguaauacaaccugccaaacgccgaaaggcgcaauuaacacuucccuccccuuccagaauauccacccuaucacaauugguaaguguccaaaguauguaaaaucaaccaagcugcgccuugcuacugggcugagaaacgugcccaguauacagagcaggggauuguuuggcgccaucgcgggcuucauugaagggggauggacagguauggucgacggcugguacggguaucaucaccagaaugaacaaggauccggcuacgccgcagaucucaaaucuacccagaacgcuaucgacgagauaacgaauaaggugaacagcguuauugagaaaaugaauacccaguuuacagccguggguaaggaguucaaccaccuggaaaagcggaucgaaaauuuaaacaaaaaggucgaugacggguuccuggauaucuggacuuacaaugcugagcuccuugugcuguuggaaaacgagcgcacccuagacuaucaugauucaaauguuaaaaaccuguacgagaagguacgaagucagcucaaaaacaaugccaaggaaauuggcaacggaugcuuugaguucuaucacaagugugacaauacaugcauggaauccgugaaaaacggcacuuacgauuauccuaaguacagcgaggaagcaaaacugaauagagaggagaucgacggggucaaacuugaaucuaccaggauuuaucaaauacuggccaucuacucaacaguggcuaguagcuugguccucgugguuucccugggagcgauuucuuuuuggauguguucgaacgguagcuuacagugcaaaaucugcaucuga

SEQ ID NO: 141751 - RNA, 1701 nt, Artificial Sequence; identical to SEQ ID NO: 141745
  derived and/or modified CDS sequence (opt3) from hemagglutinin__InfluenzaA__BAJ39956

SEQ ID NO: 141752 - RNA, 1701 nt, Artificial Sequence; identical to SEQ ID NO: 137320
  derived and/or modified CDS sequence (opt3) from hemagglutinin__InfluenzaA__BAJ39957

SEQ ID NO: 141753 - RNA, 1701 nt, Artificial Sequence
  derived and/or modified CDS sequence (opt3) from hemagglutinin__InfluenzaA__BAJ39958
augaaggccauccuggugguccuccuuuacaccuucgcuacagcaaacgccgacacucugugcauuggcuaucacgcgaauaacagcacggauaccguugacacaguguuggagaaaaauguaacugugacccauuccgucaacuuacuggaagauaagcacaaugggaaacuauguaagcucagaggaguggcuccccugcaucuugguaaaugcaacauagccggcuggauccuggggaauccugagugugaaucuuugucaacagcaaguagcugguccuacauuguugagaccucuucgucagacaacggaacuugcuauccaggcgauuuuaucgacuacgaggagcucagggagcagcugagcaguguguccucuuucgaacgguuugagauuuucccgaagacaagcuccuggcccaaucacgauucaaacaagggugucaccgccgcuuguccucaugcaggggccaaaaguuuuuauaagaaucugaucuggcucgugaaaaagggaaacagcuacccaaaauuaucuaaguccuauauaaaugacaagggcaaagaaguacugguucuuuggggcauccaccaccccucaacgagcgcugaucaacagaguuuguaccagaacgccgacgcguacguguucgucgggacuucucgcuauuccaagaaauuuaagccugagauugcaauccgaccaaaagugcgugaucaggagggaagaaugaauuacuauuggacccugguggaacccggugacaagauuacauucgaggccacuggcaaccuagucguuccuagguacgcuuuugccauggaacggaacgcagggagcggaaucauaauuucggauaccccagugcaugacugcaauacaaccugucaaacgccgaaaggcgcuaucaacacuucucuccccuuccagaauauucacccuaucacaaucgguaagugcccaaaguauguaaaauccaccaagcugcgccuugccacugggcugagaaacgugcccucaauucagaguaggggauuguuuggcgcgauagccggcuucaucgaagggggauggacagguauggucgacggcugguacggguaucaucaccagaaugaacaaggaagcggcuacgcagcugaucucaaauccacccagaacgccauugacgagaucacgaauaaggugaacucuguuauagagaaaaugaauacccaguuuacagcuguggguaaggaguucaaccaccuggaaaagcggauugaaaauuuaaacaaaaaggucgaugacggguuccuggauaucuggacuuacaaugccgagcuccuugugcuguuggaaaacgagcgcacccuagacuaucaugauagcaauguaaagaaccuguacgagaagguuaaaucacagcucaagaacaaugcaaaggaaaucggcaacggauguuuugaguucuaucacaaaugcgacaauacauguauggaaagugugaagaacggcacuuacgauuauccuaaauacuccaaggaggccaaacugaaucgagaaaagauugacggggucaaacuugagagcaccagaaucuaucaaauucuggcuauauacucuacaguggcgucaaguuugguccucgugguuagccugggagcaaucuccuuuuggaugugcucuaacgguucguuacagugcaggauuuguaucuga

SEQ ID NO: 141754 - RNA, 1701 nt, Artificial Sequence
  derived and/or modified CDS sequence (opt3) from hemagglutinin__InfluenzaA__BAJ39959
augaaggccauccuggugguccuccuuuacaccuucgcuacagcaaacgccgacacucugugcauuggcuaucacgcgaauaacagcacggauaccguugacacaguguuggagaaaaauguaacugugacccauuccgucaacuuacuggaagauaagcacaaugggaaacuauguaagcucagaggaguggcuccccugcaucuugguaaaugcaacauagccggcuggauccuggggaauccugagugugaaucuuugucaacagcaaguagcugguccuacauuguugagaccucuucgucagacaacggaacuugcuauccaggcgauuuuaucgacuacgaggagcucagggagcagcugagcaguguguccucuuucgaacgguuugagauuuucccgaagacaagcuccuggcccaaucacgauucaaacaagggugucaccgccgcuuguccucaugcaggggccaaaaguuuuuauaagaaucugaucuggcucgugaaaaagggaaacagcuacccaaaauuaucuaaguccuauauaaaugacaagggcaaagaaguacugguucuuuggggcauccaccaccccucaacgagcgcugaucaacagaguuuguaccagaacgccgacgcguacguguucgucgggacuucucgcuauuccaagaaauuuaagccugagauugcaauccgaccaaaagugcgugaucaggagggaagaaugaauuacuauuggacccugguggaacccggugacaagauuacauucgaggccacuggcaaccuagucguuccuagguacgcuuuugccauggaacggaacgcagggagcggaaucauaauuucggauaccccagugcaugacugcaauacaaccugucaaacgccgaaaggcgcuaucaacacuucucuccccuuccagaauauucacccuaucacaaucgguaagugcccaaaguauguaaaauccaccaagcugcgccuugccacugggcugagaaacgugcccuuuauucagucaaggggauuguucggcgcgauagccggcuuuaucgaagggggauggacagguauggucgacggcugguacggguaucaucaccagaaugaacaaggaaguggcuacgcagcugaucucaaaagcacccagaacgccauugacgagaucacgaauaaggugaacuccguuauagagaaaaugaauacccaguucacagcuguggguaaggaguucaaccaccuggaaaagcggauugaaaauuuaaacaaaaaggucgaugacggguuucuggauaucuggacuuacaaugccgagcuccuugugcuguuggaaaacgagcgcacccuagacuaucaugauucuaauguaaagaaccuguacgagaagguuaaaagccagcucaagaacaaugcaaaggaaaucggcaacggauguuucgaguuuuaucacaaaugcgacaauacauguauggaaucagugaagaacggcacuuacgauuauccuaaauacaguaaggaggccaaacugaaucgagaagagauugacggggucaaacuugaguccaccagaaucuaucaaauucuggcuauauacagcacaguggcgucuucauugguccucgugguuagucugggagcaaucagcuucuggaugugcuccaacgguucuuuacagugcaggauuuguaucuga

SEQ ID NO: 141755 - RNA, 1701 nt, Artificial Sequence; identical to SEQ ID NO: 130717
  derived and/or modified CDS sequence (opt3) from hemagglutinin__InfluenzaA__BAJ39960

SEQ ID NO: 141756 - RNA, 1701 nt, Artificial Sequence; identical to SEQ ID NO: 131346
  derived and/or modified CDS sequence (opt3) from hemagglutinin__InfluenzaA__BAJ39961

SEQ ID NO: 141757 - RNA, 1701 nt, Artificial Sequence
  derived and/or modified CDS sequence (opt3) from hemagglutinin__InfluenzaA__BAJ39962
augaaggccauccuggugguccuccuuuacaccuucgcuacagcaaacgccgacacucugugcauuggcuaucacgcgaauaacagcacggauaccguugacacaguguuggagaagaauguaacugugacccauuccgucaacuuacuggaagauaagcacaaugggaaacuauguaagcucagaggaguggcuccccugcaucuugguaaaugcaacauagccggcuggauccuggggaauccugagugugaaucuuugucaacagcaaguagcugguccuacauugccgagaccucuucgucagacaacggaacuugcuauccaggcgauuuuaucgacuacgaggagcucagggagcagcugagcaguguuuccucuuucgaacgguuugagauuuucccgaagacaagcuccuggcccaaucacgauucaaacaagggugugaccgcugcauguccucaugccggggcuaaaaguuuuuauaagaaucugacguggcucgucaaaaagggaaacagcuacccaaaauuaucuaaguccuauaucaaugacaagggcaaagaagugcugguacuuuggggcauacaccaccccucaacuagcgccgaucaacagaguuuguaccagaacgcggacgcauacguuuucguggggaccucucgcuauuccaagaaauuuaagccugagaucgccauucgaccaaaaguccgugaucaggagggaagaaugaauuacuauuggacacugguggaacccggugacaagaucacuuucgaggcuaccggcaaccuaguggucccuagguacgccuuugcaauggaacggaacgcugggagcggaauuaucauaucggauacaccaguucaugacugcaauaccacgugucaaacuccgaaaggcgccauuaacacaucucuccccuuccagaauauccacccuauuaccaucgguaagugcccaaaguaugugaaauccacuaagcugcgccuugcgacagggcugagaaacguacccuuuauccagucaaggggauuguucggcgccauugcaggcuuuauagaagggggauggaccgguaugguggacggcugguacggguaucaucaccagaaugaacaaggaaguggcuacgcugccgaucucaaaagcacgcagaacgcuaucgacgagauuaccaauaaggucaacuccgugaucgagaaaaugaauacacaguucacugccguugguaaggaguucaaccaccuggaaaagcggauagaaaauuuaaacaaaaagguggaugacggguuucuggauauuuggaccuacaaugcagagcuccuuguccuguuggaaaacgagcgcacacuagacuaucaugauucuaaugugaaaaaccuguacgagaagguaaaaagccagcucaagaacaaugccaaggaaaucggcaacggauguuucgaguuuuaucacaaaugcgacaauacuuguauggaaucaguuaagaacggcaccuacgauuauccuaaauacaguaaggaggcuaaacugaaucgagaagagaucgacggggugaaacuugaguccacaagaauuuaucaaauccuggcgauuuacagcaccgucgcaucuucauuggugcucgucgugagucugggagccaucagcuucuggaugugcuccaacgguucuuuacagugcaggauauguauuuga

SEQ ID NO: 141758 - RNA, 1701 nt, Artificial Sequence; identical to SEQ ID NO: 130717
  derived and/or modified CDS sequence (opt3) from hemagglutinin__InfluenzaA__BAJ39963

SEQ ID NO: 141759 - RNA, 1701 nt, Artificial Sequence; identical to SEQ ID NO: 137320
  derived and/or modified CDS sequence (opt3) from hemagglutinin__InfluenzaA__BAJ39964

SEQ ID NO: 141760 - RNA, 1701 nt, Artificial Sequence; identical to SEQ ID NO: 130717
  derived and/or modified CDS sequence (opt3) from hemagglutinin__InfluenzaA__BAJ39965

SEQ ID NO: 141761 - RNA, 1701 nt, Artificial Sequence; identical to SEQ ID NO: 130717
  derived and/or modified CDS sequence (opt3) from hemagglutinin__InfluenzaA__BAJ39966

SEQ ID NO: 141762 - RNA, 1701 nt, Artificial Sequence
  derived and/or modified CDS sequence (opt3) from hemagglutinin__InfluenzaA__BAJ39967
augaaggccauccuggugguccuccuuuacaccuucgcuacagcaaacgccgacacucugugcauuggcuaucacgcgaauaacagcacggauaccguugacacaguguuggagaaaaauguaacugugacccauuccgucaacuuacuggaagauaagcacaaugggaaacuauguaagcucagaggaguggcuccccugcaucuugguaaaugcaacauagccggcuggauccuggggaauccugagugugaauugcucucuacagcaucaaguuggagcuacauuguugagaccuccucuucggacaacggaacuugcuauccaggcgauuuuaucgacuacgaggagcugagggagcagcugucaagcgugaguuccuucgaacgguuugagauuuucccgaagacaucuagcuggcccaaucacgauuccgacaagggugucaccgccgcuuguccucaugcaggggccaaaucauuuuauaagaaccucaucugguuagugaaaaagggaaauaguuacccaaaacugagcaagucuuauauaaacgauaagggcaaagaaguacuuguuuuguggggcauccaccaccccuccacgucagcugaccaacagagccuguaccagaaugccgaugcguacguguucgucgggacuucccgcuauucuaagaaauuuaagccugagauugcaauccgaccaaaagugcgugaccaggagggaagaaugaacuacuauuggacccuaguggaacccggugauaagauuacauucgaggccacuggcaaucucgucguuccuagguacgcuuuugccauggaacggaacgcaggguccggaaucauaauuagcgacaccccagugcaugacugcaacacaaccugucaaacgccgaaaggcgcuaucaauacuucgcugcccuuccagaacauucacccuaucacaaucgguaagugcccaaaguauguaaaaucuaccaagcugcgccuugccacuggguugagaaaugugcccuccauucagucaaggggacucuuuggcgcgauagccggcuucaucgaagggggauggacagguauggucgauggcugguacggguaucaucaccagaacgaacaaggaaguggcuacgcagcugaccugaaaagcacccagaaugccauugaugagaucacgaacaaggugaauaguguuauagagaaaaugaacacccaguuuacagcuuuagguaaggaguucaaucaccuggaaaagaaaauugaaaaccucaauaagaaaguggacgauggguuccuugacaucuggacuuacaacgccgagcuguugguccuacuggaaaaugagcggacccucgauuaucaugacucuaacgugaagaaucuguacgagaaaguacgcagccagcuuaagaacaacgcaaaggaaaucggcaauggauguuuugaguucuaucacaaaugcgauaacacauguauggaaucaguuaagaauggcacuuacgacuauccuaaauacagugaggaagccaagcugaaccgagaggagauugauggggugaaauuggaauccaccagaaucuaucaaauucucgcuauauacagcacagucgcgucuucacugguguuagucgugagucugggagcaaucagcuuuuggaugugcuccaaugguucucuacagugcaggauuuguaucuga

SEQ ID NO: 141763 - RNA, 1701 nt, Artificial Sequence; identical to SEQ ID NO: 136245
  derived and/or modified CDS sequence (opt3) from hemagglutinin__InfluenzaA__BAJ39968

SEQ ID NO: 141764 - RNA, 1701 nt, Artificial Sequence; identical to SEQ ID NO: 137320
  derived and/or modified CDS sequence (opt3) from hemagglutinin__InfluenzaA__BAJ39969

SEQ ID NO: 141765 - RNA, 1701 nt, Artificial Sequence; identical to SEQ ID NO: 130717
  derived and/or modified CDS sequence (opt3) from hemagglutinin__InfluenzaA__BAJ39970

SEQ ID NO: 141766 - RNA, 1701 nt, Artificial Sequence; identical to SEQ ID NO: 130717
  derived and/or modified CDS sequence (opt3) from hemagglutinin__InfluenzaA__BAJ39971

SEQ ID NO: 141767 - RNA, 1701 nt, Artificial Sequence; identical to SEQ ID NO: 131346
  derived and/or modified CDS sequence (opt3) from hemagglutinin__InfluenzaA__BAJ39972

SEQ ID NO: 141768 - RNA, 1701 nt, Artificial Sequence
  derived and/or modified CDS sequence (opt3) from hemagglutinin__InfluenzaA__BAJ39973
augaaggccauccuggugguccuccuuuacaccuucgcuacagcaaacgccgacacucugugcauuggcuaucacgcgaauaacagcacggauaccguugacacaguguuggagaaaaauguaacugugacccauuccgucaacuuacuggaagauaagcacaaugggaaacuauguaagcucagaggaguggcuccccugcaucuugguaaaugcaacauagccggcuggauccuggggaauccugagugugaaucuuugucaacagcaaguagcugguccuacauuguugagaccucuucgucagacaacggaacuugcuauccaggcgauuuuaucgacuacgaggagcucagggagcagcugagcaguguguccucuuucgaacgguuugagauuuucccgaagacaagcuccuggcccaaucacgauucaaacaagggugucaccgccgcuuguccucaugcaggggccaaaaguuuuuauaagaaucugaucuggcucgugaaaaagggaaacagcuacccaaaauuaucuaaguccuauauaaaugacaagggcaaagaaguacugguucuuuggggcauccaccaccccucaacgagcgcugaucaacagaguuuguaccagaacgccgacacuuacguguucgucgggaccucucgcuauuccaagaaauuuaagccugagauugcgauccgaccaaaagugcgugaucaggagggaagaaugaauuacuauuggacacugguggaacccggugacaagauuacuuucgaggcaaccggcaaccuagucguuccuagguacgccuuugcuauggaacggaacgccgggagcggaaucauaauuucggauacaccagugcaugacugcaauaccacgugucaaacuccgaaaggcgcaaucaacacaucucuccccuuccagaauauucacccuaucaccaucgguaagugcccaaaguauguaaaauccacuaagcugcgccuugcuacagggcugagaaacgugcccucaauucagaguaggggauuguuuggcgccauagcgggcuucaucgaagggggauggaccgguauggucgacggcugguacggguaucaucaccagaaugaacaaggaagcggcuacgccgcagaucucaaauccacgcagaacgcuauugacgagaucaccaauaaggugaacucuguuauagagaaaaugaauacacaguuuacugccguggguaaggaguucaaccaccuggaaaagcggauugaaaauuuaaacaaaaaggucgaugacggguuccuggauaucuggaccuacaaugcugagcuccuugugcuguuggaaaacgagcgcacacuagacuaucaugauagcaauguuaaaaaccuguacgagaagguaaaaucacagcucaagaacaaugccaaggaaaucggcaacggauguuuugaguucuaucacaaaugcgacaauacuuguauggaaagugugaagaacggcaccuacgauuauccuaaauacuccgaggaagcaaagcugaaucgagaggagauugacggggucaaacuugaaagcacaagaaucuaucaaauucuggccauauacucuaccguggcuucaaguuugguccucgugguuagccugggagcgaucuccuuuuggaugugcucuaacgguucguuacagugcaggauuuguaucuga

SEQ ID NO: 141769 - RNA, 1701 nt, Artificial Sequence; identical to SEQ ID NO: 130717
  derived and/or modified CDS sequence (opt3) from hemagglutinin__InfluenzaA__BAJ39974

SEQ ID NO: 141770 - RNA, 1701 nt, Artificial Sequence; identical to SEQ ID NO: 131286
  derived and/or modified CDS sequence (opt3) from hemagglutinin__InfluenzaA__BAJ39975

SEQ ID NO: 141771 - RNA, 1701 nt, Artificial Sequence
  derived and/or modified CDS sequence (opt3) from hemagglutinin__InfluenzaA__BAJ39976
augaaggccauccuggugguccuccuuuacaccuucgcuacagcaaacgccgacacucugugcauuggcuaucacgcgaauaacagcacggauaccguugacacaguguuggagaaaaauguaacugugacccauuccgucaacuuacuggaagauaagcacaaugagaaacuauguaagcucagagggguggcuccccugcaucuuggaaaaugcaacauagccgguuggauccugggcaauccugaaugugagucuuugucaacagcaaguagcugguccuacauuguugaaaccucuucgucagacaacgggacuugcuauccaggagauuuuaucgacuacgaggagcucagggaacagcugagcaguguguccucuuucgagcgguuugaaauuuucccgaagacaagcuccuggcccaaucacgauucaaacaagggcgucaccgccgcuuguccucaugccggugcaaaaaguuuuuauaagaaucugaucuggcucgugaaaaaggggaacagcuacccaaaauuaucuaaguccuauauaaaugacaagggaaaagagguacugguucuuuggggcauccaccaccccucaacgagcgcugaucaacagaguuuguaccagaacgccgacgcguacguguucgucggcacuucucgcuauuccaagaaauuuaagccugagauugcaauccgaccaaaagugcgugaucaggaagggagaaugaauuacuauuggacccugguggagcccggagacaagauuacauucgaagccacugguaaccuagucguuccuagguacgcuuuugccauggagcggaacgcaggcagcgggaucauaauuucggauaccccagugcaugacugcaauacaaccugucaaacgccgaaaggagcuaucaacacuucucuccccuuccagaauauucacccuaucacaaucggcaagugcccaaaguauguaaaauccaccaagcugcgccuugccacuggucugagaaacgugcccucaauucagaguaggggguuguuuggagcgauagccggcuucaucgaaggcggguggacaggaauggucgacgguugguacggcuaucaucaccagaaugagcaagggagcggauacgcagcugaucucaaauccacccagaacgccauugacaagaucacgaauaaagugaacucuguuauagagaagaugaauacccaguuuacagcugugggcaaggaguucaaccaccuggaaaaacggauugaaaauuuaaacaagaaagucgaugacgguuuccuggauaucuggacuuacaaugccgagcuccuugugcuguuggaaaacgagcgcacccuagacuaucaugauagcaauguaaagaaccuguacgagaaaguucgaucacagcucaagaacaaugcaaaggaaaucgggaacggcuguuuugaguucuaucacaaaugcgacaauacauguauggaaagugugaagaacggaacuuacgauuauccuaaauacuccgaggaagccaagcugaauagagaggagauugacggcgucaaacuugaaagcaccaggaucuaucaaauucuggcuauauacucuacaguggcgucaaguuugguccucgugguuagccugggggcaaucaacuuuuggaugugcuccaauggaucuuuacagugccggauuuguaucuga

SEQ ID NO: 141772 - RNA, 1701 nt, Artificial Sequence; identical to SEQ ID NO: 130717
  derived and/or modified CDS sequence (opt3) from hemagglutinin__InfluenzaA__BAJ39977

SEQ ID NO: 141773 - RNA, 1701 nt, Artificial Sequence
  derived and/or modified CDS sequence (opt3) from hemagglutinin__InfluenzaA__BAJ39978
augaaggccauccuggugguccuccuuuacaccuucgcuacagcaaacgccgacacucugugcauuggcuaucacgcgaauaacagcacggauaccguugacacaguguuggagaaaaauguaacugugacccauuccgucaacuuacuggaagauaagcacaaugggaaacuauguaagcucagaggaguggcuccccugcaucuugguaaaugcaacauagccggcuggauccuggggaauccugagugugaaucuuugucaacagcaaguagcugguccuacauuguugagaccucuucgucagacaacggaacuugcuauccaggcgauuuuaucgacuacgaagaacucagggagcagcugagcaguguguccucuuucgaacgguuugagauuuucccgaagacaagcuccuggcccaaucacgauucaaacaagggugucaccgccgcuuguccucaugcaggggccaaaaguuuuuauaagaaucugaucuggcucgugaaaaagggaaacagcuacccaaaauuaucuaaguccuauauaaaugacaagggcaaagaaguacugguucuuuggggcauccaccaccccucaacgagcgcugaucaacagaguuuguaccagaacgccgacgcguacguguucgucgggacuucucgcuauuccaagaaauuuaagccugagauugcaauccgaccaaaagugcgugagcaggaaggaagaaugaauuacuauuggacccugguggagcccggugauaagauuacauucgaagccacuggcaaccuagucguuccuagguacgcuuuugccauggagcggaacgcagggagcggaaucauaauuucggacaccccagugcaugauugcaauacaaccugucaaacgccgaaaggcgcuaucaacacuucucuccccuuccagaauauucacuccaucacaaucgguaagugcccuaaguauguaaaaucaaccaagcugcgccuugccacugggcugagaaacgugccaaguauucagagcaggggauuguuuggcgcgauagccggcuucaucgaagggggauggacagguauggucgacggcugguacggguaucaucaccagaaugagcaaggauccggcuacgcagcugaccucaaaucuacccagaacgccauugaugagaucacgaauaaggugaacagcguuauagaaaagaugaauacccaguuuacagcuguggguaaggaguucaaccaccuggaaaagcggauugagaauuuaaacaaaaaggucgacgauggguuccuggacaucuggacuuacaaugccgaacuccuugugcuguuggagaacgagcgcacccuagauuaucaugacucaaauguuaaaaaccuguacgaaaagguaaaaagucagcucaagaacaaugcaaaggagaucggcaacggauguuuugaguucuaucacaaaugcgauaauacauguauggaguccgugaagaacggcacuuacgacuaucccaaauacagcgaagaggccaagcugaaucgagagaaaauugauggggucaaacuugaaucuaccagaaucuaucaaauucuggcuauauacucaacaguggcgaguagcuugguccucgugguuucccugggagcaaucucuuuuuggaugugcucgaacgguagcuuacagugcaggauuuguaucuga

SEQ ID NO: 141774 - RNA, 1701 nt, Artificial Sequence
  derived and/or modified CDS sequence (opt3) from hemagglutinin__InfluenzaA__BAJ39979
augaaggccauccuggugguccuccuuuacaccuucgcuacagcaaacgccgacacucugugcauuggcuaucacgcgaauaacagcacggauaccguugacacaguguuggagaaaaauguaacugugacccauuccgucaacuuacuggaagauaagcacaaugggaaacuauguaagcucagaggaguggcuccccugcaucuugguaaaugcaacauagccggcuggauccuggggaauccugagugugaauugcucucuacagcaucaaguuggagcuacauuguugagaccuccucuucggacaacggaacuugcuauccaggcgauuuuaucgacuacgaggagcugagggagcagcugucaagcgugaguuccuucgaacgguuugagauuuucccgaagacaucuagcuggcccaaucacgauuccgacaagggugucaccgccgcuuguccucaugcaggggccaaaucauuuuauaagaaccucaucugguuagugaaaaagggaaauaguuacccaaaacugagcaagucuuauauaaacgauaagggcaaagaaguacuuguuuuguggggcauccaccaccccuccacgucagcugaccaacagagccuguaccagaaugccgaugcguacguguucgucgggacuucccgcuauucuaagaaauuuaagccugagauugcaauccgaccaaaagugcgugaccaggagggaagaauggauuacuauuggacccuaguggaacccggugacaagauuacauucgaggccacuggcaaccucgucguuccuagguacgcuuuugccauggaacggaaugcaggguccggaaucauaauuagcgacaccccagugcauaacugcaacacaaccugucaaacgccgaaaggcgcuaucaauacuucgcugcccuuccagaacauucacccuaucacaaucgguaagugcccaaaguauguaaaaucuaccaaacuucgccuggccacuggguugagaaaugugcccuccauucagucaaggggacucuuuggcgcgauagccggcuucaucgaagggggauggacagguauggucgauggcugguacggguaucaucaccagaacgaacaaggaaguggcuacgcagcugaccugaaaagcacccagaaugccauugauaagaucacgaacaaagugaauaguguuauagagaagaugaacacccaguuuacagcuguggguaaggaguucaaucacuuagaaaaccggauugagaaucugaacaaaaaggucgacgauggguuccucgacaucuggacuuacaaugccgaacuucugguguugcuagagaacgaacgcacccuggauuaucaugacucuaauguaaagaaccucuacgagaagguucgaagccagcugaaaaacaaugcaaaggagaucggcaacggauguuuugaguucuaucacaagugcgauaauacauguauggaaucagugaaaaacggcacuuacgacuauccuaaguacagugaagaggccaaacuuaauagagaagagauugauggggucaagcuggaguccaccaggaucuaucaaauuuuggcuauauacagcacaguggcgucuucacucguccuggugguuaguuuaggagcaaucagcuuuuggaugugcuccaacgguucucugcagugccggauuuguaucuga

SEQ ID NO: 141775 - RNA, 1701 nt, Artificial Sequence; identical to SEQ ID NO: 137320
  derived and/or modified CDS sequence (opt3) from hemagglutinin__InfluenzaA__BAJ39980

SEQ ID NO: 141776 - RNA, 1701 nt, Artificial Sequence
  derived and/or modified CDS sequence (opt3) from hemagglutinin__InfluenzaA__BAJ39981
augaaggccauccuggugguccuccuuuacaccuucgcuacagcaaacgccgacacucugugcauuggcuaucacgcgaauaacagcacggauaccguugacacaguguuggagaaaaauguaacugugacccauuccgucaacuuacuggaagauaagcacaaugggaaacuauguaagcucagaggaguggcuccccugcaucuugguaaaugcaacauagccggcuggauccuggggaauccugagugugaaucuuugucaacagcaaguagcugguccuacauuguugagaccucuucgucagacaacggaacuugcuauccaggcgauuuuaucgacuacgaggagcucagggagcagcugagcaguguguccucuuucgaacgguuugagauuuucccgaagacaagcuccuggcccaaucacgauucaaacaagggugucaccgccgcuuguccucaugcaggggccaaaaguuuuuauaagaaucugaucuggcucgugaaaaagggaaacagcuacccaaaauuaucuaaguccuauauaaaugacaagggcaaagaaguacugguucuuuggggcauccaccaccccucaacgagcgcugaucaacagaguuuguaccagaacgccgacgcguacguguucgucgggacuucucgcuauuccaagaaauuuaagccugagauugcaauccgaccaaaagugcgugaucaggagggaagaaugaauuacuauuggacccugguggaacccggugacaagauuacauucgaggccacuggcaaccuagucguuccuagguacgcuuuugccauggaacggaacgcagggagcggaaucauaauuucggauaccccagugcaugacugcaauacaaccugucaaacgccgaaaggcgcuaucaacacuucucuccccuuccagaauauucacccuaucacaaucgguaagugcuccaaguauguaaaaucaaccaagcugcgccuugccacugggcugagaaacgugccaaguauucagagcaggggauuguuuggcgcgauagccggcuucaucgaagggggauggacagguauggucgacggcugguacggguaucaucaccagaaugaacaaggauccggcuacgcagcugaucucaaaucuacccagaacgccauugacgagaucacgaauaaggugaacagcguuauagagaaaaugaauacccaguuuacagcuguggguaaggaguucaaccaccuggaaaagcggauugaaaauuuaaacaaaaaggucgaugacggguuccuggauaucuggacuuacaaugccgagcuccuugugcuguuggaaaacgagcgcacccuagacuaucaugauucaaauguaaagaaccuguacgagaagguuaaaagucagcucaagaacaaugcaaaggaaaucggcaacggauguuuugaguucuaucacaaaugcgacaauacauguauggaauccgugaagaacggcacuuacgauuaucccaaauacagcaaggaggccaaacugaaucgagaaaagauugacggggucaaacuugagucuaccagaaucuaucaaauucuggcuauauacucaacaguggcgaguagcuugguccucgugguuucccugggagcaaucucuuuuuggaugugcucgaacgguagcuuacagugcaggauuuguaucuga

SEQ ID NO: 141777 - RNA, 1701 nt, Artificial Sequence
  derived and/or modified CDS sequence (opt3) from hemagglutinin__InfluenzaA__BAJ39982
augaaggccauccuggugguccuccuuuacaccuucgcuacagcaaacgccgcgacucugugcauuggcuaucacgcuaauaacagcacggacaccguugauacauuguuagagaaaaaugugacuguaacccauuccgugaaccugcuagaagacaagcacaaugggaaacucuguaagcugagaggagucgcaccccuucaucuggguaaaugcaacauagccggcuggaucuuggggaauccugagugugaaucucucucaacagccaguagcugguccuacauuguggagaccucuucgucagauaacggaacuugcuauccaggcgacuuuaucgauuacgaggagcugagggagcagcugagcaguguuuccucuuucgaacgguuugagauuuucccgaagacaagcuccuggcccaaucacgacucaaacaagggugugaccgcugcauguccucaugccggggcuaaaaguuuuuauaagaaucucaucugguuagucaaaaagggaaacagcuacccaaaacugucuaaguccuauauaaaugauaagggcaaagaagugcuuguauuguggggcauccaccaccccucaacgagcgccgaccaacagagucuguaccagaacgcggaugcauacguuuucguggggacuucucgcuauuccaagaaauuuaagccugagauugccauccgaccaaaaguccgugaccaggagggaagaaugaauuacuauuggacccuaguggaacccggugauaagauuacauucgaggcuacuggcaaccucguggucccuagguacgccuuugcaauggaacggaacgcugggagcggaaucauaauuucggacaccccaguucaugauugcaauacaaccugucaaacgccgaaaggcgccaucaacacuucucugcccuuccagaauauucacccuaucacaaucgguaagugcccaaaguaugugaaauccaccaaacuucgccuggcgacuggguugagaaacguacccucaauucagaguaggggacucuuuggcgccauagcaggcuucaucgaagggggauggacagguaugguggacggcugguacggguaucaucaccagaaugaacaaggaagcggcuacgcugccgaccugaaguccacccagaacgcuauugaugagaucacgaauaaggucaacucugugauagagaaaaugaauacccaguuuacagccguugguaaggaguucaaccacuuagaaaagcggauugaaaaucugaacaaaaagguggacgauggguuccucgacaucuggacuuacaaugcagagcuucuggucuugcuagaaaacgagcgcacccuggauuaucaugacagcaaugugaaaaaccucuacgagaagguacgaucacagcugaaaaacaaugccaaggaaaucggcaacggauguuuugaguucuaucacaagugcgauaauacauguauggaaaguguuaaaaacggcacuuacgacuauccuaaguacuccgaggaagcuaaacuuaauagagaggagauugauggggugaagcuggaaagcaccaggaucuaucaaauuuuggcgauauacucuacagucgcaucaagucucgugcuggucgugagcuuaggagccaucuccuuuuggaugugcucuaacgguucgcugcagugccggauuuguaucuga

SEQ ID NO: 141778 - RNA, 1701 nt, Artificial Sequence; identical to SEQ ID NO: 141745
  derived and/or modified CDS sequence (opt3) from hemagglutinin__InfluenzaA__BAJ39983

SEQ ID NO: 141779 - RNA, 1701 nt, Artificial Sequence
  derived and/or modified CDS sequence (opt3) from hemagglutinin__InfluenzaA__BAJ39984
augaaggccauccuggugguccuccuuuacaccuucgcuacagcaaacgccgacacucugugcauuggcuaucacgcgaauaacagcacggauaccguugacacaguguuggagaaaaauguaacugugacccauuccgucaacuuacuggaagauaagcacaaugggaaacuauguaagcucagaggaguggcuccccugcaucuugguaaaugcaacauagccggcuggauccuggggaauccugagugugaauugcucucuacagcaucaaguuggagcuacauuguugagaccuccucuucggacaacggaacuugcuauccaggcgauuuuaucgacuacgaggagcugagggagcagcugucaagcgugaguuccuucgaacgguuugagauuuucccgaagacaucuagcuggcccaaucacgauuccaacaagggugucaccgccgcuuguccucaugcaggggccaaaucauuuuauaagaaucucaucugguuagugaaaaagggaaacaguuacccaaaacugagcaagucuuauauaaaugacaagggcaaagaaguacuuguuuuguggggcauccaccaccccuccacgucagcugaucaacagagccuguaccagaacgccgacgcguacguguucgucgggacuucccgcuauucuaagaaauuuaagccugagauugcaauccgaccaaaagugcgugaucaggagggaagaaugaauuacuauuggacccuaguggaacccggugacaagauuacauucgaggccacuggcaaccucgucguuccuagguacgcuuuugccauggaacggaacgcaggguccggaaucauaauuagcgauaccccagugcauaauugcaacacaaccugucaaacgccgaaaggcgcuaucaauacuucgcugcccuuccagaacauucacccuaucacaaucgguaagugcccaaaguauguaaaaucuaccaagcugcgccuugccacuggguugagaaaugugcccuccauucagucaaggggacucuuuggcgcgauagccggcuucaucgaagggggauggacagguauggucgacggcugguacggguaucaucaccagaacgaacaaggaaguggcuacgcagcugaccugaaaagcacccagaaugccauugauaagaucacgaacaaagugaauaguguuauagagaagaugaacacccaguuuacagcuguggguaaggaguucaaucacuuagaaaaacggauugagaaccugaauaagaaagucgacgauggguuccucgacaucuggacuuacaacgccgaacuucugguguugcuagagaaugaacgcacccuggauuaucaugacucuaacguaaagaaccucuacgagaaaguucgaagccagcugaagaauaacgcaaaggagaucggcaauggauguuuugaguucuaucacaaaugcgauaacacauguauggaaucagugaagaauggcacuuacgacuauccuaaauacagugaagaggccaaacuuaacagagaagagauugauggggucaagcuggaguccaccaggaucuaucaaauuuuggcuauauacagcacaguggcgucuucacucguccuggugguuaguuuaggagcaaucagcuuuuggaugugcuccaaugguucucugcagugccggauuuguaucuga

SEQ ID NO: 141780 - RNA, 1701 nt, Artificial Sequence; identical to SEQ ID NO: 130717
  derived and/or modified CDS sequence (opt3) from hemagglutinin__InfluenzaA__BAJ39985

SEQ ID NO: 141781 - RNA, 1701 nt, Artificial Sequence
  derived and/or modified CDS sequence (opt3) from hemagglutinin__InfluenzaA__BAJ39987
augaagaccauccuggugguccuccuuuacacauucgccacugcuaacgcagacacgcugugcauuggcuaucacgccaauaacagcaccgauacaguugacacuguguuggagaaaaauguaaccgugacacauuccgucaacuuacuggaagauaagcacaaugggaaacuauguaagcucagaggaguggcgccccugcaucuugguaaaugcaacauagcuggcuggauccuggggaauccugagugugaaucuuugucaaccgccaguagcugguccuacauuguugagacuucuucgucagacaacggaacaugcuauccaggcgauuuuaucgacuacgaggagcucagggagcagcugagcaguguguccucuuucgaacgguuugagauuuucccgaagaccagcuccuggcccaaucacgauucaaacaagggugucacggcagccuguccucaugcuggggcaaaaaguuuuuauaagaaucugaucuggcucgugaaaaagggaaacagcuacccaaaauuaucuaaguccuauauaaaugacaagggcaaagaaguacugguucuuuggggcauccaccaccccucaacuagcgccgaucaacagaguuuguaccagaacgcugacaccuacguguucgucgggacaucucgcuauuccaagaaauuuaagccugagauugccauccgaccaaaagugcgugaucaggagggaagaaugaauuacuauuggacucugguggaacccggugacaagauuaccuucgaggcgacaggcaaccuagucguuccuagguacgcauuugccauggaacggaacgcugggagcggaaucauaauuucggauaccccagugcaugacugcaauacgacuugucaaacaccgaaaggcgccaucaacaccucucuccccuuccagaauauucacccuaucacuaucgguaagugcccaaaguauguaaaauccacaaagcugcgccuugcaaccgggcugagaaacgugcccucaauucagaguaggggauuguuuggcgcuauagccggcuucaucgaagggggauggacggguauggucgacggcugguacggguaucaucaccagaaugaacaaggaagcggcuacgcggccgaucucaaauccacccagaacgcaauugacgagaucacaaauaaggugaacucuguuauagagaaaaugaauacucaguuuaccgcuguggguaaggaguucaaccaccuggaaaagcggauugaaaauuuaaacaaaaaggucgaugacggguuccuggauaucuggacauacaaugccgagcuccuugugcuguuggaaaacgagcgcacucuagacuaucaugauagcaauguuaaaaaccuguacgagaagguacgaucacagcucaaaaacaaugcuaaggaaaucggcaacggauguuuugaguucuaucacaagugcgacaauaccuguauggaaagugugaaaaacggcacauacgauuauccuaaguacuccaaagaggccaagcugaauagagaagagauugacggggucaaacuugagagcaccaggaucuaucaaauucuggcaauauacucuacuguggccucaaguuugguccucgugguuagccugggagcuaucuccuuuuggaugugcucuaacgguucguuacagugccggauuuguaucuga

SEQ ID NO: 141782 - RNA, 1701 nt, Artificial Sequence
  derived and/or modified CDS sequence (opt3) from hemagglutinin__InfluenzaA__BAJ39988
augaaggccauccuggugguccuccuuuacaccuucgcuacagcaaacgccgacacucugugcauuggcuaucacgcgaauaacagcacggauaccguugacacaguguuggagaaaaauguaacugugacccauuccgucaacuuacuggaagauaagcacaaugggaaacuauguaagcucagaggaguggcuccccugcaucuugguaaaugcaacauagccggcuggauccuggggaauccugagugugaaucuuugucaacagcaaguagcugguccuacauuguugagaccucuucgucagacaacggaacuugcuauccaggcgauuuuaucgacuacgaggagcucagggagcagcugagcaguguguccucuuucgaacgguuugagauuuucccgaagacaagcuccuggcccaaucacgauucaaacaagggugucaccgccgcuuguccucaugcaggggccaaaaguuuuuauaagaaucugaucuggcucgugaaaaagggaaacagcuacccaaaauuaucuaaguccuauauaaaugacaagggcaaagaaguacugguucuuuggggcauccaccaccccucaacgagcgcugaucaacagaguauuuaccagaacgccgacgcguacguguucgucgggacuucucgcuauuccaagaaauuuaagccugagaucgcaauucgaccaaaagugcgugaucaggagggaagaaugaauuacuauuggaccuugguggaacccggugacaagaucacauucgaggccacuggcaaccuggucguuccuagguacgcuuuugccauggaacggaacgcagggagcggaauaauuaucucggauaccccagugcaugacugcaauacaaccugucaaacgccgaaaggcgcuauuaacacuucucuacccuuccagaauauccacccuaucacaauugguaagugcuccaaguauguaaaaucaaccaagcuccgccuggccacugggcuuagaaacgugccaaguauacagagcaggggacuguuuggcgcgaucgccggcuucauugaagggggauggacagguauggucgacggcugguacggguaucaucaccagaaugaacaaggauccggcuacgcagcugauuugaaaucuacccagaacgccaucgacgagauaacgaauaaggugaacagcguuauugagaaaaugaauacccaguuuacagcuguggguaaggaguucaaccaccucgaaaagcggaucgaaaaucugaacaaaaaggucgaugacggguucuuagauaucuggacuuacaaugccgagcugcucgugcuucuggaaaacgagcgcaccuuggacuaucaugauucaaauguuaaaaaccuauacgagaagguacgaagucagcugaaaaacaaugcaaaggaaauuggcaacggauguuuugaguucuaucacaagugcgacaauacauguauggaauccgugaaaaacggcacuuacgauuaucccaaguacagcgaggaagccaaacucaauagagaggagaucgacggggucaagcuggaaucuaccaggauuuaucaaauacuugcuaucuacucaacaguggcgaguagccuggucuuggugguuucccucggagcaauuucuuuuuggaugugcucgaacgguagccugcagugccggaucuguaucuga

SEQ ID NO: 141783 - RNA, 1701 nt, Artificial Sequence; identical to SEQ ID NO: 132031
  derived and/or modified CDS sequence (opt3) from hemagglutinin__InfluenzaA__BAJ39989

SEQ ID NO: 141784 - RNA, 1701 nt, Artificial Sequence; identical to SEQ ID NO: 130717
  derived and/or modified CDS sequence (opt3) from hemagglutinin__InfluenzaA__BAJ39990

SEQ ID NO: 141785 - RNA, 1701 nt, Artificial Sequence; identical to SEQ ID NO: 130717
  derived and/or modified CDS sequence (opt3) from hemagglutinin__InfluenzaA__BAJ39993

SEQ ID NO: 141786 - RNA, 1701 nt, Artificial Sequence
  derived and/or modified CDS sequence (opt3) from hemagglutinin__InfluenzaA__BAJ39994
augaaggccauccuggugguccuccuuuacaccuucgcuacagcaaacgccgacacucugugcauuggcuaucacgcgaauaacagcacggauaccguugacacaguguuggagaaaaauguaacugugacccauuccgucaacuuacuggaagauaagcacaaugggaaacuauguaagcucagaggaguggcuccccugcaucuugguaaaugcaacauagccggcuggauccuggggaauccugagugugaaucuuugucaacagcaaguagcugguccuacauuguugagaccucuucgucagacaacggaacuugcuauccaggcgauuuuaucgacuacgaggagcucagggagcagcugagcaguguguccucuuucgaacgguuugagauuuucccgaagacaagcuccuggcccaaucacgauucaaacaagggugucaccgccgcuuguccucaugcaggggccaaaaguuuuuauaagaaucugaucuggcucgugaaaaagggaaacagcuacccaaaauuaucuaaguccuauauaaaugacaagggcaaagaaguacugguucuuuggggcauccaccaccccucaacgagcgcugaucaacagaguuuguaccagaacgccgacacuuacguguucgucgggaccucucgcuauuccaagaaauuuaagccugagauugcgauccgaccaaaagugcgugaucaggagggaagaaugaauuacuauuggacacugguggaacccggugacaagauuacuuucgaggcaaccggcaaccuagucguuccuagguacgccuuugcuauggaacggaacgccgggagcggaaucauaauuucggauacaccagugcaugacugcaauaccacgugucaaacuccgaaaggcgcaaucaacacaucucuccccuuccagaauauucacccuaccacuaucgguaagugcccaaaguauguaaaauccacaaagcugcgccuugcuaccgggcugagaaacgugcccucaauccagaguaggggauuguuuggcgccauugcgggcuucauagaagggggauggacggguauggucgacggcugguacggguaucaucaccagaaugaacaaggaagcggcuacgccgcagaucucaaauccacccagaacgcuaucgacgagauuacaaauaaggugaacucuguuaucgagaaaaugaauacucaguuuaccgccguggguaaggaguucaaccaccuggaaaagcggauagaaaauuuaaacaaaaaggucgaugacggguuccuggauauuuggacauacaaugcugagcuccuugugcuguuggaaaacgagcgcacucuagacuaucaugauagcaauguaaagaaccuguacgagaagguuaaaucacagcucaagaacaaugccaaggaaaucggcaacggauguuuugaguucuaucacaaaugcgacaauaccugucuggaaagugugaagaacggcacauacgauuauccuaaauacuccgaggaagcaaaacuuaaucgagagaaaaucgacggggucaagcuggagagcaccagaauuuaucaaaucuuggccauuuacucuacuguggcuucaagucucguccuggugguuagcuuaggagcgauauccuuuuggaugugcucuaacgguucgcugcagugcaggaucuguauuuga

SEQ ID NO: 141787 - RNA, 1701 nt, Artificial Sequence; identical to SEQ ID NO: 130717
  derived and/or modified CDS sequence (opt3) from hemagglutinin__InfluenzaA__BAJ39996

SEQ ID NO: 141788 - RNA, 1701 nt, Artificial Sequence
  derived and/or modified CDS sequence (opt3) from hemagglutinin__InfluenzaA__BAJ39997
augaaggccauccuggugguccuccuuuacaccuucgcuacagcaaacgccgacacucugugcauuggcuaucacgcgaauaacagcacggauaccguugacacaguguuggagaaaaauguaacugugacccauuccgucaacuuacuggaagauaagcacaaugggaaacuauguaagcucagaggaguggcuccccugcaucuugguaaaugcaacauagccggcuggauccuggggaauccugagugugaaucuuugucaacagcaaguagcugguccuacauuguugagaccucuucgucagacaacggaacuugcuauccaggcgauuuuaucgacuacgaggagcucagggagcagcugagcaguguguccucuuucgaacgguuugagauuuucccgaagacaagcuccuggcccaaucacgauucaaacaagggugucaccgccgcuuguccucaugcaggggccaaaaguuuuuauaagaaucugaucuggcucgugaaaaagggaaacagcuacccaaaauuaucuaaguccuauauaaaugacaagggcaaagaaguacugguucuuuggggcauccaccaccccucaacgagcgcugaucaacagaguuuguaccagaacgccgacacuuacguguucgucgggaccucucgcuauuccaagaaauuuaagccugagauugcgauccgaccaaaagugcgugaucaggagggaagaaugaauuacuauuggacacugguggaacccggugacaagauuacuuucgaggcaaccggcaaccuagucguuccuagguacgccuuugcuauggaacggaacgccgggagcggaaucauaauuucggauacaccagugcaugacugcaauaccacgugucaaacuccgaaaggcgcaaucaacacaucucuccccuuccagaauauucacccuaccacuaucgguaagugcccaaaguauguaaaauccacaaagcugcgccuugcuaccgggcugagaaacgugcccucaauccagaguaggggauuguuuggcgccauugcgggcuucauagaagggggauggacggguauggucgacggcugguacggguaucaucaccagaaugaacaaggaagcggcuacgccgcagaucucaaauccacccagaacgcuaucgacgagauuacaaauaaggugaacucuguuaucgagaaaaugaauacucaguuuaccgccguggguaaggaguucaaccaccuggaaaagcggauagaaaauuuaaacaaaaaggucgaugacggguuccuggauauuuggacauacaaugcugagcuccuugugcuguuggaaaacgagcgcacucuagacuaucaugauagcaauguaaagaaccuguacgagaagguucgaucacagcucaaaaacaaugccaaggaaaucggcaacggauguuuugaguucuaucacaagugcgacaauaccuguauggaaagugugaaaaacggcacauacgauuauccuaaguacuccgaggaagcaaaacugaauagagaggagaucgacggggucaaacuugaaagcaccaggauuuaucaaauccuggccauuuacucuacuguggcuucaaguuugguccucgugguuagccugggagcgauauccuuuuggaugugcucuaacgguucguuacagugccggaucuguauuuga

SEQ ID NO: 141789 - RNA, 1701 nt, Artificial Sequence; identical to SEQ ID NO: 130717
  derived and/or modified CDS sequence (opt3) from hemagglutinin__InfluenzaA__BAJ39998

SEQ ID NO: 141790 - RNA, 1701 nt, Artificial Sequence
  derived and/or modified CDS sequence (opt3) from hemagglutinin__InfluenzaA__BAJ39999
augaaggccauccuggugguccuccuuuacaccuucgcuacagcaaacgccgacacucugugcauuggcuaucacgcgaauaacagcacggauaccguugacacaguguuggagagaaauguaacugugacccauuccgucaacuuacuggaagauaaacacaaugggaagcuauguaaacucaggggaguggcuccccugcaucuugguaagugcaacauagccggcuggauccuggggaauccugagugugaaucuuugucaacagcaaguagcugguccuacauuguugagaccucuucgucagacaacggaacuugcuauccaggcgauuuuaucgacuacgaggagcuccgggagcagcugagcaguguguccucuuucgaacgcuuugagauuuucccgaaaacaagcuccuggcccaaucacgauucaaacaagggugucaccgccgcuuguccucaugcaggggccaagaguuuuuauaaaaaucugaucuggcucgugaagaaaggaaacagcuacccaaaguuaucuaaauccuauauaaaugacaagggcaaggaaguacugguucuuuggggcauccaccaccccucaacgagcgcugaucaacagaguuuguaccagaacgccgacacuuacguguucgucgggaccucucgauauuccaaaaaguuuaaaccugagauugcgauccguccaaaggugagagaucaggagggaaggaugaauuacuauuggacacugguggaacccggugacaaaauuacuuucgaggcaaccggcaaccuagucguuccucgguacgccuuugcuauggaacgcaacgccgggagcggaaucauaauuucggauacaccagugcaugacugcaauaccacgugucaaacuccgaagggcgcaaucaacacaucucuccccuuccagaauauucacccuaucaccaucgguaaaugcccaaaguauguaaaguccacuaaacugagacuugcuacagggcugaggaacgugcccucaauucagagucggggauuguuuggcgccauagcgggcuucaucgaagggggauggaccgguauggucgacggcugguacggguaucaucaccagaaugaacaaggaagcggcuacgccgcagaucucaaguccacgcagaacgcuauugacgagaucaccaauaaagugaacucuguuauagagaagaugaauacacaguuuacugccguggguaaagaguucaaccaccuggaaaagcgcauugaaaauuuaaacaagaaagucgaugacggguuccuggauaucuggaccuacaaugcugagcuccuugugcuguuggaaaacgagcgaacacuagacuaucaugauagcaauguaaagaaccuguacgagaaaguuagaucacagcucaagaacaaugccaaagaaaucggcaacggauguuuugaguucuaucacaagugcgacaauacuuguauggaaagugugaagaacggcaccuacgauuauccuaaauacuccgaggaagcaaagcugaauagggaggagauugacggggucaaacuugaaagcacacggaucuaucaaauucuggccauauacucuaccguggcuucaaguuugguccucgugguuagccugggagcgaucuccuuuuggaugugcucuaacgguucguuacagugccguauuuguaucuga

SEQ ID NO: 141791 - RNA, 1701 nt, Artificial Sequence
  derived and/or modified CDS sequence (opt3) from hemagglutinin__InfluenzaA__BAJ40000
augaagaccauccuggugguccuccuuuacacauucgccacugcuaacgcagacacgcugugcauuggcuaucacgccaauaacagcaccgauacaguugacacuguguuggagaaaaauguaaccgugacacauuccgucaacuuacuggaagauaagcacaaugggaaacuauguaagcucagaggaguggcgccccugcaucuugguaaaugcaacauagcuggcuggauccuggggaauccugagugugaaucuuugucaaccgccaguagcugguccuacauuguugagacuucuucgucagacaacggaacaugcuauccaggcgauuuuaucgacuacgaggagcucagggagcagcugagcaguguguccucuuucgaacgguuugagauuuucccgaagaccagcuccuggcccaaucacgauucaaacaagggugucacggcagccuguccucaugcuggggcaaaaaguuuuuauaagaaucugaucuggcucgugaaaaagggaaacagcuacccaaaauuaucuaaguccuauauaaaugacaagggcaaagaaguacugguucuuuggggcauccaccaccccucaacuagcgccgaucaacagaguuuguaccagaacgcugacaccuacguguucgucgggacaucucgcuauuccaagaaauuuaagccugagauugccauccgaccaaaagugcgugaucaggagggaagaaugaauuacuauuggacucugguggaacccggugacaagauuaccuucgaggcgacaggcaaccuagucguuccuagguacgcauuugccauggaacggaacgcugggagcggaaucauaauuucggauaccccagugcaugacugcaauacgacuugucaaacaccgaaaggcgccaucaacaccucucuccccuuccagaauauucacccuaucacuaucgguaagugcccaaaguauguaaaauccacaaagcugcgccuugcaaccgggcugagaaacgugcccucaauucagaguaggggauuguuuggcgcuauagccggcuucaucgaagggggauggacggguauggucgacggcugguacggguaucaucaccagaaugaacaaggaagcggcuacgcggccgaucucaaauccacccagaacgcaauugacgagaucacaaauaaggugaacucuguuauagagaaaaugaauacucaguuuaccgcuguggguaaggaguucaaccaccuggaaaagcggauugaaaauuuaaacaaaaaggucgaugacggguuccuggauaucuggacauacaaugccgagcuccuugugcuguuggaaaacgagcgcacucuagacuaucaugauagcaauguaaagaaccuguacgagaagguucgaucacagcucaaaaacaaugcuaaggaaaucggcaacggauguuuugaguucuaucacaagugcgacaauaccuguauggaaagugugaaaaacggcacauacgauuauccuaaguacuccgaggaagccaaacugaauagagaggagauugacggggucaaacuugaaagcaccaggaucuaucaaauucuggcaauauacucuacuguggccucaaguuugguccucgugguuagccugggagcuaucuccuuuuggaugugcucuaacgguucguuacagugccggauuuguaucuga

SEQ ID NO: 141792 - RNA, 1701 nt, Artificial Sequence; identical to SEQ ID NO: 135727
  derived and/or modified CDS sequence (opt3) from hemagglutinin__InfluenzaA__BAJ40001

SEQ ID NO: 141793 - RNA, 1701 nt, Artificial Sequence; identical to SEQ ID NO: 130717
  derived and/or modified CDS sequence (opt3) from hemagglutinin__InfluenzaA__BAJ40002

SEQ ID NO: 141794 - RNA, 1701 nt, Artificial Sequence; identical to SEQ ID NO: 135727
  derived and/or modified CDS sequence (opt3) from hemagglutinin__InfluenzaA__BAJ40003

SEQ ID NO: 141795 - RNA, 1701 nt, Artificial Sequence
  derived and/or modified CDS sequence (opt3) from hemagglutinin__InfluenzaA__BAJ40004
augaaggccauccuggugguccuccuuuacaccuucgcuacagcaaacgccgacacucugugcauuggcuaucacgcgaauaacagcacggauaccguugacacaguguuggagaagaauguaacugugacccauuccgucaacuuacuggaagauaagcacaaugggaaacuauguaagcucagaggaguggcuccccugcaucuugguaaaugcaacauagccggcuggauccuggggaauccugagugugaaucuuugucaacagcaaguagcugguccuacauuguugagaccucuucgucagacaacggaacuugcuauccaggcgauuuuaucgacuacgaagaacucagggagcagcugagcaguguguccucuuucgaacgguuugagauuuucccgaagacaagcuccuggcccaaucacgauucaaacaagggugaaaccgccgcuuguccucaugcaggggccaaaaguuuuuauaagaaucugaucuggcucgucaaaaagggaaacagcuacccaaaauuaucuaaguccuauauaaaugacaagggcaaagaggugcugguacuuuggggcauccaccaccccucaacgagcgcugaucaacagaguuuguaccagaacgccgacgcguacguuuucguggggacuucucgcuauuccaagaaauuuaagccugagauugcaauccgaccaaaaguccgugaucaggaaggaagaaugaauuacuauuggacccugguggagcccggugacaagauuacauucgaagccacuggcaaccuaguggucccuagguacgcuuuugccauggagcggaacgcagggagcggaaucauaauuucggauaccccaguucaugacugcaauacaaccugucaaacgccgaaaggcgcuaucaacacuucucuccccuuccagaauauucacccuaucacaaucgguaagugcccaaaguaugugaaauccaccaagcugcgccuugccacugggcugagaaacguacccucaauucagaguaggggauuguuuggcgcgauagccggcuucaucgaagggggauggacagguaugguggacggcugguacggguaucaucaccagaaugagcaaggaagcggcuacgcagcugaucucaaauccacccagaacgccauugacaagaucacgaauaaagucaacucugugauagagaagaugaauacccaguuuacagcuguugguaaggaguucaaccaccuggagaaacggauugaaaauuuaaacaagaaaguggaugacggguuccuggauaucuggacuuacaaugccgagcuccuuguccuguuggaaaacgagcgcacccuagacuaucaugauagcaaugugaagaaccuguacgagaaaguaaagucacagcucaagaacaaugcaaaagaaaucggcaacggauguuuugaguucuaucacaagugcgacaauacauguauggaaaguguuaaaaacggcacuuacgauuauccuaaguacuccgaggaagccaaacugaaucgagagaagauugacggggugaaacuugagagcaccagaaucuaucaaauucuggcuauauacucuacagucgcgucaaguuuggugcucgucgugagccugggagcaaucuccuuuuggaugugcucuaacgguucguuacagugcaggauuuguaucuga

SEQ ID NO: 141796 - RNA, 1701 nt, Artificial Sequence
  derived and/or modified CDS sequence (opt3) from hemagglutinin__InfluenzaA__BAJ40006
augaaggccauccuggugguccuccuuuacaccuucgcuacagcaaacgccgacacucugugcauuggcuaucacgcgaauaacagcacggauaccguugacacaguguuggagaaaaauguaacugugacccauuccgucaacuuacuggaagauaagcacaaugggaaacuauguaagcucagaggaguggcuccccugcaucuugguaaaugcaacauagccggcuggauccuggggaauccugagugugaaucuuugucaacagcaaguagcugguccuacauuguugagaccucuucgucagacaacggaacuugcuauccaggcgauuuuaucgacuacgaggagcucagggagcagcugagcaguguguccucuuucgaacgguuugagauuuucccgaagacaagcuccuggcccaaucacgauucaaacaagggugucaccgccgcuuguccucaugcaggggccaaaaguuuuuauaagaaucugaucuggcucgugaaaaagggaaacagcuacccaaaauuaucuaaguccuauauaaaugacaagggccgcgaaguacugguucuuuggggcauccaccaccccucaacgagcgcugaucaacagaguuuguaccagaacgccgacacuuacguguucgucgggaccucucgauauuccaaaaaguuuaaaccugagauugcgauccguccaaaggugagagaucaggagggaaggaugaauuacuauuggacacugguggaacccggugacaaaauuacuuucgaggcaaccggcaaccuagucguuccucgguacgccuuugcuauggaacgcaacgccgggagcggaaucauaauuucggauacaccagugcaugacugcaauaccacgugucaaacuccgaagggcgcaaucaacacaucucuccccuuccagaauauucacccuaucaccaucgguaaaugcccaaaguauguaaaguccacuaaacugagacuugcuacagggcugaggaacgugcccucaauucagagucggggauuguuuggcgccauagcgggcuucaucgaagggggauggaccgguauggucgacggcugguacggguaucaucaccagaaugaacaaggaagcggcuacgccgcagaucucaaguccacgcagaacgcuauugacgagaucaccaauaaagugaacucuguuauagagaagaugaauacacaguuuacugccguggguaaagaguucaaccaccuggaaaagcgcauugaaaauuuaaacaagaaagucgaugacggguuccuggauaucuggaccuacaaugcugagcuccuugugcuguuggaaaacgagcgaacacuagacuaucaugauagcaauguaaagaaccuguacgagaaaguuagaucacagcucaagaacaaugccaaagaaaucggcaacggauguuuugaguucuaucacaagugcgacaauacuuguauggaaagugugaagaacggcaccuacgauuauccuaaauacuccgaggaagcaaagcugaauagggaggagauugacggggucaaacuugaaagcacacggaucuaucaaauucuggccauauacucuaccguggcuucaaguuugguccucgugguuagccugggagcgaucuccuuuuggaugugcucuaacgguucguuacagugccguauuuguaucuga

SEQ ID NO: 141797 - RNA, 1701 nt, Artificial Sequence; identical to SEQ ID NO: 130717
  derived and/or modified CDS sequence (opt3) from hemagglutinin__InfluenzaA__BAJ40007

SEQ ID NO: 141798 - RNA, 1701 nt, Artificial Sequence
  derived and/or modified CDS sequence (opt3) from hemagglutinin__InfluenzaA__BAJ40008
augaaggccauccuggugguccuccuuuacaccuucgcuacagcaaacgccgacacucugugcauuggcuaucacgcgaauaacagcacggauaccguugacacaguguuggagaaaaauguaacugugacccauuccgucaacuuacuggaagauaagcacaaugggaaacuauguaagcucagaggaguggcuccccugcaucuugguaaaugcaacauagccggcuggauccuggggaauccugagugugaaucuuugucaacagcaaguagcugguccuacauuguugagaccucuucgucagacaacggaacuugcuauccaggcgauuuuaucgacuacgaggagcucagggagcagcugagcaguguguccucuuucgaacgguuugagauuuucccgaagacaagcuccuggcccaaucacgauucaaacaagggugucaccgccgcuuguccucaugcaggggccaaaaguuuuuauaagaaucugaucuggcucgugaaaaagggaaacagcuacccaaaauuaucuaaguccuauauaaaugacaagggcaaagaaguacugguucuuuggggcauccaccaccccucaacgagcgcugaucaacagaguuuguaccagaacgccgacgcguacguguucgucgggacuucucgcuauuccaagaaauuuaagccugagauugcaauccgaccaaaagugcgugaucaggagggaagaaugaauuacuauuggacccugguggaacccggugacaagauuacauucgaggccacuggcaaccuagucguuccuagguacgcuuuugccauggaacggaacgcagggagcggaaucauaauuucggauaccccagugcaugacugcaauacaaccugucaaacgccgaaaggcgcuaucaacacuucucuccccuuccagaauauucacccuaucacaaucgguaagugcccaaaguauguaaaauccaccaagcugcgccuugccacugggcugagaaacgugcccucaauucagaguaggggauuguuuggcgcgauagccggcuucaucgaagggggauggacagguauggucgacggcugguacggguaucaucaccagaaugaacaaggaagcggcuacgcagcugaucucaaauccacccagaacgccauugacgagaucacgaauaaggugaacucuguuauagagaaaaugaauacccaguuuacagcuguggguaaggaguucaaccaccuggaaaagcggauugaaaauuuaaacaaaaaggucgaugacggguuccuggauaucuggacuuacaucgccgagcuccuugugcuguuggaaaaugagcgcacccuagacuaucaugauagcaacguaaagaaucuguacgagaagguucgaucacagcucaaaaacaacgcaaaggaaauuggcaauggauguuuugaguucuaucacaagugcgacaacacauguauggaaagugugaaaaauggcacuuacgauuauccuaaguacuccgaggaagccaaacugaacagagaggagaucgacggggucaaacuugaaagcaccaggauuuaucaaauacuggcuaucuacucuacaguggcgucaaguuugguccucgugguuagccugggagcaauuuccuuuuggaugugcucuaaugguucguuacagugccggaucuguaucuga

SEQ ID NO: 141799 - RNA, 1701 nt, Artificial Sequence
  derived and/or modified CDS sequence (opt3) from hemagglutinin__InfluenzaA__BAJ40009
augaaggccauccuggugguccuccuuuacaccuucgcuacagcaaacgccgacacucugugcauuggcuaucacgcgaauaacagcacggauaccguugacacaguguuggagaagaauguaacugugacccauuccgucaacuuacuggaagauaagcacaaugggaaacuauguaagcucagaggaguggcuccccugcaucuugguaaaugcaacauagccggcuggauccuggggaauccugagugugaaucuuugucaacagcaaguagcugguccuacauuguugagaccucuucgucagacaacggaacuugcuauccaggcgauuuuaucgacuacgaggagcucagggagcagcugagcaguguguccucuuucgaacgguuugagauuuucccgaagacaagcuccuggcccaaucacgauucagacaagggugucaccgccgcuuguccucaugcaggggccaaaaguuuuuauaagaaccugaucuggcucgugaaaaagggaaauagcuacccaaaauuaucuaaguccuauauaaacgauaagggcaaagaaguacugguucuuuggggcauccaccaccccucaacgagcgcugaccaacagaguuuguaccagaaugccgaugcguacguguucgucgggacuucucgcuauuccaagaaauuuaagccugagauugcaauccgaccaaaagugcgugaccaggagggaagaauggauuacuauuggacccugguggaacccggugacaagauuacauucgaggccacuggcaaccuagucguuccuagguacgcuuuugccauggaacggaaugcagggagcggaaucauaauuucggacaccccagugcauaacugcaacacaaccugucaaacgccgaaaggcgcuaucaauacuucucuccccuuccagaacauucacccuaucacaaucgguaagugcccaaaguauguaaaauccaccaagcugcgccuugccacugggcugagaaaugugcccucaauucagaguaggggauuguuuggcgcgauagccggcuucaucgaagggggauggacagguauggucgauggcugguacggguaucaucaccagaacgaacaaggaagcggcuacgcagcugaccucaaauccacccagaaugccauugauaagaucacgaacaaaguaaauucuguuauagagaagaugaacacccaguuuacagcuguggguaaggaguucaaucaccuggaaaaccggauugagaauuuaaacaaaaaggucgacgauggguuccuggacaucuggacuuacaaugccgaacuccuugugcuguuggagaacgaacgcacccuagauuaucaugacagcaaugugaaaaaccuguacgagaagguucgaucacagcucaaaaacaaugcaaaggagaucggcaacggauguuuugaguucuaucacaagugcgauaauacauguauggaaagugugaaaaacggcacuuacgacuauccuaaguacuccgaagaggccaaacugaauagagaagagauugauggggucaaacuugagagcaccaggaucuaucaaauucuggcuauauacucuacaguggcgucaaguuugguccucgugguuagccugggagcaaucuccuuuuggaugugcucuaacgguucguuacagugccggauuuguaucuga

SEQ ID NO: 141800 - RNA, 1701 nt, Artificial Sequence
  derived and/or modified CDS sequence (opt3) from hemagglutinin__InfluenzaA__BAJ40010
augaaggccauccuggugguccuccuuuacaccuucgcuacagcaaacgccgacacucugugcauuggcuaucacgcgaauaacagcacggauaccguugacacaguguuggagaaaaauguaacugugacccauuccgucaacuuacuggaagauaagcacaaugggaaacuauguaagcucagaggaguggcuccccugcaucuugguaaaugcaacauagccggcuggauccuggggaauccugagugugaauugcucucuacagcaucaaguuggagcuacauuguugagaccuccucuucggacaacggaacuugcuauccaggcgauuuuaucgacuacgaggagcugagggagcagcugucaagcgugaguuccuucgaacgguuugagauuuucccgaagacaucuagcuggcccaaucacgauuccgacaagggugucaccgccgcuuguccucaugcaggggccaaaucauuuuauaagaaccucaucugguuagugaaaaagggaaauaguuacccaaaacugagcaagucuuauauaaacgauaagggcaaagaaguacuuguuuuguggggcauccaccaccccuccacgucagcugaccaacagagccuguaccagaaugccgaugcguacguguucgucgggacuucccgcuauucuaagaaauuuaagccugagauugcaauccgaccaaaagugcgugaccaggagggaagaauggauuacuauuggacccuaguggaacccggugacaagauuacauucgaggccacuggcaaccucgucguuccuagguacgcuuuugccauggaacggaaugcaggguccggaaucauaauuagcgacaccccagugcauaacugcaacacaaccugucaaacgccgaaaggcgcuaucaauacuucgcugcccuuccagaacauucacccuaucacaaucgguaagugcccaaaguauguaaaaucuaccaagcugcgccuugccacuggguugagaaaugugcccuccauucagucaaggggacucuuuggcgcgauagccggcuucaucgaagggggauggacagguauggucgauggcugguacggguaucaucaccagaacgaacaaggaaguggcuacgcagcugaccugaaaagcacccagaaugccauugauaagaucacgaacaaagugaauaguguuauagagaagaugaacacccaguuuacagcuguggguaaggaguucaaucacuuagaaaaacggauugagaaccugaauaagaaagucgacgauggguuccucgacaucuggacuuacaacgccgaacuucugguguugcuagagaaugaacgcacccuggauuaucaugacucuaacguaaagaaucucuacgagaaaguucgaagccagcugaagaacaacgcaaaggagaucggcaauggauguuuugaguucuaucacaaaugcgauaacacauguauggaaucagugaagaauggcacuuacgacuauccuaaauacagugaagaggccaaacuuaacagagaagagauugauggggucaagcuggaguccaccaggaucuaucaaauuuuggcuauauacagcacaguggcgucuucacucguccuggugguuaguuuaggagcaaucagcuuuuggaugugcuccaaugguucucugcagugccggauuuguaucuga

SEQ ID NO: 141801 - RNA, 1701 nt, Artificial Sequence; identical to SEQ ID NO: 141790
  derived and/or modified CDS sequence (opt3) from hemagglutinin__InfluenzaA__BAJ40011

SEQ ID NO: 141802 - RNA, 1701 nt, Artificial Sequence
  derived and/or modified CDS sequence (opt3) from hemagglutinin__InfluenzaA__BAJ40012
augaaggccauccuggugguccuccuuuacaccuucgcuacagcaaacgccgacacucugugcauuggcuaucacgcgaauaacagcacggauaccguugacacaguguuggagaaaaauguaacugugacccauuccgucaacuuacuggaagauaagcacaaugggaaacuauguaagcucagaggaguggcuccccugcaucuugguaaaugcaacauagccggcuggauccuggggaauccugagugugaaucuuugucaacagcaaguagcugguccuacauuguugagaccucuucgucagacaacggaacuugcuauccaggcgauuuuaucgacuacgaggagcucagggagcagcugagcaguguguccucuuucgaacgguuugagauuuucccgaagacaagcuccuggcccaaucacgauucaaacaagggugucaccgccgcuuguccucaugcaggggccaaaaguuuuuauaagaaucugaucuggcucgugaaaaagggaaacagcuacccaaaauuaucuaaguccuauauaaaugacaagggcaaagaaguacugguucuuuggggcauccaccaccccucaacgagcgcugaucaacagaguuuguaccagaacgccgacgcguacguguucgucgggacuucucgcuauuccaagaaauuuaagccugagauugcaauccgaccaaaagugcgugaucaggagggaagaaugaauuacuauuggacccugguggaacccggugacaagauuacauucgaggccacuggcaaccuagucguuccuagguacgcuuuugccauggaacggaacgcagggagcggaaucauaauuucggauaccccagugcaugacugcaauacaaccugucaaacgccgaaaggcgcuaucaacacuucucuccccuuccagaauauucacccuaucacaaucgguaagugcccaaaguauguaaaauccaccaagcugcgccuugccacugggcugagaaacgugcccucaauucagaguaggggauuguuuggcgcgauagccggcuucaucgaagggggauggacagguauggucgacggcugguacggguaucaucaccagaaugaacaaggaagcggcuacgcagcugaucucaaauccacccagaacgccauugacgagaucacgaauaaggugaacucuguuauagagaaaaugaauacccaguuuacagcuguggguaaggaguucaaccaccuggaaaagcggauugaaaauuuaaacaaaaaggucgaugacggguuccuggauaucuggacuuacaaugccgagcuccuugugcuguuggaaaacgagcgcacccuagacuaucaugauagcaauguaaagaaccuguacgagaagguucgaucacagcucaaaaacaaugcaaaggaaaucggcaacggauguuuugaguucuaucacaagugcgacaauacauguauggaaagugugaaaaacggcacuuacgauuauccuaaguacuccgaggaagccaaacugaauagagaggagauugacgggaucaaacuugaaagcaccaggauuuaucaaauacuggcuaucuacucuacagucgcgucaaguuuggugcucgucgugagccugggagcaauuuccuuuuggaugugcucuaacgguucguuacagugccggaucuguaucuga

SEQ ID NO: 141803 - RNA, 1701 nt, Artificial Sequence; identical to SEQ ID NO: 141790
  derived and/or modified CDS sequence (opt3) from hemagglutinin__InfluenzaA__BAJ40013

SEQ ID NO: 141804 - RNA, 1701 nt, Artificial Sequence; identical to SEQ ID NO: 141790
  derived and/or modified CDS sequence (opt3) from hemagglutinin__InfluenzaA__BAJ40014

SEQ ID NO: 141805 - RNA, 1701 nt, Artificial Sequence
  derived and/or modified CDS sequence (opt3) from hemagglutinin__InfluenzaA__BAJ40015
augaaggccauccuggugguccuccuuuacaccuucgcuacagcaaacgccgacacucugugcauuggcuaucacgcgaauaacagcacggauaccguugacacaguguuggagaaaaauguaacugugacccauuccgucaacuuacuggaagauaagcacaaugggaaacuauguaagcucagaggaguggcuccccugcaucuugguaaaugcaacauagccggcuggauccuggggaauccugagugugaaucuuugucaacagcaaguagcugguccuacauuguugagaccucuucgucagacaacggaacuugcuauccaggcgauuuuaucgacuacgaggagcucagggagcagcugagcaguguguccucuuucgaacgguuugagauuuucccgaauacaagcuccuggcccaaccacgauucaaauaagggugucaccgccgcuuguccucaugcaggggccaagaguuuuuauaaaaaccugaucuggcucgugaagaaaggaaauagcuacccaaaguuaucuaaauccuauauaaacgacaagggcaaggaaguacugguucuuuggggcauccaccaccccucaacgagcgcugaucaacagaguuuguaccagaaugccgacacuuacguguucgucgggaccucucgcuauuccaaaaaguuuaaaccugagauugcgauccgaccaaaggugcgugaucaggagggaagaaugaacuacuauuggacacugguggaacccggugacaaaauuacuuucgaggcaaccggcaaccuagucguuccuagguacgccuuugcuauggaacggaaugccgggagcggaaucauaauuucggauacaccagugcaugacugcaacaccacgugucaaacuccgaagggcgcaaucaauacaucucuccccuuccagaacauucacccuaucaccaucgguaaaugcccaaaguauguaaaguccacuaaacugcgccuugcuacagggcugagaaaugugcccucaauucagaguaggggauuguuuggcgccauagcgggcuucaucgaagggggauggaccgguauggucgacggcugguacggguaucaucaccagaacgaacaaggaagcggcuacgccgcagaucucaaguccacgcagaaugcuauugacgagaucaccaacaaaguuaauucugugauagagaagaugaacacacaguuuacugccguggguaaagaguucaaucaccuggaaaagcggauugaaaacuuaaauaagaaagucgaugacggguuccuggauaucuggaccuacaacgcugagcuccuugugcuguuggaaaaugagcgcacacuagacuaucaugauagcaacguaaagaaccuguacgagaaaguucgaucacagcucaagaauaacgccaaagaaaucggcaauggauguuuugaguucuaucacaagugcgacaacacuuguauggaaagugugaagaauggcaccuacgauuauccuaaauacuccgaggaagcaaagcugaacagagaggagauugacggggucaaacuugaaagcacaaggaucuaucaaauucuggccauauacucuaccguggcuucaaguuugguccucgugguuagccugggagcgaucuccuuuuggaugugcucuaaugguucguuacagugccggauuuguaucuga

SEQ ID NO: 141806 - RNA, 1701 nt, Artificial Sequence; identical to SEQ ID NO: 141790
  derived and/or modified CDS sequence (opt3) from hemagglutinin__InfluenzaA__BAJ40016

SEQ ID NO: 141807 - RNA, 1701 nt, Artificial Sequence
  derived and/or modified CDS sequence (opt3) from hemagglutinin__InfluenzaA__BAJ40017
augaaggccauccuggugguccuccuuuacaccuucgcuacagcaaacgccgacacucugugcauuggcuaucacgcgaauaacagcacggauaccguugacacaguguuggagaaaaauguaacugugacccauuccgucaacuuacuggaagauaagcacaaugggaaacuauguaagcucagaggaguggcuccccugcaucuugguaaaugcaacauagccggcuggauccuggggaauccugagugugaaucuuugucaacagcaaguagcugguccuacauuguugagaccucuaacucggacaauggaacuugcuauccaggcgauuuuaucgacuacgaggagcucagggagcagcugucaagcgugaguuccuucgaacgguuugagauuuucccgaagacaucuagcuggcccaaccacgauuccaauaagggugucaccgccgcuuguccucaugcaggggccaaaucauuuuauaagaaccugaucuggcucgugaaaaagggaaauaguuacccaaaauuaagcaagucuuauauaaacgacaagggcaaagaaguacugguucuuuggggcauccaccaccccuccacgucagcugaucaacagagcuuguaccagaaugccgacgcguacguguucgucgggaccagucgcuauucuaagaaauuuaagccugagauugcaauccgaccaaaagugcgugaucaggagggaagaaugaacuacuauuggacucugguggaacccggugacaagauuacauucgaggccacuggcaaccuagucguuccuagguacgcuuuugccauggaacggaaugcaggguccggaaucauaauuagcgauaccccagugcaugacugcaacacaaccugucaaacgccgaaaggcgcuaucaauacuucgcuccccuuccagaacauucacccuaucacaaucgguaagugcccaaaguauguaaaaucuaccaagcugcgccuugccacugggcugagaaaugugcccuccauucagucaaggggauuguuuggcgcgauagccggcuucaucgaagggggauggacagguauggucgacggcugguacggguaucaucaccagaacgaacaaggaaguggcuacgcagcugaucucaaaagcacccagaaggccauugacgagaucacgaauaaagugaacuccguuauagagaagaugaauacccaguuuacagcuguggguaaggaguucaaccaccuggaaaaacggauugaaaauuuaaacaagaaagucgaugacggguuccuggauaucuggacuuacaaugccgagcuccuugugcuguuggaaaacgagcgcacccuagacuaucaugauucuaauguaaagaaccuguacgagaaaguucgaagccagcucaagaacaaugcaaaggaaaucggcaacggauguuuugaguucuaucacaaaugcgacaauacauguauggaaucagugaagaacggcacuuacgauuauccuaaauacagugaggaagccaagcugaauagagaggagauugacggggucaaacuugaauccaccaggaucuaucaaauucuggcuauauacagcacaguggcgucuucauugguccucgugguuagucugggagcaaucagcuuuuggaugugcuccaacgguucuuuacagugccggauuuguaucuga

SEQ ID NO: 141808 - RNA, 1701 nt, Artificial Sequence; identical to SEQ ID NO: 131881
  derived and/or modified CDS sequence (opt3) from hemagglutinin__InfluenzaA__BAJ40018

SEQ ID NO: 141809 - RNA, 1701 nt, Artificial Sequence; identical to SEQ ID NO: 141796
  derived and/or modified CDS sequence (opt3) from hemagglutinin__InfluenzaA__BAJ40019

SEQ ID NO: 141810 - RNA, 1701 nt, Artificial Sequence; identical to SEQ ID NO: 141796
  derived and/or modified CDS sequence (opt3) from hemagglutinin__InfluenzaA__BAJ40020

SEQ ID NO: 141811 - RNA, 1701 nt, Artificial Sequence
  derived and/or modified CDS sequence (opt3) from hemagglutinin__InfluenzaA__BAJ40021
augaaggccauccuggugguccuccuuuacaccuucgcuacagcaaacgccgacacucugugcauuggcuaucacgcgaauaacagcacggauaccguugacacaguguuggagaaaaauguaacugugacccauuccgucaacuuacuggaagauaagcacaaugggaaacuauguaagcucagaggaguggcuccccugcaucuugguaaaugcaacauagccggcuggauccuggggaauccugagugugaaucuuugucaacagcaaguagcugguccuacauuguugagaccucuucgucagacaacggaacuugcuauccaggcgauuuuaucgacuacgaagaacucagggagcagcugagcaguguguccucuuucgaacgguuugagauuuucccgaagacaagcuccuggcccaaucacgauucaaacaagggugaaaccgccgcuuguccucaugcaggggccaaaaguuuuuauaagaaucugaucuggcucgucaaaaagggaaacagcuacccaaaauuaucuaaguccuauauaaaugacaagggcaaagaggugcugguacuuuggggcauccaccaccccucaacgagcgcugaucaacagaguuuguaccagaacgccgacgcguacguuuucguggggacuucucgcuauuccaagaaauuuaagccugagauugcaauccgaccaaaaguccgugaucaggaaggaagaaugaauuacuauuggacccugguggagcccggugacaagauuacauucgaagccacuggcaaccuaguggucccuagguacgcuuuugccauggagcggaacgcagggagcggaaucauaauuucggauaccccaguucaugacugcaauacaaccugucaaacgccgaaaggcgcuaucaacacuucucuccccuuccagaauauucacccuaucacaaucgguaagugcccaaaguaugugaaauccaccaagcugcgccuugccacugggcugagaaacguacccucaauucagaguaggggauuguuuggcgcgauagccggcuucaucgaagggggauggacagguaugguggacggcugguacggguaucaucaccagaaugagcaaggaagcggcuacgcagcugaucucaaauccacccagaacgccauugacaagaucacgaauaaagucaacucugugauagagaagaugaauacccaguuuacagcuguugguaaggaguucaaccaccuggagaaacggauugaaaauuuaaacaagaaaguggaugacggguuccuggauaucuggacuuacaaugccgagcuccuuguccuguuggaaaacgagcgcacccuagacuaucaugauagcaaugugaagaaccuguacgagaaaguacgaucacagcucaagaacaaugcaaaggaaaucggcaacggauguuuugaguucuaucacaaaugcgacaauacauguauggaaaguguuaagaacggcacuuacgauuauccuaaauacuccgaggaagccaagcugaauagagaggagauugacggggugaaacuugaaagcaccaggaucuaucaaauucuggcuauauacucuacagucgcgucaaguuuggugcucgucgugagccugggagcaaucuccuuuuggaugugcucuaacgguucguuacagugccggauuuguaucuga

SEQ ID NO: 141812 - RNA, 1701 nt, Artificial Sequence; identical to SEQ ID NO: 131881
  derived and/or modified CDS sequence (opt3) from hemagglutinin__InfluenzaA__BAJ40023

SEQ ID NO: 141813 - RNA, 1701 nt, Artificial Sequence
  derived and/or modified CDS sequence (opt3) from hemagglutinin__InfluenzaA__BAJ40024
augaaggccauccuggugguccuccuuuacaccuucgcuacagcaaacgccgacacucugugcauuggcuaucacgcgaauaacagcacggauaccguugacacaguguuggagaaaaauguaacugugacccauuccgucaacuuacuggaagauaagcacaaugggaaacuauguaagcucagaggaguggcuccccugcaucuugguaaaugcaacauagccggcuggauccuggggaauccugagugugaaucuuugucaacagcaaguagcugguccuacauuguugagaccucuucgucagacaacggaacuugcuauccaggcgauuuuaucgacuacgaggagcucagggagcagcugagcaguguguccucuuucgaacgguuugagauuuucccgaagacaagcuccuggcccaaucacgauucaaacaagggugucaccgccgcuuguccucaugcaggggccaaaaguuuuuauaagaaucugaucuggcucgugaaaaagggaaacagcuacccaaaauuaucuaaguccuauauaaaugacaagggcaaagaaguacugguucuuuggggcauccaccaccccucaacgagcgcugaucaacagaguuuguaccagaacgccgacacuuacguguucgucgggaccucucgcuauuccaagaaauuuaagccugagauugcgauccgaccaaaagugcgugaucaggagggaagaaugaauuacuauuggacacugguggaacccggugacaagauuacuuucgaggcaaccggcaaccuagucguuccuagguacgccuuugcuauggaacggaacgccgggagcggaaucauaauuucggauacaccagugcaugacugcaauaccacgugucaaacuccgaaaggcgcaaucaacacaucucuccccuuccagaauauucacccuaucaccaucgguaagugcccaaaguauguaaaauccacuaagcugcgccuugcuacagggcugagaaacgugcccucaauucagaguaggggauuguuuggcgccauagcgggcuucaucgaagggggauggaccgguauggucgacggcugguacggguaucaucaccagaaugaacaaggaagcggcuacgccgcagaucucaaauccacgcagaacgcuauugacgagaucaccaauaaggugaacucuguuauagagaaaaugaauacacaguuuacugccguggguaaggaguucaaccaccuggaaaagcggauugaaaauuuaaacaaaaaggucgaugacggguuccuggauaucuggaccuacaaugcugagcuccuugugcuguuggaaaacgagcgcacacuagacuaucaugauagcaauguuaaaaaccuguacgagaagguacgaucacagcucaaaaacaaugccaaggaaaucggcaacggauguuuugaguucuaucacaagugcgacaauacuuguauggaaagugugaaaaacggcaccuacgauuauccuaaguacuccgaggaagcaaaacugaauagagagaagauugacggggucaaacuugagagcacaaggaucuaucaaauucuggccauauacucuaccguggcuucaaguuugguccucgugguuagccugggagcgaucuccuuuuggaugugcucuaacgguucguuacagugccggauuuguaucuga

SEQ ID NO: 141814 - RNA, 1701 nt, Artificial Sequence; identical to SEQ ID NO: 141790
  derived and/or modified CDS sequence (opt3) from hemagglutinin__InfluenzaA__BAJ40025

SEQ ID NO: 141815 - RNA, 1701 nt, Artificial Sequence; identical to SEQ ID NO: 131881
  derived and/or modified CDS sequence (opt3) from hemagglutinin__InfluenzaA__BAJ40026

SEQ ID NO: 141816 - RNA, 1701 nt, Artificial Sequence
  derived and/or modified CDS sequence (opt3) from hemagglutinin__InfluenzaA__BAJ40027
augaaggccauccuggugguccuccuuuacaccuucgcuacagcaaacgccgacacucugugcauuggcuaucacgcgaauaacagcacggauaccguugacacaguguuggagaagaauguaacugugacccauuccgucaacuuacuggaagauaagcacaaugggaaacuauguaagcucagaggaguggcuccccugcaucuugguaaaugcaacauagccggcuggauccuggggaauccugagugugaaucuuugucaacagcaaguagcugguccuacauuguugagaccucuucgucagacaacggaacuugcuauccaggcgauuuuaucgacuacgaagaacucagggagcagcugagcaguguguccucuuucgaacgguuugagauuuucccgaagacaagcuccuggcccaaucacgauucaaacaagggugaaaccgccgcuuguccucaugcaggggccaaaaguuuuuauaagaaucugaucuggcucgucaaaaagggaaacagcuacccaaaauuaucuaaguccuauauaaaugacaagggcaaagaggugcugguacuuuggggcauccaccaccccucaacgagcgcugaucaacagaguuuguaccagaacgccgacgcguacguuuucguggggacuucucgcuauuccaagaaauuuaagccugagauugcaauccgaccaaaaguccgugaucaggaaggaagaaugaauuacuauuggacccugguggagcccggugacaagauuacauucgaagccacuggcaaccuaguggucccuagguacgcuuuugccauggagcggaacgcagggagcggaaucauaauuucggauaccccaguucaugacugcaauacaaccugucaaacgccgaaaggcgcuaucaacacuucucuccccuuccagaauauucacccuaucacaaucgguaagugcccaaaguaugugaaauccaccaagcugcgccuugccacugggcugagaaacguacccucaauucagaguaggggauuguuuggcgcgauagccggcuucaucgaagggggauggacagguaugguggacggcugguacggguaucaucaccagaaugagcaaggaagcggcuacgcagcugaucucaaauccacccagaacgccauugacaagaucacgaauaaagucaacucugugauagagaagaugaauacccaguuuacagcuguugguaaggaguucaaccaccuggagaaacggauugaaaauuuaaacaagaaaguggaugacggguuccuggauaucuggacuuacaaugccgagcuccuuguccuguuggaaaacgagcgcacccuagacuaucaugauagcaaugugaagaaccuguacgagaaaguaaagucacagcucaagaacaaugcaaaagaaaucggcaacggauguuuugaguucuaucacaagugcgacaauacauguauggaaaguguuaaaaacggcacuuacgauuauccuaaguacuccgaggaagccaaacugaaucgagaggagauugacggggugaaacuugaaagcaccagaaucuaucaaauucuggcuauauacucuacagucgcgucaaguuuggugcucgucgugagccugggagcaaucuccuuuuggaugugcucuaacgguucguuacagugcaggauuuguaucuga

SEQ ID NO: 141817 - RNA, 1701 nt, Artificial Sequence
  derived and/or modified CDS sequence (opt3) from hemagglutinin__InfluenzaA__BAJ40028
augaaggccauccuggugguccuccuuuacaccuucgcuacagcaaacgccgacacucugugcauuggcuaucacgcgaauaacagcacggauaccguugacacaguguuggagaaaaauguaacugugacccauuccgucaacuuacuggaagauaagcacaaugggaaacuauguaagcucagaggaguggcuccccugcaucuugguaaaugcaacauagccggcuggauccuggggaauccugagugugaaucuuugucaacagcaaguagcugguccuacauuguugagaccucuucgucagacaacggaacuugcuauccaggcgauuuuaucgacuacgaagaacucagggagcagcugagcaguguguccucuuucgaacgguuugagauuuucccgaagacaagcuccuggcccaaucacgauucaaacaagggugucaccgccgcuuguccucaugcaggggccaaaaguuuuuauaagaaucugaucuggcucgugaaaaagggaaacagcuacccaaaauuaucuaaguccuauauaaaugacaagggcaaagaaguacugguucuuuggggcauccaccaccccucaacgagcgcugaucaacagaguuuguaccagaacgccgacgcguacguguucgucgggacuucucgcuauuccaagaaauuuaagccugagauugcaauccgaccaaaagugcgugaucaggagggaagaaugaauuacuauuggacccugguggaacccggugacaagauuacauucgaggccacuggcaaccuagucguuccuagguacgcuuuugccauggaacggaacgcagggagcggaaucauaauuucggauaccccagugcaugacugcaauacaaccugucaaacgccgaaaggcgcuaucaacacuucucuccccuuccagaauauucacccuaucacaaucgguaagugcccaaaguauguaaaauccaccaagcugcgccuugccacugggcugagaaacgugcccucaauucagaguaggggauuguuuggcgcgauagccgcauucaucgagggcggguggacaggaauggucgacgguugguacggcuaucaucaccagaaugaacaagggagcggauacgcugccgaucucaaauccacccagaacgcuauugacaagaucacgaauaaagugaacucuguuauagagaagaugaauacccaguuuacagccgugggcaaggaguucaaccaccuggaaaaacggauugagaauuuaaacaagaaagucgaugacgguuuccuggauaucuggacuuacaaugcagaacuccuugugcuguuggagaacgaacgcacccuagacuaucaugauagcaauguaaagaaccuguacgagaaaguucgaucacagcucaagaacaaugccaaggagaucgggaacggcuguuuugaguucuaucacaaaugcgacaauacauguauggagagugugaagaacggaacuuacgauuauccuaaauacuccgaagaggcuaagcugaauagagaagagauugacggcgucaaacuugagagcaccaggaucuaucaaauucuggcgauauacucuacaguggcaucaaguuugguccucgugguuagccugggggccaucuccuuuuggaugugcucuaacggaucguuacagugccggauuuguaucuga

SEQ ID NO: 141818 - RNA, 1701 nt, Artificial Sequence; identical to SEQ ID NO: 141790
  derived and/or modified CDS sequence (opt3) from hemagglutinin__InfluenzaA__BAJ40029

SEQ ID NO: 141819 - RNA, 1701 nt, Artificial Sequence
  derived and/or modified CDS sequence (opt3) from hemagglutinin__InfluenzaA__BAJ40030
augaaggccauccuggugguccuccuuuacaccuucgcuacagcaaacgccgacacucugugcauuggcuaucacgcgaauaacagcacggauaccguugacacaguguuggagaaaaauguaacugugacccauuccgucaacuuacuggaagauaagcacaaugggaaacuauguaagcucagaggaguggcuccccugcaucuugguaaaugcaacauagccggcuggauccuggggaauccugagugugaaucuuugucaacagcaaguagcugguccuacauuguugagaccucuucgucagacaacggaacuugcuauccaggcgauuuuaucgacuacgaggagcucaaggagcagcugagcaguguguccucuuucgaaagguuugagauuuucccgaagacaagcuccuggcccaaucacgauucaaacaaaggugucaccgccgcuuguccucaugcaggggccaagaguuuuuauaaaaaucugaucuggcucgugaagaaaggaaacagcuacccaaaguuaucuaaguccuauauaaaugacaaaggccgggaaguacugguucuuuggggcauccaccaccccucaacgagcgcugaucaacagaguuuguaccagaacgccgacacuuacguguucgucgggaccucucgcuauuccaagaaauuuaagccugagauugcgauccgaccaaaagugcgugaucaggagggaagaaugaauuacuauuggacacugguggaacccggugacaagauuacuuucgaggcaaccggcaaccuagucguuccuagguacgccuuugcuauggaacggaacgccgggagcggaaucauaauuucggauacaccagugcaugacugcaauaccacgugucaaacuccgaaaggcgcaaucaacacaucucuccccuuccagaauauucacccuaucaccaucgguaagugcccaaaguauguaaaauccacuaagcugcgccuugcuacagggcugagaaacgugcccucaauucagaguaggggauuguuuggcgccauagcgggcuucaucgaagggggauggaccgguauggucgacggcugguacggguaucaucaccagaaugaacaaggaagcggcuacgccgcagaucucaaauccacgcagaacgcuauugacgagaucaccaauaaggugaacucuguuauagagaaaaugaauacacaguuuacugccguggguaaggaguucaaccaccuggaaaagcggauugaaaauuuaaacaaaaaggucgaugacggguuccuggauaucuggaccuacaaugcugagcuccuugugcuguuggaaaacgagcgcacacuagacuaucaugauagcaauguaaagaaccuguacgagaagguucgaucacagcucaaaaacaaugccaaggaaaucggcaacggauguuuugaguucuaucacaagugcgacaauacuuguauggaaagugugaaaaacggcaccuacgauuauccuaaguacuccgaggaagcaaaacugaauagagaggagauugacggggucaaacuugaaagcacaaggaucuaucaaauucuggccauauacucuaccguggcuucaaguuugguccucgugguuagccugggagcgaucuccuuuuggaugugcucuaacgguucguuacagugccggauuuguaucuga

SEQ ID NO: 141820 - RNA, 1701 nt, Artificial Sequence; identical to SEQ ID NO: 130717
  derived and/or modified CDS sequence (opt3) from hemagglutinin__InfluenzaA__BAJ40031

SEQ ID NO: 141821 - RNA, 1701 nt, Artificial Sequence; identical to SEQ ID NO: 141790
  derived and/or modified CDS sequence (opt3) from hemagglutinin__InfluenzaA__BAJ40032

SEQ ID NO: 141822 - RNA, 1701 nt, Artificial Sequence; identical to SEQ ID NO: 141819
  derived and/or modified CDS sequence (opt3) from hemagglutinin__InfluenzaA__BAJ40033

SEQ ID NO: 141823 - RNA, 1701 nt, Artificial Sequence
  derived and/or modified CDS sequence (opt3) from hemagglutinin__InfluenzaA__BAJ40034
augaaggccauccuggugguccuccuuuacaccuucgcuacagcaaacgccgacacucugugcauuggcuaucacgcgaauaacagcacggauaccguugacacaguguuggagagaaauguaacugugacccauuccgucaacuuacuggaagauaagcacaaugggaagcuauguaaacucaggggaguggcuccccugcaucuugguaagugcaacauagccggcuggauccuggggaauccugagugugaaucuuugucaacagcaaguagcugguccuacauuguugagaccucuucgucagacaacggaacuugcuauccaggcgauuuuaucgacuacgaggagcuccgggagcagcugagcaguguguccucuuucgaacgcuuugagauuuucccgaaaacaagcuccuggcccaaucacgauucaaacaagggugucaccgccgcuuguccucaugcaggggccaagaguuuuuauaaaaaucugaucuggcucgugaagaaaggaaacagcuacccaaaguuaucuaaauccuauauaaaugacaagggcaaggaaguacugguucuuuggggcauccaccaccccucaacgagcgcugaucaacagaguuuguaccagaacgccgacacuuacguguucgucgggaccucucgauauuccaaaaaguuuaaaccugagauugcgauccguccaaaggugagagaucaggagggaaggaugaauuacuauuggacacugguggaacccggugacaaaauuacuuucgaggcaaccggcaaccuagucguuccucgguacgccuuugcuauggaacgcaacgccgggagcggaaucauaauuucggauacaccagugcaugacugcaauaccacgugucaaacuccgaagggcgcaaucaacacaucucuccccuuccagaauauucacccuaucaccaucgguaaaugcccaaaguauguaaaguccacuaaacugagacuugcuacagggcugaggaacgugcccucaauucagagucggggauuguuuggcgccauagcgggcuucaucgaagggggauggaccgguauggucgacggcugguacggguaucaucaccagaaugaacaaggaagcggcuacgccgcagaucucaaguccacgcagaacgcuauugacgagaucaccaauaaagugaacucuguuauagagaagaugaauacacaguuuacugccguggguaaagaguucaaccaccuggaaaagcgcauugaaaauuuaaacaagaaagucgaugacggguuccuggauaucuggaccuacaaugcugagcuccuugugcuguuggaaaacgagcgaacacuagacuaucaugauagcaauguaaagaaccuguacgagaaaguuagaucacagcucaagaacaaugccaaagaaaucggcaacggauguuuugaguucuaucacaagugcgacaauacuuguauggaaagugugaagaacggcaccuacgauuauccuaaauacuccgaggaagcaaagcugaauagggagaaaauugacggggucaaacuugagagcacacggaucuaucaaauucuggccauauacucuaccguggcuucaaguuugguccucgugguuagccugggagcgaucuccuuuuggaugugcucuaacgguucguuacagugccguauuuguaucuga

SEQ ID NO: 141824 - RNA, 1701 nt, Artificial Sequence
  derived and/or modified CDS sequence (opt3) from hemagglutinin__InfluenzaA__BAJ40035
augaaggccauccuggugguccuccuuuacaccuucgcuacagcaaacgccgacacucugugcauuggcuaucacgcgaauaacagcacggauaccguugacacaguguuggagaaaaauguaacugugacccauuccgucaacuuacuggaagauaagcacaaugggaaacuauguaagcucagaggaguggcuccccugcaucuugguaaaugcaacauagccggcuggauccuggggaauccugagugugaaucuuugucaacagcaaguagcugguccuacauuguugagaccucuucgucagacaacggaacuugcuauccaggcgauuuuaucgacuacgaggagcucagggagcagcugagcaguguguccucuuucgaacgguuugagauuuucccgaagacaagcuccuggcccaaucacgauucaaacaagggugucaccgccgcuuguccucaugcaggggccaaaaguuuuuauaagaaucugaucuggcucgugaaaaagggaaacagcuacccaaaauuaucuaaguccuauauaaaugacaagggcaaagaaguacugguucuuuggggcauccaccaccccucaacgagcgcugaucaacagaguuuguaccagaacgccgacacuuacguguucgucgggaccucucgcuauuccaagaaauuuaagccugagauugcgauccgaccaaaagugcgugaucaggagggaagaaugaauuacuauuggacacugguggaacccggugacaagauuaaauucgaggcaacuggcaaccuagucguuccuagguacgccuuugcuauggaacggaacgccgggagcggaaucauaauuucggauaccccagugcaugacugcaauacaaccugucaaacgccgaagggcgcaaucaacacuucucuccccuuccagaauauucacccuaucacaaucgguaagugcccaaaauauguaaaguccaccaaacugcgccuugcuacugggcugagaaacgugcccucaauucagaguaggggauuguuuggcgccauagcgggcuucaucgaagggggauggacagguauggucgacggcugguacggguaucaucaccagaaugaacaaggaagcggcuacgccgcagaucucaaguccacccagaacgcuauugacgagaucacgaauaaagugaacucuguuauagagaagaugaauacccaguuuacagccguggguaaggaguucaaccaccuggaaaaacggauugaaaauuuaaacaagaaagucgaugacggguuccuggauaucuggacuuacaaugcugagcuccuugugcuguuggaaaacgagcgcacccuagacuaucaugauagcaauguaaagaaccuguacgagaaaguucgaaaccagcucaagaauaacgccaaggaaaucggcaauggauguuuugaguucuaucacaaaugcgacaacacauguauggaaucagugaagaauggcacuuacgauuauccuaaauacagugaggaagcaaagcugaacagagaggagauugacggggucaaacuugaauccaccaggaucuaucaaauucuggccauauacagcacaguggcuucuucauugguccucgugguuagucugggagcgaucagcuuuuggaugugcuccaaugguucuuuacagugccggauuuguaucuga

SEQ ID NO: 141825 - RNA, 1701 nt, Artificial Sequence
  derived and/or modified CDS sequence (opt3) from hemagglutinin__InfluenzaA__BAJ40036
augaaggccauccuggugguccucauuuacaccuucgcuacagcaaacgccgacacucuuugcauaggcuaucacgcgaauaacagcacggauaccguugacacagugcuggagaaaaauguaacugugacccauuccgucaacuuguuagaagauaagcacaaugggaaacuguguaagcuaagaggaguggcuccccuccaucuggguaaaugcaacaucgccggcuggauucuugggaauccugagugugaaucucugucaacagcaaguagcugguccuacaucguugagaccucuucgucagacaacggaacuugcuauccaggcgauuuuauugacuacgaagaguugagggagcagcucagcaguguguccucuuucgaacgguuugagaucuucccgaagacaagcuccuggcccaaucacgauucaaacaagggugucaccgccgcuuguccucaugcaggggccaaaaguuuuuauaagaaucugauauggcuggugaaaaagggaaacagcuacccaaaacucucuaaguccuauaucaaugacaagggcaaagaaguauuaguucuguggggcauucaccaccccucaacgagcgcugaucaacagagucuuuaccagaacgccgacgcguacguguucgucgggacuucucgcuauuccaagaaauuuaagccugagaucgcaauucgaccaaaagugcgugaucaggagggaagaaugaauuacuauuggaccaucguggaacccggugacaagauaacauucgaggccacuggcaacuuggucguuccuagguacgcuuuugccauggaacggaacgcagggagcggaauuaucauuucggauaccccagugcaugacugcaauacaaccugucaaacgccgaaaggcgcuaucaacacuucucugcccuuccagaauauccacccuauuacaauagguaagugcccaaaguauguaaaauccaccaagcuacgccucgccacugggcugagaaacgugcccucaauccagaguaggggacuuuuuggcgcgauugccggcuucaucgaagggggauggacagguauggucgacggcugguacggguaucaucaccagaaugaacaaggaagcggcuacgcagcugaucugaaauccacccagaacgccauagacgagauuacgaauaaggugaacucuguuaucgagaaaaugaauacccaguuuacagcuguggguaaggaguucaaccacuuggagaagcggaucgaaaaucucaacaaaaaggucgaugacggguuccuggauauuuggacuuacaaugccgaguuacuggugcuccuugaaaacgagcgcacccuggacuaucaugauagcaauguuaaaaacuuguacgagaagguaaaaucacagcuaaagaacaaugcaaaggaaaucggcaacggauguuuugaguucuaucacaaaugcgacaauacauguauggaaagugugaagaacggcacuuacgauuauccuaaauacuccgaggaagccaagcugaaucgagaggagauugacggggucaaacucgaaagcaccagaauauaucaaauccuggcuauuuacucuacaguggcgucaagucuuguccuggugguuagcuugggagcaaucuccuuuuggaugugcucuaacgguucgcuccagugcaggaucuguauuuga

SEQ ID NO: 141826 - RNA, 1701 nt, Artificial Sequence; identical to SEQ ID NO: 137320
  derived and/or modified CDS sequence (opt3) from hemagglutinin__InfluenzaA__BAJ40037

SEQ ID NO: 141827 - RNA, 1701 nt, Artificial Sequence
  derived and/or modified CDS sequence (opt3) from hemagglutinin__InfluenzaA__BAJ40038
augaaggccauccugcucgugcuucuguacaccuucgcuacagcaaacgccgacacuuugugcauuggcuaucacgcgaauaacagcacggauaccgucgacacaguuuuagagaagaaugugacuguaacccauuccgugaaccugcuagaagauaagcacaaugggaaacucuguaagcugagaggagucgcuccccuucaucuggguaaaugcaacauagccggcuggaucuuggggaauccugagugugaaucucucucaacagcaaguagcugguccuacauuguggagaccucuucgucagacaacggaacuugcuauccaggcgauuuuaucgacuacgaggagcugagggagcagcugagcaguguuuccucuuucgaacgguuugagauuuucccgaagacaagcuccuggcccaaucacgauucaaacaagggugugaccgccgcuuguccucaugcaggggccaaaaguuuuuauaagaaucucaucugguuagucaaaaagggaaacagcuacccaaaacugucuaaguccuauauaaaugacaagggcaaagaagugcuuguauuguggggcauccaccaccccucaacgagcgcugaucaacagagucuguaccagaacgccgacacuuacguuuucguggggaccucucgcuauuccaagaaauuuaagccugagauugcgauccgaccaaaaguccgugaucaggagggaagaaugaauuacuauuggacaauuguggaacccggugacaagaucacuuucgaggcaaccggcaaccuaguggucccuagguacgccuuugcuauggaacggaacgccgggagcggaauaauuaucucggauacaccaguucaugacugcaauaccacgugucaaacuccgaaaggcgcaauuaacacaucucuccccuuccagaauauccacccuaucaccauugguaagugcccaaaguaugugaaauccacuaagcugcgccuugcuacagggcugagaaacguacccucaauacagaguaggggauuguuuggcgccaucgcgggcuucauugaagggggauggaccgguaugguggacggcugguacggguaucaucaccagaaugaacaaggaagcggcuacgccgcagaucucaaauccacgcagaacgcuaucgacgagauaaccaauaaggucaacucugugauugagaaaaugaauacacaguuuacugccguugguaaggaguucaaccaccuggaaaagcggaucgaaaauuuaaacaaaaagguggaugacggguuccuggauaucuggaccuacaaugcugagcuccuuguccuguuggaaaacgagcgcacacuagacuaucaugauagcaaugugaaaaaccuguacgagaagguacgaucacagcucaaaaacaaugccaaggaaauuggcaacggauguuuugaguucuaucacaagugcgacaauacuuguauggaaaguguuaaaaacggcaccuacgauuauccuaaguacuccgaggaagcaaaacugaauagagaggagaucgacggggugaaacuugaaagcacaaggauuuaucaaauacuggccaucuacucuaccgucgcuucaaguuuggugcucgucgugagccugggagcgauuuccuuuuggaugugcucuaacgguucguuacagugccggaucuguaucuga

SEQ ID NO: 141828 - RNA, 1701 nt, Artificial Sequence; identical to SEQ ID NO: 130717
  derived and/or modified CDS sequence (opt3) from hemagglutinin__InfluenzaA__BAJ40039

SEQ ID NO: 141829 - RNA, 1701 nt, Artificial Sequence
  derived and/or modified CDS sequence (opt3) from hemagglutinin__InfluenzaA__BAJ40040
augaaggccauccuggugguccuccuuuacaccuucgcuacagcaaacgccgacacucugugcauuggcuaucacgcgaauaacagcacggauaccguugacacaguguuggagaaaaauguaacugugacccauuccgucaacuuacuggaagauaagcacaaugggaaacuauguaagcucagaggaguggcuccccugcaucuugguaaaugcaacauagccggcuggauccuggggaauccugagugugaaucuuugucaacagcaaguagcugguccuacauuguugagaccucuucgucagacaacggaacuugcuauccaggcgauuuuaucgacuacgaggagcucagggagcagcugagcaguguguccucuuucgaacgguuugagauuuucccgaagacaagcuccuggcccaaucacgauucaaacaagggugucaccgccgcuuguccucaugcaggggccaaaaguuuuuauaagaaucugaucuggcucgugaaaaagggaaacagcuacccaaaauuaucuaaguccuauauaaaugacaagggccgcgaaguacugguucuuuggggcauccaccaccccucaacgagcgcugaucaacagaguuuguaccagaacgccgacacuuacguguucgucgggaccucucgauauuccaaaaaguuuaaaccugagauugcgauccguccaaaggugagagaucaggagggaaggaugaauuacuauuggacacugguggaacccggugacaaaauuacuuucgaggcaaccggcaaccuagucguuccucgguacgccuuugcuauggaacgcaacgccggguauggaaucauaauuagcgauacaccagugcaugacugcaauaccacgugucaaacuccgaagggcgcaaucaacacaucgcuccccuuccagaauauucacccuaucaccaucgguaaaugcccaaaguacguaaagucuacuaaacugagacuugcuacagggcugaggaacgugcccuccauucagucacggggauuguuuggcgccauagcgggcuucaucgaagggggauggaccgguauggucgacggcugguauggguaccaucaccagaaugaacaaggaaguggcuacgccgcagaucucaagagcacgcagaacgcuauugacgagaucaccaauaaagugaacuccguuauagagaagaugaauacacaguuuacugccguggguaaagaguucaaccaccuggaaaagcgcauugaaaauuuaaacaagaaagucgaugacggguuccuggauaucuggaccuauaaugcugagcuccuugugcuguuggaaaacgagcgaacacuagacuaccaugauucuaauguaaagaaccuguaugagaaaguuagaagccagcucaagaacaaugccaaagaaaucggcaacggauguuuugaguucuaccacaagugcgacaauacuuguauggaaucagugaagaacggcaccuaugauuacccuaaauauagugaggaagcaaagcugaauagggaggagauugacggggucaaacuugaauccacacggaucuaccaaauucuggccauauacagcaccguggcuucuucauugguccucgugguuagucugggagcgaucagcuuuuggaugugcuccaacgguucuuuacagugccguauuuguaucuga

SEQ ID NO: 141830 - RNA, 1701 nt, Artificial Sequence; identical to SEQ ID NO: 137320
  derived and/or modified CDS sequence (opt3) from hemagglutinin__InfluenzaA__BAJ40041

SEQ ID NO: 141831 - RNA, 1701 nt, Artificial Sequence
  derived and/or modified CDS sequence (opt3) from hemagglutinin__InfluenzaA__BAJ40042
augaaggccauccuggugguccuccuuuacaccuucgcuacagcaaacgccgacacucugugcauuggcuaucacgcgaauaacagcacggauaccguugacacaguguuggagaaaaauguaacugugacccauuccgucaacuuacuggaagauaagcacaaugggaaacuauguaagcucagaggaguggcuccccugcaucuugguaaaugcaacauagccggcuggauccuggggaauccugagugugaaucuuugucaacagcaaguagcugguccuacauuguugagaccucuucgucagacaacggaacuugcuauccaggcgauuuuaucgacuacgaggagcucaaggagccgcugagcaguguguccucuuucgaaagguuugagauuuuccccaagacaagcuccuggccuaaucacgauucaaacaaaggugucaccgccgcuuguccacaugcaggggccaagaguuuuuauaaaaaucugaucuggcucgugaagaaaggaaacagcuaccccaaguuaucuaaguccuauauaaaugacaaaggccgggaaguacugguucuuuggggcauccaccacccuucaacgagcgcugaucgccagaguuuguaccaaaacgccgacacuuacguguucgucgggaccucucgauauuccaagaaauuuaagccagagauugcgauccgucccaaagugagagaucaggagggaaggaugaauuacuauuggacacugguggaaccuggugacaagauuacuuucgaggcaaccggcaaccuagucguuccacgguacgccuuugcuauggaacgcaacgccgggagcggaaucauaauuucggauacaccggugcaugacugcaauaccacgugucagacucccaaaggcgcaaucaacacaucucucccuuuccagaauauucacccaaucaccaucgguaagugccccaaguauguaaaauccacuaagcugagacuugcuacagggcugaggaacgugccuucaauucaaagucggggauuguuuggcgccauagcgggcuucaucgaagggggauggaccgguauggucgacggcugguacggguaucaucaccagaaugaacagggaagcggcuacgccgcagaucucaaauccacgcagaacgcuauugacgagaucaccaauaaggugaacucuguuauagagaaaaugaauacacaauuuacugccguggguaaggaguucaaccaccuggaaaagcgcauugaaaauuuaaacaaaaaggucgaugacggguuccuggauaucuggaccuacaaugcugagcuccuugugcuguuggaaaacgagcgaacacuagacuaucaugauagcaauguaaagaaccuguacgagaagguuagaucacagcucaaaaacaaugccaaggaaaucggcaacggauguuuugaguucuaucacaagugcgacaauacuuguauggaaagugugaaaaacggcaccuacgauuauccaaaguacuccgaggaagcaaaacugaauagggaggagauugacggggucaaacuugaaagcacacggaucuaucagauucuggccauauacucuaccguggcuucaaguuugguccucgugguuagccugggagcgaucuccuuuuggaugugcucuaacgguucguuacagugccguauuuguaucuga

SEQ ID NO: 141832 - RNA, 1701 nt, Artificial Sequence; identical to SEQ ID NO: 137320
  derived and/or modified CDS sequence (opt3) from hemagglutinin__InfluenzaA__BAJ40043

SEQ ID NO: 141833 - RNA, 1701 nt, Artificial Sequence
  derived and/or modified CDS sequence (opt3) from hemagglutinin__InfluenzaA__BAJ40044
augaaggccauccuggugguccuccuuuacaccuucgcuacagcaaacgccgacacucugugcauuggcuaucacgcgaauaacagcacggauaccguugacacaguguuggagaaaaauguaacugugacccauuccgucaacuuacuggaagauaagcacaaugggaaacuauguaagcucagaggaguggcuccccugcaucuugguaaaugcaacauagccggcuggauccuggggaauccugagugugaaucuuugucaacagcaaguagcugguccuacauuguugagaccucuucgucagacaacggaacuugcuauccaggcgauuuuaucgacuacgaggagcagaaggagcaacucagcaguguguccucuuucgaaagguuugagauuuucccgaagacaagcuccuggcccaaucacgauucaaacaaaggugucaccgccgcuuguccucaugcaggggccaagaguuuuuauaaaaaucugaucuggcuggugaagaaaggaaacagcuacccaaagcucucuaaguccuauauaaaugacaaaggcaaggaaguauuaguucuguggggcauccaccaccccucaacgagcgcugaucagcagagucuuuaccagaacgccgacgcguacguguucgucgggacuucucgguauuccaaaaaguuuaaaccugagauugcaauccgcccaaaggugcgagaucaagagggacguaugaauuacuauuggaccuugguggaacccggugacaaaauuacauucgaggccacuggcaaccuggucguuccuagauacgcuuuugccauggaaaucaacgcagggagcggaauaauuaucucggauaccccagugcaugacugcaauacaaccugucagacgccgaagggcgcuauuaacacuucucuacccuuccagaauauccacccuaucacaauugguaagugcccaaaauauguaaaguccaccaaacucaggcuggccacugggcuucggaacgugcccucaauacagagucgcggacuguuuggcgcgaucgccggcuucauugaagggggauggacagguauggucgacggcugguacggguaucaucaccaaaaugaacagggaagcggcuacgcagcugauuugaaguccacccagaacgccaucgacaaaauaacgaauaaggugaacucuguuauugagaagaugaauacccaguuuacagcuguggguaaagaguucaaccaccucgaaaagagaaucgagaaucugaacaaaaaggucgaugacggguucuuagauaucuggacuuacaaugccgaacugcucgugcuucuggagaacgaaaggaccuuggacuaucaugauagcaauguuaaaaaccuauacgagaagguacggucacaacugaagaacaaugcaaaagagauuggcaacggauguuuugaguucuaucacaagugcgacaauacauguauggaaagugugaaaaacggcacuuacgauuauccuaaguacuccgaagaggccaaacucaaucgcgaagagaucgacggggucaagcuggagagcacccgaauuuaucagauacuugcuaucuacucuacaguggcgucaagucuggucuuggugguuagccucggagcaauuuccuuuuggaugugcucuaacgguucgcugcagugcagaaucuguaucuga

SEQ ID NO: 141834 - RNA, 1701 nt, Artificial Sequence; identical to SEQ ID NO: 141796
  derived and/or modified CDS sequence (opt3) from hemagglutinin__InfluenzaA__BAJ40045

SEQ ID NO: 141835 - RNA, 1701 nt, Artificial Sequence
  derived and/or modified CDS sequence (opt3) from hemagglutinin__InfluenzaA__BAJ40046
augaaggccauccuggugguccuccuuuacaccuucgcuacagcaaacgccgacacucugugcauuggcuaucacgcgaauaacagcacggauaccguugacacaguguuggagaaaaauguaacugugacccauuccgucaacuuacuggaagauaagcacaaugggaaacuauguaagcucagaggaguggcuccccugcaucuugguaggugcaacauagccggcuggauccuggggaauccugagugugaaucuuugucaacagcaaguagcugguccuacauuguugagaccucuaucucggacaacggaacuugcuauccaggcgauuuuauugacuacgaggagcucaaagagcagcugucaagcgugaguuccuucgaacgguuugagaucuucccgaagacaucuagcuggcccaaucacgauuccaacaagggugucaccgccgcuuguccucaugcaggggccaaaucauuuuauaagaaucugauauggcucgugaaaaagggaaacaguuacccaaaauuaagcaagucuuauaucaaugacaagggcaaagaaguacugguucuuuggggcauucaccaccccuccacgucagcugaucaacagagcuuguaccagaacgccgacgcguacguguucgucgggaccagucgcuauucuaagaaauuuaagccugagaucgcaauucgaccaaaagugcgugaucaggagggaagaaugaauuacuauuggacucugguggaacccggugacaagaucacauucgaggccacuggcaaccuagucguuccuagguacgcuuuugccauggaacggaacgcaggguccggaauaauuaucagcgauaccccagugcaugacugcaauacaaccugucaaacgccgaaaggcgcuauuaacacuucgcuccccuuccagaauauccacccuaucacaauugguaagugcccaaaguauguaaaaucuaccaagcugcgccuugccacugggcugagaaacgugcccuccauacagucaaggggauuguuuggcgcgaucgccggcuucauugaagggggauggacagguauggucgacggcugguacggguaucaucaccagaaugaacaaggaaguggcuacgcagcugaucucaaaagcacccagaacgccaucgacaagauaacgaauaaagugaacuccguuauugagaagaugaauacccaguuuacagcuguggguaaggaguucaaccaccuggaaaagaagaucgagaauuuaaacaaaaaggucgaugacggguuccuggauaucuggacuuacaaugccaaacuccuugugcuguuggaaaacgagcggacccuagacuaucaugauucuaauguaaagaaccuguacgaaaagguucgcagccagcucaaaaacaaugcaaaggagauuggcaacggauguuuugaguucuaucacaaaugcgacaauacauguauggaaucagugaagaacggcacuuacgauuauccuaaauacagugaggaagccaagcugaaucgagaggaaaucgacggggucaaacuugaguccaccagaauuuaucaaauacuggcuaucuacagcacaguggcgucuucauugguccucgugguuagucugggagcaauuagcuuuuggaugugcuccaacgguucuuuacagugcaggaucuguaucuga

SEQ ID NO: 141836 - RNA, 1701 nt, Artificial Sequence; identical to SEQ ID NO: 141819
  derived and/or modified CDS sequence (opt3) from hemagglutinin__InfluenzaA__BAJ40047

SEQ ID NO: 141837 - RNA, 1701 nt, Artificial Sequence; identical to SEQ ID NO: 141790
  derived and/or modified CDS sequence (opt3) from hemagglutinin__InfluenzaA__BAJ40048

SEQ ID NO: 141838 - RNA, 1701 nt, Artificial Sequence
  derived and/or modified CDS sequence (opt3) from hemagglutinin__InfluenzaA__BAJ40050
augaaggccauccuggugguccuccuuuacaccuucgcuacagcaaacgccgacacucugugcauuggcuaucacgcgaauaacagcacggauaccguugacacaguguuggagaaaaauguaacugugacccauuccgucaacuuacuggaagauaagcacaaugggaaacuauguaagcucagaggaguggcuccccugcaucuugguaaaugcaacauagccggcuggauccuggggaauccugagugugaaucuuugucaacagcaaguagcugguccuacauuguugagaccucuucgucagacaacggaacuugcuauccaggcgauuuuaucgacuacgaggagcucaaggagcagcugagcaguguguccucuuucgaaagguuugagauuuucccgaagacaagcuccuggcccaaucacgauucaaacaaaggugucaccgccgcuuguccucaugcaggggccaagaguuuuuauaaaaaucugaucuggcucgugaagaaaggaaacagcuacccaaaguuaucuaaguccuauauaaaugacaaaggcaaggaaguacugguucuuuggggcauccaccaccccucaacgagcgcugaucaacagaguuuguaccagaacgccgacgcguacguguucgucgggacuucucgguauuccaaaaaguuuaaaccugagauugcaauccgcccaaaggugcgagaucaggagggacguaugaauuacuauuggacccugguggaacccggugacaaaauuacauucgaggccacuggcaaccuagucguuccuagauacgcuuuugccauggaaaggaacgcagggagcggaaucauaauuucggauaccccagugcaugacugcaauacaaccugucaaacgccgaagggcgcuaucaacacuucucuccccuuccagaauauucacccuaucacaaucgguaagugcccaaaauauguaaaguccaccaaacugcggcuugccacugggcugcgcaacgugcccucaauucagaguagaggauuguuuggcgcgauagccggcuucaucgaagggggauggacagguauggucgacggcugguacggguaucaucaccagaaugaacaaggaagcggcuacgcagcugaucucaaguccacccagaacgccauugacaaaaucacgaauaaggugaacucuguuauagagaagaugaauacccaguuuacagcuguggguaaagaguucaaccaccuggaaaagaggauugagaauuuaaacaaaaaggucgaugacggguuccuggauaucuggacuuacaaugccgaacuccuugugcuguuggagaacgaacggacccuagacuaucaugauagcaauguaaagaaccuguacgagaagguucgcucacagcucaagaacaaugcaaaagagaucggcaacggauguuuugaguucuaucacaagugcgacaauacauguauggaaagugugaaaaacggcacuuacgauuauccuaaguacuccgaagaggccaaacugaaucgagaagagauugacggggucaaacuugagagcaccagaaucuaucaaauucuggcuauauacucuacaguggcgucaaguuugguccucgugguuagccugggagcaaucuccuuuuggaugugcucuaacgguucguuacagugcaggauuuguaucuga

SEQ ID NO: 141839 - RNA, 1701 nt, Artificial Sequence; identical to SEQ ID NO: 131881
  derived and/or modified CDS sequence (opt3) from hemagglutinin__InfluenzaA__BAJ40051

SEQ ID NO: 141840 - RNA, 1701 nt, Artificial Sequence
  derived and/or modified CDS sequence (opt3) from hemagglutinin__InfluenzaA__BAJ40052
augaaggccauccuggugguccuccuuuacaccuucgcuacagcaaacgccgacacucugugcauuggcuaucacgcgaauaacagcacggauaccguugacacaguguuggagaaaaauguaacugugacccauuccgucaacuuacuggaagauaagcacaaugggaaacuauguaagcucagaggaguggcuccccugcaucuugguaaaugcaacauagccggcuggauccuggggaauccugagugugaaucuuugucaacagcaaguagcugguccuacauuguugagaccucuucgucagacaacggaacuugcuauccaggcgauuuuaucgacuacgaggagcucagggagcagcugagcaguguguccucuuucgaacgguuugagauuuucccgaagacaagcuccuggcccaaucacgauucaaacaagggugucaccgccgcuuguccucaugcaggggccaaaaguuuuuauaagaaucugaucuggcucgugaaaaagggaaacagcuacccaaaauuaucuaaguccuauauaaaugacaagggccgcgaaguacugguucuuuggggcauccaccaccccucaacgacugcugaucaacagagcuuguaccagaacgccgacaccuacguguucgucgggacaagucgauauucuaaaaaguuuaaaccugagauugcgauccguccaaaggugagagaucaggagggaaggaugaauuacuauuggacucugguggaacccggugacaaaauuaccuucgaggcaacaggcaaccuagucguuccucgguacgccuuugcuauggaacgcaacgccggguccggaaucauaauuagcgauaccccagugcaugacugcaauacgacuugucaaacaccgaagggcgcaaucaacaccucgcuccccuuccagaauauucacccuaucacuaucgguaaaugcccaaaguauguaaagucuacaaaacugagacuugcuaccgggcugaggaacgugcccuccauucagucacggggauuguuuggcgccauagcgggcuucaucgaagggggauggacggguauggucgacggcugguacggguaucaucaccagaaugaacaaggaaguggcuacgccgcagaucucaagagcacccagaacgcuauugacgagaucacaaauaaagugaacuccguuauagagaagaugaauacucaguuuaccgccguggguaaagaguucaaccaccuggaaaagcgcauugaaaauuuaaacaagaaagucgaugacggguuccuggauaucuggacauacaaugcugagcuccuugugcuguuggaaaacgagcgaacucuagacuaucaugauucuaauguaaagaaccuguacgagaaaguuagaagccagcucaagaacaaugccaaagaaaucggcaacggauguuuugaguucuaucacaagugcgacaauaccuguauggaaucagugaagaacggcacauacgauuauccuaaauacagugaggaagcaaagcugaauagggaggagauugacggggucaaacuugaauccacccggaucuaucaaauucuggccauauacagcacuguggcuucuucauugguccucgugguuagucugggagcgaucagcuuuuggaugugcuccaacgguucuuuacagugccguauuuguaucuga

SEQ ID NO: 141841 - RNA, 1701 nt, Artificial Sequence
  derived and/or modified CDS sequence (opt3) from hemagglutinin__InfluenzaA__BAJ40053
augaaggccauccuggugguccuccuuuacaccuucgcuacagcaaacgccgacacucugugcauuggcuaucacgcgaauaacagcacggauaccguugacacaguguuggagaaaaauguaacugugacccauuccgucaacuuacuggaagauaagcacaaugggaaacuauguaagcucagaggaguggcuccccugcaucuugguaaaugcaacauagccggcuggauccuggggaauccugagugugaaucuuugucaacagcaaguagcugguccuacauuguugagaccucuucgucagacaacggaacuugcuauccaggcgauuuuaucgacuacgaggagcucagggagcagcugagcaguguguccucuuucgaacgguuugagauuuucccgaagacaagcuccuggcccaaucacgauucaaacaagggugucaccgccgcuuguccucaugcaggggccaaaaguuuuuauaagaaucugaucuggcucgugaaaaagggaaacagcuacccaaaauuaucuaaguccuauauaaaugacaagggcaaagaaguacugguucuuuggggcauccaccaccccucaacgagcgcugaucaacagaguuuguaccagaacgccgacacuuacguguucgucgggaccucucgcuauuccaagaaauuuaagccugagauugcgauccgaccaaaagugcgugaucaggagggaagaaugaauuacuauuggacacugguggaacccggugacaagauuacuuucgaggcaaccggcaaccuagucguuccuagguacgccuuugcuauggaacggaacgccgggagcggaaucauaauuucggauacaccagugcaugacugcaauaccacgugucaaacuccgaaaggcgcaaucaacacaucucuccccuuccagaauauucacccuaucaccaucgguaagugcccaaaguauguaaaauccacuaagcugcgccuugcuacagggcugagaaacgugcccucaauucagaguaggggauuguuuggcgccauagcgggcuucaucgaagggggauggaccgguauggucgacggcugguacggguaucaucaccagaaugaacaaggaagcggcuacgccgcagaucucaaauccacgcagaacgcuauugacgagaucaccaauaaggugaacucuguuauagagaaaaugaauacacaguuuacugccguggguaaggaguucaaccaccuggaaaagcggauugaaaauuuaaacaaaaaggucgaugacggguuccuggauaucuggaccuacaaugcugagcuccuugugcuguuggaaaacgagcgcacacuagacuaucaugauagcaauguaaagaaccuguacgagaagguucgaaaccagcucaaaaauaacgccaaggaaaucggcaauggauguuuugaguucuaucacaagugcgacaacacuuguauggaaucagugaaaaauggcaccuacgauuauccuaaguacagugaggaagcaaaacugaacagagaggagauugacggggucaaacuugaauccacaaggaucuaucaaauucuggccauauacagcaccguggcuucuucauugguccucgugguuagucugggagcgaucagcuuuuggaugugcuccaaugguucuuuacagugccggauuuguaucuga

SEQ ID NO: 141842 - RNA, 1701 nt, Artificial Sequence; identical to SEQ ID NO: 131881
  derived and/or modified CDS sequence (opt3) from hemagglutinin__InfluenzaA__BAJ40054

SEQ ID NO: 141843 - RNA, 1701 nt, Artificial Sequence
  derived and/or modified CDS sequence (opt3) from hemagglutinin__InfluenzaA__BAJ40055
augaaggccauccuggugguccuccuuuacaccuucgcuacagcaaacgccgacacucugugcauuggcuaucacgcgaauaacagcacggauaccguugacacaguguuggagaagaauguaacugugacccauuccgucaacuuacuggaagauaagcacaaugggaaacuauguaagcucagaggaguggcuccccugcaucuugguaaaugcaacauagccggcuggauccuggggaauccugagugugaaucuuugucaacagcaaguagcugguccuacauuguugagaccucuucgucagacaacggaacuugcuauccaggcgauuuuaucgacuacgaggagcucagggagcagcugagcaguguguccucuuucgaacgguuugagauuuucccgaagacaagcuccuggcccaaucacgauucaaacaagggugucaccgccgcuuguccucaugcaggggccaaaaguuuuuauaagaaucugaucuggcucgugaaaaagggaaacagcuacccaaaauuaucuaaguccuauauaaaugacaagggcaaagaaguacugguucuuuggggcauccaccaccccucaacgagcacugaucaacagaguuuguaccagaacgcugacaccuacguguucgucgggacaucucgcuauuccaagaaauuuaagccugagauugccauccgaccaaaagugcgugaucaggagggaagaaugaauuacuauuggacucugguggaacccggugacaagauuaccuucgaggcgacaggcaaccuagucguuccuagguacgcauuugccauggaacggaacgcugggagcggaaucauaauuucggauaccccagugcaugacugcaauacgaucugucaaacuccgaaaggcgccauuaacacaucucuccccuuccagaauauccacccuaucaccauugguaagugcccaaaguauguaaaauccacuaagcugcgccuugcaacagggcugagaaacgugcccucaguccagaguaggggauuguuuggcgcuauagccggcuucaucgaagggggauggaccgguaugguggacggcugguacggguaucaucaccagaaugaacaaggaagcggcuacgcggccgaucucaaauccacgcagaacgcaauugacgagaucaccaauaagguuaacucugugauagagaaaaugaauacacaguuuacugcugucgguaaggaguucaaccaccuggaaaagcggauugaaaauuuaaacaaaaagguggaugacggguuccuggauaucuggaccuacaaugccgagcuccuuguacuguuggaaaacgagcgcacacuagacuaucaugauagcaauguuaaaaaccuguacgagaaggugcgaucacagcucaaaaacaaugcuaaggaaaucggcaacggauguuuugaguucuaucacaagugcgacaauacuuguauggaaagugucaaaaacggcaccuacgauuauccuaaguacuccgaggaagccaaacugaauagagaggagauugacggggugaaacuugaaagcacaaggaucuaucaaauucuggcaauauacucuaccgucgccucaaguuuggugcucguugugagccugggagcuaucuccuuuuggaugugcucuaacgguucguuacagugccggauuuguaucuga

SEQ ID NO: 141844 - RNA, 1701 nt, Artificial Sequence
  derived and/or modified CDS sequence (opt3) from hemagglutinin__InfluenzaA__BAJ40056
augaaggccauccuggugguccuccuuuacaccuucgcuacagcaaacgccgacacucugugcauuggcuaucacgcgaauaacagcacggauaccguugacacaguguuggagaaaaauguaacugugacccauuccgucaacuuacuggaagauaagcacaaugggaaacuauguaagcucagaggaguggcuccccugcaucuugguaaaugcaacauagccggcuggauccuggggaauccugagugugaauugcucucuacagcaucaaguuggagcuacauuguugagaccuccucuucggacaacggaacuugcuauccaggcgauuuuaucgacuacgaggagcugagggagcagcugucaagcgugaguuccuucgaacgguuugagauuuucccgaagacaucuagcuggcccaaucacgauuccaacaagggugucaccgccgcuuguccucaugcaggggccaaaucauuuuauaagaaucucaucuggcaagugaaaaagggaaacaguuacccaaaauuaagcaagucuuauauaaaugacaagggcaaagaaguacugguucuuuggggcauccaccaccccuccacgucagcugaucagcagagcuuguaccagaacgccgacgcguacguguucgucgggacuucccgcuauucuaagaaauuuaagccugagauugcaauccgaccaaaagugcgugaucaagagggaagaaugaauuacuauuggacccugguggaacccggugacaagauuacauucgaggccacuggcaaccuagucguuccuaggcaugcuuuugccauggaacggaacgcaggguccggaaucauaauuagcgauaccccagugcacaauugcaacacaaccugucagacgccgaaaggcgcuaucaauacuucgcuccccuuccagaacauucauccuaucacaaucgguaagugcccaaaguacguaaaaucucccaagcugcgccuugccaccgggcugagaaaugugccuuccauucagucaaggggauuguuuggcgcgauagccggcuucaucgaagggggauggacugguauggucgacggcugguauggguaccaccaccaaaacgaacagggaaguggcuaugcagcugaccucaaaagcacacagaaugccauugauaagaucaccaacaaagugaauaguguuauagagaagaugaacacgcaguuuaccgcuguggguaaggaguucaaucaucuggaaaaacggauugagaacuuaaauaagaaagucgacgauggguuccuggacaucuggacauacaacgccgaacuccuugugcuguuggagaaugaacgcacucuagauuaccacgacucuuauguaaagaaccuguacgagaaaguucgaagccaacucaagaacaaugcaaaggagaucggcaacggauguuuugaguucuaucauaaaugcgauaauaccuguauggaaucagugaagaacggcacauacgacuauccaaaauacagugaagaggccaagcugaauagagaagagauugauggggucaaacuugaguccacuaggaucuaucagauucuggcuauauacagcaccguggcgucuucauugguccucgugguuagucugggagcaaucagcuuuuggaugugcuccaacgguucuuuacagugccggauuuguaucuga

SEQ ID NO: 141845 - RNA, 1701 nt, Artificial Sequence
  derived and/or modified CDS sequence (opt3) from hemagglutinin__InfluenzaA__BAJ40057
augaaggccauccuggugguccuccuuuacaccuucgcuacagcaaacgccgacacucugugcauuggcuaucacgcgaauaacagcacggauaccguugacacaguguuggagagaaauguaacugugacccauuccgucaacuuacuggaagauaaacacaaugggaagcuauguaaacucaggggaguggcuccccugcaucuugguaagugcaacauagccggcuggauccuggggaauccugagugugaaucuuugucaacagcaaguagcugguccuacauuguugagaccucuucgucagacaacggaacuugcuauccaggcgauuuuaucgacuacgaagaacuccgggagcagcugagcaguguguccucuuucgaacgcuuugagauuuucccgaaaacaagcuccuggcccaaucacgauucaaacaagggugucaccgccgcuuguccucaugcaggggccaagaguuuuuauaaaaaucugaucuggcucgugaagaaaggaaacagcuacccaaaguuaucuaaauccuauauaaaugacaagggcaaggaaguacugguucuuuggggcauccaccaccccucaacgagcgcugaucaacagaguuuguaccagaacgccgacacuuacguguucgucgggaccucucgauauuccaaaaaguuuaaaccugagauugcgauccguccaaaggugagagaucaggagggaaggaugaauuacuauuggacacugguggaacccggugacaaaauuacuuucgaggcaaccggcaaccuagucguuccucgguacgccuuugcuauggaacgcaacgccgggagcggaaucauaauuucggauacaccagugcaugacugcaauaccacgugucaaacuccgaagggcgcaaucaacacaucucuccccuuccagaauauucacccuaucaccaucgguaaaugcccaaaguauguaaaguccacuaaacugagacuugcuacagggcugaggaacgugcccucaauucagagucggggauuguuuggcgccauagcgggcuucaucgaagggggauggaccgguauggucgacggcugguacggguaucaucaccagaaugaacaaggaagcggcuacgccgcagaucucaaguccacgcagaacgcuauugacgagaucaccaaugaggugaacucuguuauagagaaaaugaauacacaguuuacugccguggguaaggaguucaaccaccuggaaaaacgcauugagaauuuaaacaagaaggucgaugacggguuccuggauaucuggaccuacaaugcugaacuccuugugcuguuggagaacgagcgaacacuagacuaucaugauagcaauguaaagaaccuguacgaaaagguuagaucacagcucaaaaacaaugccaaggagaucggcaacggauguuuugaguucuaucacaaaugcgacaauacuuguauggagagugugaagaacggcaccuacgauuauccuaaguacuccgaagaggcaaaacugaauagggaggaaauugacggggucaaacuugagagcacacggaucuaucaaauucuggccauauacucuaccguggcuucaaguuugguccucgugguuagccugggagcgaucuccuuuuggaugugcucuaacgguucguuacagugccguauuuguaucuga

SEQ ID NO: 141846 - RNA, 1701 nt, Artificial Sequence; identical to SEQ ID NO: 137320
  derived and/or modified CDS sequence (opt3) from hemagglutinin__InfluenzaA__BAJ40058

SEQ ID NO: 141847 - RNA, 1701 nt, Artificial Sequence; identical to SEQ ID NO: 141790
  derived and/or modified CDS sequence (opt3) from hemagglutinin__InfluenzaA__BAJ40059

SEQ ID NO: 141848 - RNA, 1701 nt, Artificial Sequence; identical to SEQ ID NO: 131881
  derived and/or modified CDS sequence (opt3) from hemagglutinin__InfluenzaA__BAJ40060

SEQ ID NO: 141849 - RNA, 1701 nt, Artificial Sequence
  derived and/or modified CDS sequence (opt3) from hemagglutinin__InfluenzaA__BAJ40061
augaaggccauccuggugguccuccuuuacaccuucgcuacagcaaacgccgacacucugugcauuggcuaucacgcgaauaacagcacggauaccguugacacaguguuggagaaaaauguaacugugacccauuccgucaacuuacuggaagauaagcacaaugggaaacuauguaagcucagaggaguggcuccccugcaucuugguaaaugcaacauagccggcuggauccuggggaauccugagugugaaucuuugucaacagcaaguagcugguccuacauuguugagaccucuucgucagacaacggaacuugcuauccaggcgauuuuaucgacuacgaggagcucagggagcagcugagcaguguguccucuuucgaacgguuugagauuuucccgaaggccagcuccuggcccaaucacgauucaaacaagggugucacagcugcauguccucaugccggggcuaaaaguuuuuauaagaaucugaucuggcucgugaaaaagggaaacagcuacccaaaauuaucuaaguccuauauaaaugacaagggcaaagaaguacugguucuuuggggcauccaccaccccucaaccagcgccgaucaacagaguuuguaccagaacgcggacgcauacguguucgucgggacgucucgcuauuccaagaaauuuaagccugagauugccauccgaccaaaagugcgugaucaggagggaagaaugaauuacuauuggacucugguggaacccggugacaagauuaccuucgaggcuacaggcaaccuagucguuccuagguacgccuuugcaauggaacggaacgcugggagcggaaucauaauuucggauacuccagugcaugacugcaauaccacaugucaaaccccgaaaggcgccaucaacacgucucuccccuuccagaauauucacccuaucacuaucgguaagugcccaaaguauguaaaauccacaaagcugcgccuugcgaccgggcugagaaacgugcccucaauucagaguaggggauuguuuggcgccauagcaggcuucaucgaagggggauggacugguauggucgacggcugguacggguaucaucaccagaaugaacaaggaagcggcuacgcugccgaucucaaauccacacagaacgcuauugacaagaucaccaauaaagugaacucuguuauagagaagaugaauacgcaguuuaccgccguggguaaggaguucaaccaccuggaaaaacggauugagaauuuaaacaagaaagucgaugacggguuccuggauaucuggacauacaaugcagaacuccuugugcuguuggagaacgaacgcacucuagacuaucaugauagcaauguaaagaaccuguacgagaaaguucgaucacagcucaagaacaaugccaaggagaucggcaacggauguuuugaguucuaucacaaaugcgacaauaccuguauggaaagugugaagaacggcacauacgauuauccuaaauacuccgaagaggcuaagcugaauagagaagagauugacggggucaaacuugagagcacuaggaucuaucaaauucuggcgauauacucuaccguggcaucaaguuugguccucgugguuagccugggagccaucuccuuuuggaugugcucuaacgguucguuacagugccggauuuguaucuga

SEQ ID NO: 141850 - RNA, 1701 nt, Artificial Sequence
  derived and/or modified CDS sequence (opt3) from hemagglutinin__InfluenzaA__BAJ40062
augaaggccauccuggugguccuccuuuacaccuucgcuacagcaaacgccgacacucugugcauuggcuaucacgcgaauaacagcacggauaccguugacacaguguuggagaaaaauguaacugugacccauuccgucaacuuacuggaagauaagcacaaugggaaacuauguaagcucagaggaguggcuccccugcaucuugguaaaugcaacauagccggcuggauccuggggaauccugagugugaaucuuugucaacagcaaguagcugguccuacauuguugagaccucuucgucagacaacggaacuugcuauccaggcgauuuuaucgacuacgaggagcucagggagcagcugagcaguguguccucuuucgaacgguuugagauuuucccgaagacaagcuccuggcccaaucacgauucaaacaagggugucaccgccgcuuguccucaugcaggggccaaaaguuuuuauaagaaucugaucuggcucgugaaaaagggaaacagcuacccaaaauuaucuaaguccuauauaaaugacaagggcaaagaaguacugguucuuuggggcauccaccaccccucaacgagcgcugaucaacagaguuuguaccagaacgccgacacuuacguguucgucgggaccucucgcuauuccaagaaauuuaagccugagauugcgauccgaccaaaagugcgugaucaggagggaagaaugaauuacuauuggacacugguggaacccggugacaagauuacuuucgaggcaaccggcaaccuagucguuccuagguacgccuuugcuauggaacggaacgccgggagcggaaucauaauuucggauacaccagugcaugacugcaauaccacgugucaaacuccgaaaggcgcaaucaacacaucucuccccuuccagaauauucacccuaucaccaucgguaagugcccaaaguauguaaaauccacuaagcugcgccuugcuacagggcugagaaacgugcccucaauucagaguaggggauuguuuggcgccauagcgggcuucaucgaagggggauggaccgguauggucgacggcugguacggguaucaucaccagaaugaacaaggaagcggcuacgccgcagaucucaaauccacgcagaacgcuauugacgagaucaccaauaaggugaacucuguuauagagaaaaugaauacacaguuuacugccguggguaaggaguucaaccaccuggaaaagaaaauugaaaauuuaaacaagaaagucgaugacggguuccuggauaucuggaccuacaaugcugagcuccuugugcuguuggaaaacgagcggacacuagacuaucaugauagcaauguaaagaaccuguacgagaaaguucgcucacagcucaagaacaaugccaaggaaaucggcaacggauguuuugaguucuaucacaaaugcgacaauacuuguauggaaagugugaagaacggcaccuacgauuauccuaaauacuccgaggaagcaaagcugaaucgagaggagauugacggggucaaacuugaaagcacaagaaucuaucaaauucuggccauauacucuaccguggcuucaaguuugguccucgugguuagccugggagcgaucuccuuuuggaugugcucuaacgguucguuacagugcaagauuuguaucuga

SEQ ID NO: 141851 - RNA, 1701 nt, Artificial Sequence; identical to SEQ ID NO: 141849
  derived and/or modified CDS sequence (opt3) from hemagglutinin__InfluenzaA__BAJ40063

SEQ ID NO: 141852 - RNA, 1701 nt, Artificial Sequence; identical to SEQ ID NO: 137320
  derived and/or modified CDS sequence (opt3) from hemagglutinin__InfluenzaA__BAJ40064

SEQ ID NO: 141853 - RNA, 1707 nt, Artificial Sequence
  derived and/or modified CDS sequence (opt3) from hemagglutinin__InfluenzaA__BAK23398
auggagaagaucgugcugcuccuugccauugucagccugguuaaauccgaccagauaugcaucggcuaccacgcuaacaauucuaccgaacaaguggauacaauuauggagaagaacguaacugugacgcaugcacaggacaucuuggaaaagacccacaaugggaaguuaugugaucuggacggagucaaaccccuaauucucagagauugcucaguggccgguuggcugcuuggcaacccuaugugugacgaguuccugaauguuccagaauggaguuauaucguggagaagauaaacccggucaaugauuugugcuaccccgggaacuuuaaugacuaugaggaacucaagcaucugcugagcaggaucaaccacuucgagaaaauucagaucuuuccuaaguccucuuggucggaucaugaagcgucaagcggagugaguuccgcuuguccauaccagggccggucuagcuucuuucgcaauguaguuuggcucgugaaaaaggacaacgccuaucccacaauuaaaaaguccuacaauaacacuaaucaagaggauuuacugauccuuugggguauacaccacccuaacgacgcagccgagcagacccgauuguaucagaacccaacaaccuacauuucagucgggacaaguacucugaaucagcgucuagugcccaagaucgcuaccagaagcaaagugaacggacaaucuggcaggauugaguucuuuuggacgauccucaaguccaaugaugucaucaacuucgaaucaaauggcaacuuuauugcaccugaaaaugccuacaaaauaguuaagaaaggggacagcacuaucaugaagagugagcuggaauauggaaacugcaauaccaaaugucagacaccaauuggugcuaucaacucuuccaugccguuccauaauauacacccccuuacuauuggcgagugcccuaaguacgugaaaagcaaccggcugguauuggccaccgggcuccgcaauucgccaagaggagagaggcggcgcaaaaagcgaggccuguuuggugcgaucgcaggguucaucgaaggaggcuggcagggcaugguggacgggugguauggauaccaucacucuaacgagcaggguuccggcuaugccgcugauaaagaaucaacacaaaaggccauugacggggucaccaauaaagugaacaguaucauugauaagaugaacacgcaguuugaggcaguuggaagagaguucaauaacuuagaaaggcggauagagaaucugaacaagaaaauggaagacggcuuccucgauguguggacuuacaaugcugagcuucuggucuugauggaaaacgagcguacacuagacuuucacgauagcaaugugaagaaccuguaugacaaaguacgccuccagcugagagauaaugccaaggaacuugguaacggguguuucgaguuuuaccauaggugcgacaaugaguguauggaauccguuaaaaacggcaccuacgauuauccccaauacucugaggaagcgcggcugaagcgagaggagaucagcggagugaaguuggaaucaauuggcacuuaucagauccucaguaucuacuccacagucgccagcucucuggcauuagcuauuaugauggccgggcuguuccuauggaugugcucaaauggaagucuccagugccgcauauguaucuga

SEQ ID NO: 141854 - RNA, 1707 nt, Artificial Sequence
  derived and/or modified CDS sequence (opt3) from hemagglutinin__InfluenzaA__BAK23400
auggagaagaucgugcugcuccuugccauugucagccugguuaaauccgaccagauaugcaucggcuaccacgcuaacaauucuaccgaacaaguggauacaauuauggagaagaacguaacugugacgcaugcacaggacaucuuggaaaagacccacaaugggaaauuaugugaucugaacggagucaaaccccuaauucucagagacugcucaguggccgguuggcugcuuggcaauccuaugugugaugaguuccugaacguuccagaauggaguuauaucguggagaagauaaauccggcgaacgacuugugcuaccccggggauuuuaaugacuaugaggaacucaagcaucugcugagcaggaucaaccacuucgagaaaauucagaucauuccuaaguccucuuggucggaucaugaagcuaguagcggagucaguuccgccuguccauaccagggccggucuagcuuuuuccgcaaugugguauggcucaucaaaaaggacaacgcauaucccacaauaaaacgauccuacaauaacacuaaucaagaggauuuacugguucuuugggguauucaccacccuaacgacgccgcugagcagacccguuuguaucauaacccaacaaccuacaucucaguggggacuucaacacugaaucagaggcuaguccccaagauugcaaccagaagcaaggugaacggacagucuggccggauggaauuuuucuggacgauccucaaaccuaaugaugccaucaacuuugaguccaauggcaacuucauugcuccagaaaaugccuacaagauagugaaaaagggggacucaacuaucaugaaaagcgagcuggaauauggaaacugcaauaccaagugucaaacaccgauuggugcgaucaacaguucuaugcccuuucacaauauacauccucuuacuauuggcgagugcccaaaauacgucaaguccagccgccugguuuuggcaaccgggcucagaaacucgccccagggaaagucuaggcggaaaaagcgcggccuguucggugccaucgcuggguuuaucgagggaggcuggcagggcaugguggacgggugguauggauaccaccacuccaaugaacaggguucaggcuaugccgcagauaaagagaguacacaacgagcuauugacgggguaaccaacaaggugaauagcaucauugauaaaaugaacacgcaguucgaagccgucggaagagaguuuaacaauuuagaaaggcggauagagaaccugaauaagaagauggaggacggcuuccucgauguguggacuuacaacgcggaacuucugguuuugauggagaaugaacguacacuagacuuccaugauuccaacgugaaaaaucuguaugacaagguccgccuccagcugagagauaacgccaaagagcuugguaauggguguuuugaguucuaccacaggugcgacaacgaauguauggagucugugcggaauggcaccuacgauuauccucaauacagcgaagaggcacgacugaagcgcgaagagaucucaggaguaaaauuggagaguauuggcaucuaucagauccucuccauuuacagcacuguugcuucuucacuggccuuagcuauaaugguggccgggcuguuucuauggaugugcaguaacggaagccuccagugcagaaucuguauuuga

SEQ ID NO: 141855 - RNA, 1707 nt, Artificial Sequence
  derived and/or modified CDS sequence (opt3) from hemagglutinin__InfluenzaA__BAK23401
auggagaagaucgugcugcuccuugccauugucagccugguuaaauccgaccagauaugcaucggcuaccacgcuaacaauucuaccgaacaaguggauacaauuauggagaagaacguaacugugacgcaugcacaggacaucuuggagaaaacccacaaugggaaguuaugugaucuggacggagucaaaccccuaauucucagagauugcucaguggccgguuggcugcuuggcaacccuaugugugacgaguuccugaauguuagugaauggagcuauaucguggagaagauaaacccagcgaaugauuugugcuacccggggaacuuuaauaacuaugaggaacucaagcaucugcuguccaggaucaaucgguucgagaaaauucagaucauucccaagucuucguggccugaccacgaggcuucacucggagucagcagugccuguccauaccagggcggucccuccuuuuaucgcaacgugguaugguuaaucaaaaagaauaacacauacccuauaauuaaaaagucuuaucauaauacuaaccaagaagaucugcuuguuuugugggggauccaccacccaaacgacgaggaagaacagacccgaauuuacaagaaucccacaaccuacaucagcgugggaacuuccacacugaaccagcgucuagucccuaaaaucgcaaccagaucaaaggugaauggccagaguggcaggguggaguucuuuuggacgauucucaaaagcaacgauacuauaaauuucgaaucuaacgggaauuuuaucgccccagaaaacgcuuauaagauugucaaaaagggagacuccaccaucaugaaaucagagcuggaguacgguaauugcaacacaaagugucaaacuccgauaggcgcaauuaauagcaguaugcccuuccauaacauccacccucuuaccaucggggaaugcccaaaguauguuaaaucuaaucggcugguguuggccacaggacuccgcaacagcccccagggcgagagaaggcggaagaaacgcggucuguuuggggcuauugccggauucaucgaaggcggcuggcaggggaugguagauggaugguacgguuaucaucacuccaaugagcagggcucgggguacgcggcagacaaggaaucuacccaaaaagccauugacggagugacgaacaaggucaacuccauaaucgauaagaugaauauucaguuugaggcugugggccgagaguucaacaauuuagaaagaaggaucgagaaccugaauaaaaagauggaagacgguuuucucgauguuuggacuuauaacgccgagcuucugguguugauggaaaaugagcggacacuagacuuccacgauucaaacgucaaaaaucuguacgacaaggugcgucuccagcugcgcgauaacgcaaaagagcuugggaauggcuguuucgaauuuuaccauagaugcgacaacgaguguauggaaaguguaaggaauggaaccuaugauuacccucaauauagcgaggaggcucggcugaagcgagaagagaucuccggcguuaaguuggaaucuauugggacuuaccagauacucagcaucuauucaacaguggccaguucccuggcguuagccauuauggucgcaggacuguuccuauggaugugcagcaacgguucucuccagugccgcaucuguauuuga

SEQ ID NO: 141856 - RNA, 1707 nt, Artificial Sequence
  derived and/or modified CDS sequence (opt3) from hemagglutinin__InfluenzaA__BAK23402
auggagaagaucgugcugcuccuugccauugucagccugguuaaauccgaccagauaugcaucggcuaccacgcuaacaauucuaccgaacaaguggauacaauuauggagaagaacguaacugugacgcaugcacaggacaucuuggaaaagacccacaaugggaaauuaugugaucuggacggagucaaaccccuaauucucagagauugcucaguggccgguuggcugcuuggcaacccuaugugugacgaguuccugaauguuccagaauggaguuauaucguggagaagauaaacccggcgaaugauuugugcuaccccgggaacuuuaaugacuaugaggaacucaagcaucugcugagcaggaucaaccacuucgagaaaauucagaucauuccuaaguccucuuggucgaaucaugaagcuaguagcggagucaguuccgccuguccauaccagggccggucuagcuuuuuccgcaacgugguauggcucaucaaaaaggauaaugcauaucccacaauaaaaauuuccuacaacaauacuaaccaagaggacuuacugguucuuugggguauccaccacccuaacgaugccgcugagcagacccgauuguaucagaauccaacaaccuacauuucaguggggacuucaacacugaaccagcgucuaguccccaagaucgcaaccagaagcaaggugaauggacaaucuggcaggauggaauuuuucuggacgauccucaaauccaacgacgccauuaauuuugagucaaacggcaauuucauagcuccugaaaacgccuacaagaucgugaaaaagggggauagcacuauuaugaaaagugagcuggaauauggaaauugcaacaccaagugucagacaccaaucggugcgauaaauucuuccaugccguuucauaacacucacccccuuaccauuggcgagugcccuaaauacgucaagagcaaucggcugguuuuggcaacagggcuccgcaacucgccacauggagagagaaggcggaagaaacgcggccuguucggugccaucgcuggguuuaucgaaggaggcuggcagggcaugguggacgggugguauggauaccaccacucuaaugagcaggguuccggcuaugccgcagacaaggaaucaacccaaaaagcuauugaugggguaacgaacaaggugaacaguaucauugacaaaaugaauacucaguucgaggccgucggacgagaauuuaacaauuuagagagaaggauagagaaccugaauaagaagauggaagauggcuuccucgacguguggacauacaacgcggagcuucugguuuugauggaaaaugagcggacccuagauuuccaugacagcaacgugaaaaaucuguaugauaagguccgucuccagcugcgcgacaacgccaaagaacuugguaauggguguuuugaguucuaccacagaugcgauaacgaguguauggaauccgugaggaauggcacuuacgacuauccccaauacucugaggaagcacggcugaagcgagaggagaucagcggaguaaaauuggaaucaauuggcacauaucagauccucaguaucuacuccaccguugcuagcucucuggccuuagcuauuaugguggccgggcuguuucuauggaugugcucaaacggaagucuccagugccgcauauguaucuga

SEQ ID NO: 141857 - RNA, 1707 nt, Artificial Sequence
  derived and/or modified CDS sequence (opt3) from hemagglutinin__InfluenzaA__BAK23403
auggagaagaucgugcugcuccuugccauugucagccugguuaaauccgaccagauaugcaucggcuaccacgcuaacaauucuaccgaacaaguggauacaauuauggagaagaacguaacugugacgcaugcacaggacaucuuggaaaagacccacaaugggaaauuaugugaucuggacggagucaaaccccuaauucucagagauugcucaguggccgguuggcugcuuggcaacccuaugugugacgaguuccugaauguuccagaauggaguuauaucguggagaagauaaacccggcgaaugauuugugcuaccccgggaacuuuaaugacuaugaggaacucaagcaucugcugagcaggaucaaccacuucgagaaaauucagaucauuccuaaguccucuuggucgaaucaugaagcuaguagcggagucaguuccgccuguccauaccagggccggucuagcuuuuuccgcaacgugguauggcucaucaaaaaggauaaugcauaucccacaauaaaaauuuccuacaacaauacuaaccaagaggacuuacugguucuuugggguauccaccacccuaacgaugccgcugagcagacccgauuguaucagaauccaacaaccuacauuucaguggggacuucaacacugaaccagcgucuaguccccaagaucgcaaccagaagcaaggugaauggacaaucuggcaggauggaauuuuucuggacgauccucaaauccaacgacgccauuaauuuugagucaaacggcaauuucauagcuccugaaaacgccuacaagaucgugaaaaagggggauagcacuauuaugaaaagugagcuggaauauggaaauugcaacaccaagugucagacaccaaucggugcgauaaauucuuccaugccguuucauaacauucacccccuuacuaucggcgagugcccuaaauacgucaagagcaaucggcugguuuuggcaaccgggcuccgcaacucgccacagggagagagaaggcggaagaaacgcggccuguucggugccaucgcuggguuuauugaaggaggcuggcagggcaugguggacgggugguauggauaccaucacucuaaugagcaagguuccggcuaugccgcagacaaggaaucaacacagaaagcuaucgaugggguaaccaacaaggugaacaguauuauagacaaaaugaauacgcaguucgaggccgucggacgagaauuuaacaauuuagagagaaggaucgagaaccugaauaagaagauggaagauggcuuccucgacguguggacuuacaacgcggagcuucugguuuugauggaaaaugagcggacacuagauuuccacgacagcaacgugaaaaaucuguaugauaagguccgucuccaacugcgcgacaacgccaaagaacuugguaauggguguuuugaguucuaccauagaugcgauaacgaguguauggaauccgugaggaauggcaccuacgacuauccccaguacucugaggaagcacggcugaagcgagaggagauuagcggaguaaaauuggaaucaaucggcacuuaucagauccucaguauuuacuccacaguugcuagcucucuggccuuagcuauaaugguggccgggcuguuucuauggaugugcucaaacggaagucuccagugccgcaucuguauuuga

SEQ ID NO: 141858 - RNA, 1707 nt, Artificial Sequence
  derived and/or modified CDS sequence (opt3) from hemagglutinin__InfluenzaA__BAK23404
auggagaagaucgugcugcuccuugccauugucagccugguuaaauccgaccagauaugcaucggcuaccacgcuaacaauucuaccgaacaaguggauacaauuauggagaagaacguaacugugacgcaugcacaggacaucuuggaaaagacccacaaugggaaauuaugugaucuggacggagucaaaccccuaauucucagagauugcucaguggccgguuggcugcuuggcaacccuaugugugacgaguuccugaauguuccagaauggaguuauaucguggagaagauaaacccggcgaaugauuugugcuaccccgggaacuuuaaugacuaugaggaacucaagcaucugcugagcaggaucaaccacuucgagaaaauucagaucauuccuaaguccucuuggucggaucaugaagcuaguagcggagucaguuccgccuguccauaccagggccggucuagcuuuuuccgcaaugugguauggcucaucaaaaaggacaacgcauaucccacaauaaaacgauccuacaauaacacuaaucaagaggauuuacugguucuuugggguauucaccacccuaacgacgccgcugagcagacccguuuguaucagaacccaacaaccuacaucucaguggggacuucaacacugaaucagaggcuaguccccaagauugcaaccagaagcaaggugaacggacaaucuggccggauggaauuuuucuggacgauccucaaauccaaugaugccaucaacuuugagucaaauggcaacuucauugcuccugaaaaugccuacaagauagugaaaaagggggacagcacuaucaugaaaagugagcuggaauauggaaacugcaauaccaagugucagacaccaauuggugcgaucaacucuuccaugccguuucauaauauacacccccuuacuauuggcgagugcccuaaauacgucaagagcaaccgccugguuuuggcaaccgggcucagaaauucgccacagggagagaggcggcgcaagaaacgaggccuguucggugccaucgcuggguuuaucgaaggaggcuggcagggcaugguggacgggugguauggauaccaucacucuaacgagcaagguuccggcuaugccgcagauaaggaaucaacacagaaagcuauugacgggguaaccaauaaggugaacaguaucauugauaaaaugaacacgcaguucgaggccgucggaagagaauuuaauaacuuagagaggcggauagagaaucugaacaagaagauggaagacggcuuccucgauguguggacuuacaaugcggagcuucugguuuugauggaaaacgagcguacacuagacuuccacgauagcaaugugaaaaaccuguaugacaagguccgccuccaacugagagauaaugccaaagaacuugguaacggguguuuugaguucuaccauaggugcgacaaugaguguauggaauccgugcggaacggcaccuacgauuauccccaguacucugaggaagcacgacugaagcgcgaggagaucagcggaguaaaauuggaaucaauuggcacuuaucagauccucaguaucuacuccacaguugcuagcucucuggccuuagcuauuaugguggccgggcuguuucuauggaugugcucaaauggaagucuccagugcagaauauguaucuga

SEQ ID NO: 141859 - RNA, 1707 nt, Artificial Sequence; identical to SEQ ID NO: 141858
  derived and/or modified CDS sequence (opt3) from hemagglutinin__InfluenzaA__BAK23405

SEQ ID NO: 141860 - RNA, 1707 nt, Artificial Sequence
  derived and/or modified CDS sequence (opt3) from hemagglutinin__InfluenzaA__BAK23406
auggagaagaucgugcugcuccuugccauugucagccugguuaaauccgaccagauaugcaucggcuaccacgcuaacaauucuaccgaacaaguggauacaauuauggagaagaacguaacugugacgcaugcacaggacaucuuggaaaagacccacaaugggaaguuaugugaucuggacggagucaaaccccuaauucucagagauugcucaguggccgguuggcugcuuggcaacccuaugugugacgaguuccugaauguuccagaauggaguuauaucguggagaagauaaacccggucaaugauuugugcuaccccgggaacuuuaaugacuaugaggaacucaagcaucugcugagcaggaucaaccacuucgagaaaauucagaucuuuccuaaguccucuuggucggaucaugaagcgucaagcggagugaguuccgcuuguccauaccagggccggucuagcuucuuucgcaauguaguuuggcucgugaaaaaggacaacgccuaucccacaauuaaaaaguccuacaauaacacuaaucaagaggauuuacugauccuuugggguauacaccacccuaacgacgcagccgagcagacccgauuguaucagaacccaacaaccuacauuucagucgggacaaguacucugaaucagcgucuagugcccaagaucgcuaccagaagcaaagugaacggacaaucuggcaggauugaguucuuuuggacgauccucaaguccaaugaugucaucaacuucgaaucaaauggcaacuuuauugcaccugaaaaugccuacaaaauaguuaagaaaggggacagcacuaucaugaagagugagcuggaauauggaaacugcaauaccaaaugucagacaccaauuggugcuaucaacucuuccaugccguuccauaauauacacccccuuacuauuggcgagugcccuaaguacgugaaaagcaaccggcugguauuggccaccgggcuccgcaauucgccacagggagagagaaggcggaaaaagcgcggccuguuuggugcgaucgcaggguucaucgaaggaggcuggcagggcaugguggacgggugguauggauaccaucacucuaacgagcaagguuccggcuaugccgcugauaaagaaucaacacagaaggccauugacggggucaccaauaaagugaacaguaucauugauaagaugaacacgcaguuugaggcaguuggacgagaguucaauaacuuagaaagaaggauagagaaucugaacaagaaaauggaagacggcuuccucgauguguggacuuacaaugcugagcuucuggucuugauggaaaacgagcggacacuagacuuucacgauagcaaugugaagaaccuguaugacaaaguacgucuccaacugcgcgauaaugccaaggaacuugguaacggguguuucgaguuuuaccauagaugcgacaaugaguguauggaauccguuaaaaacggcaccuacgauuauccccaguacucugaggaagcgaggcugaagcgggaggagaucagcggagugaaguuggaaucaauuggcacuuaucagauccucaguaucuacuccacagucgccagcucucuggcauuagcuauuaugauggccgggcuguuccuauggaugugcucaaauggaagucuccagugccgaauauguaucuga

SEQ ID NO: 141861 - RNA, 1707 nt, Artificial Sequence
  derived and/or modified CDS sequence (opt3) from hemagglutinin__InfluenzaA__BAK23407
auggagaagaucgugcugcuccuugccauugucagccugguuaaauccggccagauaugcaucggguaccacgcuaacaauucuaccgaacaaguggacacaauuauggagaagaacguaacugugacgcaugcacaggauaucuuggaaaagacccacaauggaaaauuaugugaccuggauggugucaaaccccuaauucucagagacugcucaguggccggcuggcugcuugggaacccuaugugugaugaguuccugaauguuagugaauggagcuauaucguggagaagauaaacccagcgaaugacuugugcuacccgggaaacuuuaauaacuaugaggaacucaagcaucugcuguccaggaucaaucgguucgagaaaauucagaucauucccaagucuucguggccugaucacgaggcuucacucggcgucagcgccgcauguccauaccagggugggcccaguuuuuaucgcaacgugguaugguuaaucaaaaagaauaacacauacccuacuauagaaaaauccuaucauaauaccaaccaagaggaccugcuuguuuuguggggcauucaccacccaaacgaugaagccgagcagacacgaaucuacaagaaucccaccacuuacauuucugugggaacaagcacccugaaccagcgucuagucccuaagaucgcuacgagauccaaagugaauggccagucagggaggguggaguucuuuuggacuauccucaagaguaacgacaccauuaauuucgaaagcaacggaaauuuuauagcaccagaaaacgccuauaaaaucgucaagaaaggugauucuacaauuaugaaguccgagcuggaguacggcaauugcaacacucggugucaaaccccgaucggggcuauaaauucaagcaugcccuuccauaacauucacccucuuacaaucggagaaugcccaaaauauguuaagaguaaucgccugguguuggccaccggccucagaaacucuccccagggugagaggcggcgcaagaaacgagggcuguuuggagcgaucgcaggcuucauugaaggcggguggcagggaaugguagacgguugguacggcuaucaucacuccaaugagcaggggagcggauacgccgcugauaaggaaucgacgcaaaaagccaucgacggcgugacuaacaaggucaacucuauuauagacaaaaugaauacacaguuugaggcaguggguagagaguucaacaauuuagaaaggcggaucgagaaccugaauaagaagauggaagauggguuucucgacguuuggaccuauaacgcugagcuucugguguugauggaaaaugagcguacucuagauuuccacgacuccaacgucaaaaaucuguacgauaaggugcgccuccagcugagagacaacgccaaagagcuuggcaauggauguuucgaauuuuaccauaggugcgauaacgaguguauggaaucaguacggaauggcacauaugacuacccucaauauagugaggaggcgcgacugaagcgcgaagagauuagcgggguuaaauuggaauccaucggaaccuaccagauccucucuauuuauagcacgguggccucaagucuggcauuagcuauaauggucgccggucuguuccuauggaugugcuccaacggcagccuccagugcagaaucuguauuuga

SEQ ID NO: 141862 - RNA, 1707 nt, Artificial Sequence
  derived and/or modified CDS sequence (opt3) from hemagglutinin__InfluenzaA__BAK23408
auggagaagaucgugcugcuccuugccauugucagccugguuaaauccgaccagauaugcaucggcuaccacgcuaacaauucuaccgaacaaguggauacaauuauggagaagaacguaacugugacgcaugcacaggacaucuuggagaaaacccacaaugggaaguuaugugaucuggacggagucaaaccccuaauucucagagauugcucaguggccgguuggcugcuuggcaacccuaugugugacgaguucccaaauguuagugaauggagcuauaucguggagaagauaaacccggcgaaugaucugugcuaccccgggaacuuuaauaacuaugaggaauugaagcaucuccuguccaggaucaaucgguucgagaaaauucagaucauuccuaagucuucguggccagaccacgaggcuucacugggagucagcagugccugucaguaccaaggcggucccuccuuuuaucgcaacgugguauggcucaucaaaaaggauaaugcauacccuacaauuaaaaagucuuaucauaacacuaauaaggaagacuuacugguucuuugggggauacaccacccaaacaacgaggaagaacagaccaaauuguaccagaaucccacaaccuacaucagcgugggaacuuccacacugaaccagcgucuagucccuaagauugccacccgaucaaaagugaauggccaaaguggcagaguggaguucuuuuggacgauccucaagagcaacgaugcuaucaauuucgaaucuaacgggaauuuuauugcaccagaaaacgccuauaaaauagucaagaaaggagacuccacuaucaugaagucagagcuggaguacgguaauuauaacaccaagugccagacaccgauuggcgcuaucaauagcaguaugcccuuccauaacauacacccucuuacuauuggggaauguccaaaauacguuaagucuaauaggcugguguuggccaccggacuccggaacagcccccagggcgagcgcagaaggaaaaagcggggucuguuuggggcgaucgcaggauucaucgaaggcggcuggcaggggaugguagauggaugguaugguuaccaucacuccaaugagcaaggcucgggguaugccgcugacaaagaaucuacacagaaggccauugacggagugaccaacaaggucaacuccaucauugauaaaaugaauacgcaguuugaggcagugggcaaggaguucaacaauuuagaacgccgaauagagaaccugaauaaaaagauggaagacgguuuucucgauguuuggacuuacaacgcugagcuucugguguugauggaaaaugagagaacacuagacuuccacgauucaaacgucaaaaaucuguacgacaaggugaggcuccaacugcgggauaacgccaaggagcuugggaauggcugcuucgaauuuuaucaucguugugacaacgagugcauggaaaguguacgcaauggaaccuacgauuauccucaguacagcgaggaggcgagacugaaaagggaagagaucuccggcguuaaguuggaaucuauugggacuuaucagauccucagcaucuacucaacaguggccaguucccuggcauuagcuauuauggucgccggacuguuccuauggauguguagcaacgguucucuccagugccggauaugcaucuga

SEQ ID NO: 141863 - RNA, 1707 nt, Artificial Sequence
  derived and/or modified CDS sequence (opt3) from hemagglutinin__InfluenzaA__BAK23411
auggagaagaucgugcugcuccuugccauugucagccugguuaaauccgaccagauaugcaucggcuaccacgcuaacaauucuaccgaacaaguggauacaauuauggagaagaacguaacugugacgcaugcacaggacaucuuggaaaagacccacaaugggaaguuaugugaucuggacggagucaaaccccuaauucucagagauugcucaguggccgguuggcugcuuggcaacccuaugugugacgaguuccugaauguuagugaauggagcuauaucguggagaagauaaacccagcgaaugauuugugcuacccggggaacuuuaauaacuaugaggaacucaagcaucugcuguccaggaucaaucgguucgagaaaauucagaucauucccaagucuucguggccugaccacgaggcuucacucggagucagcagugccugucaguaccaaggcgguccauccuuuuaucgcaacgugguaugguuaaucaaaaaggauaaugcauaccccacaauuaaaaagucuuaucauaacacuaauaaggaggaccugcuuguuuugugggggauacaccacccuaacaacgaggaagaacagaccaaacuguaccagaauccaacaaccuacaucagcgugggaacuuccacacuaaaccagcgacucguccccaagauugccacccguucaaaagugaauggccaaaguggcagaguggaguucuuuuggacgauccugaaaagcaacgaugcuaucaauuucgaaucuaacgggaauuuuauugcaccugaaaacgccuauaaaauagucaagaaaggagacuccacuaucaugaagucagagcuugaguacgguaauugcaacaccaagugucagacaccaauuggcgcuaucaauagcaguaugccguuccauaacauacacccccugacuauuggggaaugcccuaaauauguuaagucuaauagguuggugcucgccaccggacugcggaacuccccacagggcgagcgcagaaggaaaaagcgggguuuauuuggggcgaucgcaggauucaucgaaggcggcuggcaggggaugguagauggaugguacgguuaucaucacagcaaugagcaaggcucgggguacgccgcugacaaagaaucuacacagaaggccauugacggagugaccaacaaggucaacuccaucauugauaaaaugaauacgcaguuugaggcagugggcaaggaguucaacaaucuggaacgccgaauagagaaccucaauaaaaagauggaagacgguuuucuugauguuuggacuuauaacgcugagcuguuggugcuaauggaaaaugagagaacacuggacuuccacgauucaaacgucaaaaaucucuacgacaaggugaggcugcaacuucgggauaacgccaaggagcuggggaauggcuguuucgaauuuuaccaucguugcgacaacgaguguauggaaaguguacgcaauggaaccuaugauuacccccaguauagcgaggaggcgagauugaaaagggaagagaucuccggcguuaagcucgaaucuauugggacuuaccagauccugagcaucuauucaacaguggccaguuccuuagcacuggcuauuauggucgccggacuauuccucuggaugugcagcaacgguucucugcagugccggauauguaucuga

SEQ ID NO: 141864 - RNA, 1707 nt, Artificial Sequence
  derived and/or modified CDS sequence (opt3) from hemagglutinin__InfluenzaA__BAK23412
auggagaagaucgugcugcuccuugccauugucagccugguuaaauccgaccagauaugcaucggcuaccacgcuaacaauucuaccgaacaaguggauacaauuauggagaagaacguaacugugacgcaugcacaggacaucuuggagaaaacccacaaggggaaauuaugugaucuggacggagucaagccccuaauucucagagauugcucaguggccgguuggcugcuuggcaauccuaugugugacgaguuccugaacguuagugaauggagcuauaucguggagaagauaaauccagcgaacgauuugugcuacccggggaauuuuaacaauuaugaggaacucaaacaucugcuguccaggaucaaccgguucgagaagauucagaucauucccaaaucuucguggccugaccacgaggcuucacucggagucagcagugccugucaguaccaaggcgguccauccuuuuaucgcaaugugguaugguuaaucaagaaagauaacacauaccccacuauaaagaagucuuaucauaauaccaacaaagaagaccugcuuguuuugugggggauucaccacccuaauaacgaggaagaacagacaaagcuguaccagaacccaaccacuuacaucagcgugggaacauccacccuaaaucagcgacucguccccaaaauugcaacgcguucaaaggugaacggccaaaguggcagaguggaguucuuuuggacuauccugaaaagcaaugaugccaucaacuucgaaucuaaugggaacuuuauugcuccugaaaaugcauauaagauagucaaaaagggagacuccaccaucaugaagucagagcuugaguacgguaacugcaauacaaaaugucagacuccaauuggcgccaucaacagcaguaugccguuccauaauauacacccccugaccauuggggaaugcccuaaguauguuaaaucuaacagguuggugcucgcuacaggacugcgcaauuccccacagggcgagcggagaaggaagaaacgggguuuauuuggggccaucgcgggauucaucgaaggcggcuggcaggggaugguagauggaugguacgguuaucaucacagcaacgagcaaggcucgggguacgcagccgacaaggaaucuacccagaaggcuauugacggagugacgaauaaagucaacuccaucauugauaagaugaacacucaguuugaggccgugggcaaagaguucaauaaccuggaacgccgaauagagaaucucaacaagaaaauggaagacgguuuucuugauguuuggacauauaaugcagagcuguuggugcuaauggaaaacgagagaacccuggacuuccacgauucaaaugucaagaaccucuacgacaaggugaggcugcaacuucgggauaaugcuaaagagcuggggaacggcuguuucgaauuuuaccaucguugcgacaaugaguguauggaaaguguacgcaacggaacuuaugauuacccccaguauagcgaggaggccagauugaagagggaagagaucuccggcguuaaacucgaaucuacagggaccuaccagauucugagcaucuauucaacgguggcgaguuccuuagcccuggcaaucauggucgcuggacuauuccucuggaugugcagcaaugguucucugcagugccggauuuguauauga

SEQ ID NO: 141865 - RNA, 1707 nt, Artificial Sequence
  derived and/or modified CDS sequence (opt3) from hemagglutinin__InfluenzaA__BAK23413
auggagaagaucgugcugcuccuugccauugucagccugguuaaauccgaccagauaugcaucggcuaccacgcuaacaauucuaccgaacaaguggauacaauuauggagaagaacguaacugugacgcaugcacaggacaucuuggaaaagacccacaaugggaaguuaugugaucuggacggagucaaaccccuaauucucagagauugcucaguggccgguuggcugcuuggcaacccuaugugugacgaguuccugaauguuagugaauggagcuauaucguggagaagauaaacccagcgaaugauuugugcuacccggggaacuuuaauaacuaugaggaacucaagcaucugcuguccaggaucaaucgguucgagaaaauucagaucauucccaagucuucguggccugaccacgaggcuucacucggagucagcagugccugucaguaccaaggcgguccauccuuuuaucgcaacgugguaugguuaaucaaaaaggauaauacauaccccacuauuaaaaagucuuaucauaacaccaauaaggaggaccugcuuguuuugugggggauacaccacccuaacaacgaggaagaacagacaaaacuguaccagaauccaaccacuuacaucagcgugggaacauccacccuaaaccagcgacucguccccaagauugcaacgcguucaaaagugaauggccaaaguggcagaguggaguucuuuuggacuauccugaaaagcaacgaugccaucaauuucgaaucuaacgggaauuuuauugcuccugaaaacgcauauaaaauagucaagaaaggagacuccaccaucaugaagucagagcuugaguacgguaauugcaacacaaagugucagacuccaauuggcgccaucaauagcaguaugccguuccauaacauacacccccugaccauuggggaaugcccuaaauauguuaagucuaauagguuggugcucgcuacaggacugcggaacuccccacagggcgagcgcagaaggaaaaagcgggguuuauuuggggccaucgcgggauucaucgaaggcggcuggcaggggaugguagauggaugguacgguuaucaucacagcaaugagcaaggcucgggguacgcagccgacaaagaaucuacccagaaggcuauugacggagugacgaacaaggucaacuccaucauugauaaaaugaauacucaguuugaggccgugggcaaggaguucaacaaucuggaacgccgaauagagaaccucaauaaaaagauggaagacgguuuucuugauguuuggacauauaacgcagagcuguuggugcuaauggaaaaugagagaacccuggacuuccacgauucaaacgucaaaaaucucuacgacaaggugaggcugcaacuucgggauaacgcuaaggagcuggggaauggcuguuucgaauuuuaccaucguugcgacaacgaguguauggaaaguguacgcaauggaacuuaugauuacccccaguauagcgaggaggccagauugaaaagggaagagaucuccggcguuaagcucgaaucuauugggacauaccagauccugagcaucuauucaaccguggcgaguuccuuagcccuggcaauuauggucgcuggacuauuccucuggaugugcagcaacgguucucugcagugccggauauguaucuga

SEQ ID NO: 141866 - RNA, 1707 nt, Artificial Sequence; identical to SEQ ID NO: 141863
  derived and/or modified CDS sequence (opt3) from hemagglutinin__InfluenzaA__BAK23414

SEQ ID NO: 141867 - RNA, 1698 nt, Artificial Sequence
  derived and/or modified CDS sequence (opt3) from hemagglutinin__InfluenzaA__BAM65746
auggaggugaagcugcucguccuucugugcaccuucacagccacuuacgcugacacgaucuguauuggcuaucacgcaaacaauagcaccgauacaguugacacuuugcccgaaaagaacgugaccguaacacauuccgugaauuuacuggaggauacccacaacgggaagcuaugccuccugaaaggaauagccccucuucagcuggguaauuguucugucgcgggcuggaucuuggggaacccagaaugcgagcuccugauuucaagagaaaguuggagcuacaucguggagaagccgaaucccgagaacggaauuuguuauccuggccauuuugcugacuacgaggagcugagggaacaacucuccucuguuucgucauucgagcgguuugagaucuucccaaaagaaagcaguuggcccaaucacacugccacagguguguccgcaucuugcagccauaacgggaaguccucauuuuauaagaauuuacuguggcuuaccgucaaaaacggauuguacccuaaucugaguaagagcuaugccaacaauaaagagaaggaagugcuaguacucuggggcguucaccacccaacgaacauaggcgaucagcgcgcucuguaccauacugagaacgcauacgugucugucguguccucacacuauagccgacguuucacccccgaaaucgccaaaagaccuaaggugagggaccaggaggggcggauuaauuacuauuggacacuucuggagccaggagauacuaucauuuuugaagcuaacgguaauuugaucgccccgcgcuacgcguucgcacucaguagaggcuuugggucuggaauaauuaaguccaacgcccccauggacgaguguaaugcuaaaugccagaccccucaaggcgccaucaacagcucgcugccauuccagaauguccaucccguuacaauuggugaauguccuaaguaugugaggucuaccaaauuacggaugguaacggggcugcgcaacacuccauccauccagucacgaggacucuuuggcgcaaucgcuggcuucauugaagggggauggacagguaugguggauggcugguacggguaucaccaccagaaugaacaaggaaguggcuacgccgcggaccaaaagagcacccagaacgccauaaaugguaucacuaacaaagucaauuccgugauugagaagaugaacacacaguuuaccgcaguugauaaagaguucaauaaacuugaaagaaggauggagaacuucaacaagaaaguggacgauggguuuaucgacauauggacguacaaugcugaacuguugauucuacuggagaacgaacggacccucgacuuccaugauucuaaugucaagaaccuguaugagaaaguaaagagccagcuuaaaaauaacgccaaggagaucggcaauggaugcuuugaguucuaccacaaguguaacgacgaaugcauggaaucagugaaaaauggcacauaugauuaccccaaguauagugaggaguccaaacugaaccgugaaaagaucgacgggguuaaauuggagagcaugggaguguaccagauucucgcuaucuauucuacugucgccucaaguauggugcuguuagucagccugggugcaauuuccuuuuggaugugcucuaauggcucgcuacagugucgcauaugcaucuga

SEQ ID NO: 141868 - RNA, 1701 nt, Artificial Sequence; identical to SEQ ID NO: 140614
  derived and/or modified CDS sequence (opt3) from hemagglutinin__InfluenzaA__BAO79716

SEQ ID NO: 141869 - RNA, 1683 nt, Artificial Sequence
  derived and/or modified CDS sequence (opt3) from Hemagglutinin__InfluenzaA__CAB95856
auggagaccaucagccugauuacaauacuccuuguggucacugccuccaacgcugacaagaucugcauuggccaccagucuaccaauucaaccgaaacaguugauacucugaccgagacaaacgugcccguaacccaugcaaaagaauuguuacacacugagcauaaugggaugcugugugccacaagucuaggacacccucucauccuggacacgugcacgauugaaggucuuguguacggcaacccaagcugugaucuguugcucgggggaagagagugguccuauaucgucgagaggucuucggcggugaauggcacuugcuacccggguaacguugaaaaucuggaggaacugcggacccucuucucaagcgcuaguuccuaucaacgcauacagaucuuucccgacacaacuuggaacgugaccuacacagggaccucucgagccuguagcggauccuucuaucguucaaugagaugguuaacgcagaagaguggcuuuuacccuguccaggaugcacaauauacuaauaacaggggcaaaagcauucuguucgugugggggauccaucacccacccacauacaccgagcagacuaaucuuuacauucggaacgacacaaccacgucuguaaccacagaggauuugaaucgcacuuuuaagccuguuaucggaccaagaccccuggugaacggucuacagggcaggauagacuauuacugguccguccucaaaccugggcagacccugcgggugcgcucaaauggaaaccuuauugccccaugguauggccacgugcugagcggugggagucauggacgaaucuugaagacagaucucaagggcggcaacugcgucguucaaugucagacugaaaaagggggacugaauaguaccuuaccguuccacaacauuuccaaguacgcuuuugguacaugccccaaauaugugagaguaaauagccugaagcucgcagugggccuuaggaacgucccugcccggucgucucgugggcuguucggagcuaucgccggcuuuaucgaggguggguggccaggcuugguggcgggaugguacggcuuccagcauuccaaugaccaggggguuggaauggcagccgaucgcgacucaacccaaaaagcuauugauaagauaacuucuaaggugaacaauaucgucgacaaaaugaacaagcaguaugaaauuaucgaccacgaguuuagcgaaguggagacgagacuaaauaugauaaacaauaaaauugaugaccagauccaagauguaugggccuacaacgcagagcugcucguucugcuugaaaaucagaagacacuggacgagcacgaugcuaacgugaauaacuuguacaacaaagucaagagggcccucgguuccaaugcgauggaagacggcaaaggguguuucgagcuguaucauaagugcgaugaccaguguauggaaaccauccggaacggaacuuacaaucgacgcaaguauagagaggagucuagguuagaacggcagaaaauugagggcgugaagcuggaaagcgaggguaccuacaaaauccuaacaauuuauucaaccgucgccaguucccucgugcuggcaaugggguuugcugccuuccuuuucugggcuaugagcaacggcucuugccgcugcaauauauguaucuga

SEQ ID NO: 141870 - RNA, 1683 nt, Artificial Sequence
  derived and/or modified CDS sequence (opt3) from Hemagglutinin__InfluenzaA__CAB95857
auggagaccaucagccugauuacaauacuccuuguggucacugccuccaacgcugacaagaucugcauuggccaccagucuaccaauucaaccgaaacaguugauacucugaccgagacaaacgugcccguaacccaugcaaaagaauuguuacacacugagcauaaugggaugcugugugccacaagucuaggacacccucucauccuggacacgugcacgauugaaggucuuguguacggcaacccaagcugugaucuguugcucgaggggagagagugguccuauaucgucgaaaggucuucggcggugaauggaacuugcuacccgggcaacguugagaaucuggaggaacugcggacccucuucucaagcgcuaguuccuaucaacgcauacagaucuuucccgacacaacuuggaacgugaccuacacagguaccucucgagccuguagcggguccuucuaucguucaaugagaugguuaacgcagaagaguggauuuuacccuguccaggaugcacaauauacuaauaacaggggcaaaagcauucuguucguguggggcauccaucacccacccacauacaccgagcagacuaaucuuuacauucggaacgacacaaccacgucuguaaccacagaagauuugaaucgcacuuuuaagccuguuaucgggccaagaccccuggugaacggacuacaggguaggauagacuauuacugguccguccucaaaccuggccagacccugcgggugcgcucaaaugggaaccuuauugccccaugguauggacacgugcugagcggcgguagucaugggcgaaucuugaagacagaucucaagucuggaaacugcgucguucaaugucagacugagaaaggcggcuuaaauuccacccugccguuccacaacauuagcaaguacgcuuuugggacaugccccaaauaugugagaguaaauucgcugaagcucgcagugggacuuaggaacgucccugcccggucuucccguggucuguucggcgcuaucgccggguuuaucgaaggaggcuggccagguuugguggcggggugguacggcuuccagcauucaaaugaccagggaguuggcauggcagccgaucgcgacaguacccaaaaagcuauugauaagauaacuagcaaggugaacaauaucgucgacaaaaugaacaagcaguaugagauuaucgaccacgaauuuuccgagguggagacgagacuaaauaugauaaacaauaaaauugaugaccagauccaagauguaugggccuacaacgcagaacugcucguucugcuugagaaucagaagacacuggacgaacacgaugcuaacgugaauaacuuguacaacaaagucaagagggcccucgggucuaaugcgauggaggacggaaaagguuguuucgaacuguaucauaagugcgaugaccaguguauggagaccauccggaacggcacuuacaaucgacgcaaguauagagaggaaagcagguuagagcggcagaaaauugaaggggugaagcuggagucagaaggagccuacaaaauccuaaccauuuauaguacagucgcauccagccucgugcuggcuaugggcuuugccgcuuuccuuuucugggccaugucuaacgguucaugccgcugcaauauauguaucuga

SEQ ID NO: 141871 - RNA, 1707 nt, Artificial Sequence
  derived and/or modified CDS sequence (opt3) from hemagglutinin__InfluenzaA__CBW54815
auggagaagaucgugcugcuccuugccauugucagccugguuaaauccgaccagauaugcaucggcuaccacgcuaacaauucuaccgaacaaguggauacaauuauggagaagaacguaacugugacgcaugcacaggacaucuuggaaaagacccacaaugggaaauuaugugaucuggacggagucaaaccccuaauucucagagauugcucaguggccgguuggcugcuuggcaacccuaugugugacgaguucccaaauguuagugaauggagcuauaucguggagaagacaaacccggcgaaugaucugugcuaccccgggaacuuugacaauuaugaggaauugaagcaucuccuguccaggauaaaccgguucgagaaaauccagauuaucccuaagucuucguggccagaucacgaggcuucacugggagucagcagugccugucccuaccagggcgguccuuccuuuuaucgcaaugugguauggcucauuaaaaagaacaauacuuacccaaccaucaaagaaucuuaucauaacacaaaucaagaggacuuacugguucuuugggggauacaccaccccaacgaugaagaggaacagacccgaauuuacaagaacccuacuacauacaucagcgugggaaccuccacguugaaucagcgucuggucccaaagauugcaacuagaucaaaagugaacggccagaguggcaggguggaguucuuuuggaccauccuaaagagcaaugacacaaucaacuucgaaucuaaugggaacuuuauugccccggagaaugcuuauaaaauagucaagaaaggagauuccacuaucaugaagucagagcucgaauacgguaacugcagcaccaaaugucaaacacccauuggcgcaaucaauaguucuaugccuuuccauaacauacacccacugaccauuggggagugccccaaguauguuaaguccaaucggcuugugcuggccacgggauugcgcaacagcccucagggcgaagguagaaggaaaaagcgggggcucuuuggagcuaucgccggcuucaucgagggcggguggcagggaaugguagacgguugguacggcuaucaucacucgaaugaacaggggucuggauacgcggcagacaaagaguccacucaaaaggccauugauggcgugacaaacaaagucaauucaaucauugacaagaugaacacccaguuugaggcugugggucgcgaguucaacaaucuggaaaagcgaauagaaaacuuaaauaaaaagauggaggauggguuucuggacguuuggacuuauaacgccgaacuccuugugcugauggagaaugagagaacauuggauuuccacgacaguaacgucaaaaaucuauacgauaaggugaggcugcagcuccgggacaacgcaaaagaacugggcaauggauguuucgaguuuuaccaucguugcgauaacgaauguauggagagcguacgcaauggcaccuaugacuacccacaauauuccgaggaagcuagacuuaagagggaggaaaucucugggguuaagcuggagagcauuggaacguaccagaucuugucaaucuauaguaccguggccuccagccucgcgcuggccauuauggucgcagguuuauuccuguggaugugcucuaacggcucacuacagugccggauauguaucuga

SEQ ID NO: 141872 - RNA, 1707 nt, Artificial Sequence
  derived and/or modified CDS sequence (opt3) from hemagglutinin__InfluenzaA__CBW54817
auggagaagaucgugcugcuccuugccauugucagccugguuaaauccgaccagauaugcaucggcuaccacgcuaacaauucuaccgaacaaguggauacaauuauggagaagaacguaacugugacgcaugcacaggacaucuuggaaaagacccacaaugggaaauuaugugaucuggacggagucaaaccccuaauucucagagauugcucaguggccgguuggcugcuuggcaacccuaugugugacgaguucccaaauguuagugaauggagcuauaucguggagaagauaaacccggcgaaugaucugugcuaccccgggaacuuuaauaacuaugaggaauugaagcaucuccuguccaggaucaaucgguucgagaaaauucagaucauuccuaagucuucguggccagaccacgaggcuucacugggagucagcagugccugucccuaccagcgcggcccuuccuuuuaucgaaacgugguauggcucaucaaaaagaaugauacauacccaacuauaaaagaaucuuaucauaacaccaaucaagaggacuuacugguucuuugggguauucaccaccccaacgaugaagaggaacagaagcguaucuacaagaacccuacaaccuacauuagcguggggacuuccacauugaaucagagacuggucccaaaaaucgcaaccaggucaaaggugaacggacagaguggccggguggaguucuuuuggacgauccuaaaaagcaaugacacuauuaacuucgaaucuaauggcaacuuuauagccccggagaaugcuuauaagaucgucaaaaagggggauuccaccauuaugaaaucagagcucgaauacggaaacugcagcacaaagugucaaacucccaucggugcaauaaauaccaguaugccuuuccauaacauucacccacugacaaucggcgagugccccaaguauguuaaaucuaaucgccuugugcuggccaccggguugagaaacuccccucagggagaaggcaggcggaagaaacgcggucucuuuggggcuaucgccggauucauugagggcggcuggcaggggaugguagacggaugguacgguuaucaucacagcaaugaacagggcucgggguacgcggcagacaaggagucuacgcaaaaagccaucgauggagugacuaacaaggucaauuccauuauagacaagaugaacacacaguuugaggcugugggccgagaauuuaacaaucuggagaaaagaaucgaaaacuuaaauaagaaaauggaggaugguuuccuggacguuuggaccuauaacgccgaacuccuugugcugauggagaaugagaggacuuuggauuuccacgacucaaacguccggaaucuauacgauaaggugcgucugcagcuccgcgacaacgcaaaagaacuggggaauggcuguuucgaguuuuaccauagaugcgauaacgaauguauggagaguguaaggaauggaacauaugacuacccacaauauagcgaggaagcucggcuuaagcgagaggaaauuuccggcguuaagcuggagucuaucgggaccuaccagaucuugagcauuuauucaacgguggccaguucccucgcgcuggccauaauggucgcaggauuauuccuguggaugugcagcaacgguucucuacagugccgcaucuguauuuga

SEQ ID NO: 141873 - RNA, 1707 nt, Artificial Sequence
  derived and/or modified CDS sequence (opt3) from hemagglutinin__InfluenzaA__CBW54818
auggagaagaucgugcugcuccuugccauugucagccugguuaaauccgaccagauaugcaucggcuaccacgcuaacaauucuaccgaacaaguggauacaauuauggagaagaacguaacugugacgcaugcacaggacaucuuggaaaagacccacaaugggaaauuaugugaucuggacggagucaaaccccuaauucucagagauugcucaguggccgguuggcugcuuggcaacccuaugugugacgaguucccaaauguuagugaauggagcuauaucguggagaagacaaacccggcgaaugaucugugcuaccccgggaacuuuaauaacuaugaggaauugaagcaucuccuguccaggauaaaucgguucgagaaaaucaagauuaucccuaaaucuucguggccagaccacgaggcuucacugggagucagcagugccugucccuaccagggcgguccuuccuuuuaucgcaacgugguauggcucauuaagaaaaauaacacuuacccaaccaucaaggaaucuuaucauaauacaaaccaggaggauuuacugguucuuugggggauacaccaccccaacgacgaagaggaacaaacccgaauuuacaagaauccuacuacauacaucagcgugggaaccuccacguugaaccagcgucuggucccaaaaauugcaacuagaucaaaggugaauggccagaguggcaggguggaguucuuuuggaccauccuaaaaagcaacgauacaaucaauuucgaaucuaacgggaauuuuauugccccggagaacgcuuauaagauagucaaaaagggagacuccacuaucaugaaaucagagcucgaauacgguaauugcagcaccaagugucagacacccguuggcgcaauuaacaguucuaugccuuuccauaauauccacccacugaccauaggggagugccccaaguaugugaaauccaaccggcuuguacuggccacgggauugcgcaauagcccucaaggcgaagguagaaggaagaaacgggggcucuuuggagcuauugccggcuucaucgagggcggguggcagggaaugguggaugguugguacggcuaucaucacucgaacgaacaggggucuggauacgcggcagaccgcgaguccacucagaaggccaucgacggcgucacaaauaaagugaacucaauuaucgauaagaugaacacccaauuugaggcuguuggucgagaguucaauaaccuggaaaagagaauugaaaauuuaaacaaaaagauggaggacggguuucuggauguguggacuuauaaugccgaacuccuuguccugauggagaacgagaggacauuggacuuccacgauaguaaugugaaaaaccuauacgacaagguacggcugcagcuccgugauaaugcaaaagaacugggcaacggauguuucgaguuuuaccaucgcugcgacaaugaauguauggagagcguuagaaacggcaccuaugauuacccacaguauuccgaggaagcuaggcuuaagcgggaggaaauaucuggggugaagcuggagagcaucggaacguaccaaauuuugucaaucuauaguaccgucgccuccagccucgcgcuggccaucauuguggcagguuuacugcuauggaugugcucuaauggcucacuccagugccgaauauguaucuga

SEQ ID NO: 141874 - RNA, 1701 nt, Artificial Sequence
  derived and/or modified CDS sequence (opt3) from hemagglutinin__InfluenzaA__CCG47908
augaagaccgugaucgcccugagcuacgucuucugccucggcuuugggcagggacuucccgguaaaggcaacaauacagcuacucuguguuuggggcaccaugcaguuccuaacggaacguuagugaagaccauuacagacgaucaaauagagguaacuaaugccaccgaacuggugcagaacuucuccaugggcaaaaucugcaagaauccacacaggauucuagacggugcgaacuguacacucaucgauucucugcuuggggacccgcauugcgauggauuucaggacgagaaaugggaucuguucauugaaagaucaaaggcuuuuaguaauuguuaucccuacgacgucccugaguauaccagcuugcgguccaucauagccucuucgggcacucucgaguucacaaacgaagauuuuaauuggaccggcgugacgcagaacgggggaucaagcgcaugcaagcgcgguccaaauaacaguuucuuuucccgacugaauuggcuguacaaaucuggcaacacuuaucccaugcucaauguuaccaugccuaacagcgacgauuucgacaaguuauacaucuggggagugcaccauccauccacagaucgugagcaaacuaaccuguauauucaggccucagggaaaaucauugucaguaccaagagaagccagcagacaaucauacccaauauuggcucuaggccuugggugcggggucuuuccucacgcaucagcauuuacuggaccaucguaaaaccaggggacaucuugauuauaaacaguaauggaaaccugaucgcuccgagaggcuacuuuaagauucaaacgggcaagucuuccguuaugaggagcgacgcacccaucgauacuuguaauucggaaugcauaacaccuaacgggucuauuccaaaugacaaacccuuccagaacgugaaucggaucaccuauggagccuguccuaaguacaucaaacagaacacucuaaagcucgcuacagguaugcgcaauauuccagagcgacagaccagaggcaucuuuggggccauugcgggauucauagaaaacggcugggaggguauggucaaugggugguauggcuucaggcaccaaaacuccgagggaaucggccaggcagccgaucugaaaucaacgcaggcugccauuaaucaaaucaacgggaaacuuaaccgggugaucgaaaagaccaaugagaaguuucaccagauugaaaaggaguucagugaaguggagggacguauacaggaccuggagcgcuacgucgaagauacaaaaaucgacuuguggagcuauaacgcagagcuccugguugcuuuagaaaaucagcauacuauugaucugaccgacuccgagaugaacaagcucuuugagaaaacaagaaagcaacuuagggaaaaugccgaggauauggguaacggcugcuucaaaaucuaccacaagugugacaauucuugcauggaaagcauucggaacgggacuuaugaucauaaugaguaccgagacgaagcggugaacaaucgcuuucagaucaagucaguagagcugaaaaguggauacaaggacuggauauuguggaucuccuucgccauuagcugcuuucuacugugugcaguguggcucggcuucaucauuugggcuugccagaaagguaacaucagauguaauauaugcauuuga

SEQ ID NO: 141875 - RNA, 1701 nt, Artificial Sequence
  derived and/or modified CDS sequence (opt3) from hemagglutinin__InfluenzaA_ _AAB39851
augaaggccauccugcucgugcuucugugcaccuucgcugcaacaaacgccgacacuuuguguauuggcuaccacgcgaauaacagcacggauaccgucgacacaguuuuagagaaaaaugugacuguaacccauuccgugaaccugcuagaagauagacacaaugggaagcucugcaaacugggagguauagcuccccuucaucugggcaaguguaacaucgccgggagguugcucggaaauccugagugcgaacugcugcucacagucucuucauggaguuauauuguggagaccagcaaauccgacaacggcacuuguuacccaggugauuuuaucaauuaugaagaguuacgggagcagcugucuucgguuaguagcuucgaacgcuuugagauuuucccgaagacaaguuccuggcccaaccacgaaaccaaucgaggggugacggcagccugcccuuacgcuggagcaaacucuuuuuaucguaaucuuaucugguuggucaagaaagagaacagcuacccaaagcuguccaaaucauaugugaauaacaagggcaaagagguucuaguacucuggggcauacaucaucccccuacuucaaccgaccaacagagccuguaccagaacgccgaugcuuacguguucgucgggucuuccaaguauaauagaaaguuuaaaccagaaaucgccgcgaggcccaaggugcggggacaggcaggucgcaugucauacuauuggacacuuauugagccuggcgacacuaucaccuucgaagccacagggaaccugguggucccaagauacgcuuuugccaugaauaggggaagcggcagugguauuaucauaugggaugcaccgguucacgacuguaacaccaaaugccaaacgcccaagggggcuauuaauacuucuuugccuuuccagaacauccacccagugacaauuggagagugucccaaauauguaaaguccaccaaacuccggauggccacuggccugcgcaaugugccuagcauccagucgcgaggcuuauuuggggcgaucgccggauucauugaagguggcuggacagggaugauagauggaugguacggcuaucaccaucagaacgagcaagguucuggguacgcagcugaccagagauccacccagaaugccaucgauggcauuacgaacaaggucaauucagugaucgagaagaugaacacccaguuuacagcuguuggaaaagaguucaaucaccuggaaaagaggauagaaaaccucaauaaaaagguggacgacggcuuccuugauauuuggacuuacaacgccgagcuguugguccuacuggaaaacgagcggacccucgacuuucacgauaguaaugugaaaaaccuguaugagaagguacguagccaacuucgcaauaacgcaaaggaaaucgggaauggaugcuucgaguuuuaccauaaaugugacgauacaugcauggaauccguuaagaacgguacuuaugacuacccaaaauauucugaggaaagcaagcugaauagagaggagaucgauggcgugaaauuggaaucaaccaggauuuaccagauccucgccauuuauaguacagucgcuuccagccugguguuacuggucucucuaggggcgauaucauucuggaugugcaguaacggaagccuccagugucggaucugcauuuga

SEQ ID NO: 141876 - RNA, 1701 nt, Artificial Sequence
  derived and/or modified CDS sequence (opt3) from hemagglutinin__InfluenzaA__AAA43178
augaagaccaucauugcccugagcuacauauucugccucgcucuuggccaggaccugcccgggaacgauaauuccacagcaacuuuguguuuaggacaccaugccgugccuaacgguacgcuggucaaaaccaucacagacgaucaaauugagguuacuaaugcgaccgaacuugugcagucuucaaguacaggcaagaucugcaacaauccacacaggauucucgacgggaucgauuguacccugauagacgcucuacugggagauccgcauugcgacguauuucagaacgagacuugggauuuguucguggaaagaagcaaagccuuuuccaauuguuaucccuacgacgucccugauuaugcaucucuccggucgcugguggccucaagcggcacacuggaguucaucaccgaagguuuuacguggacugggguuacccagaacggaggcaguaaugcuugcaagcgcggcccaggguccggauucuuuucucgacucaacugguuaacaaaaagcgguuccacuuaccccgugcugaaugucaccaugccuaacaaugacaacuucgauaaguuguauauuuggggcauccaccauccaucaacaaaucaagagcagaccaguuuguacgugcaggcaagcgggcguguaacgguuucuacuagaaggucccagcaaacaauuauccccaacauaggaucacggccuugggugcgcggccugagcaguagaauuucuaucuauuggaccauugucaagccaggugacgugcuagugaucaacuccaaugggaaccucaucgccccgaggggauacuuuaaaaugcggacuggcaagagcucgauuaugcgcucugacgcucccauagauacauguaucuccgagugcauuaccccuaauggcucaaucccaaacgacaaacccuuccagaaugucaacaagauaacguacggggccuguccuaaauauguuaagcagaauacccugaaacuugcgacaggaaugcgaaacgugccagaaaagcagacuagaggucuguuuggcgcaauugccggguucaucgagaauggaugggaaggcaugaucgaugguugguacggguuuaggcaccaaaacagugagggcaccggacaggcugccgaccuuaagagcacacaggcagcuauugaucaaaucaauggcaaacucaaccggguaauugagaagacuaaugaaaaauuccaccagauagagaaggaguucuccgaaguggaagggcguauccaggaccuggagaaauaugucgaggauaccaagauugacuuauggucuuacaacgccgaacugcucguggcgcuugagaaucagcauacaaucgaucugaccgacagcgaaaugaacaaguuguuugagaaaacucgcagacaacuaagggaaaacgccgaggagaugggaaaugguugcuucaagaucuaucacaaaugugauaacgcaugcauugaaucaauacggaauggcacguacgaccaugacguuuaucgagaugaggcucugaacaaucgcuuucagaucaaggggguggaacucaaaaguggauacaaggacuggauucuguggaucuccuucgccauuagcugcuuucuucugugugucguguugcucggcuucaucaugugggcuugccagagagguaacauaagguguaauaucugcauuuga

SEQ ID NO: 141877 - RNA, 1689 nt, Artificial Sequence
  derived and/or modified CDS sequence (opt3) from hemagglutinin__InfluenzaA__AAA43185
auggccaucauuuaccugauacuccuuuucaccgcugugagaggcgaccagaucugcauuggguaucacgcaaacaauagcacagagaaggucgauacuaaccuggaaaggaauguuacggugacccaugccaaagacaucuuggagaagacacacaacggaaaauuauguaagcugaaugguauucccccucuagaacucggcgauugcuccaucgcgggguggcugcuuggaaacccagagugugaccggcuguugucuguaccggaauggucauacauaauggagaaagagaauccccgcgauggccucugcuauccugguaguuuuaacgacuacgaggaacugaagcaucugcucagcuccgugaagcacuucgaaaaagucaagaucuuaccaaaagaucgauggacucaacauaccacaaccgggggaucucgugcuugugccgugucgggcaaucccucauuuuucagaaacaugguuuggcugacuaaggagggcagcgacuauccuguggcaaaagggaguuacaauaacacauccggagagcagaugcuuauuaucugggguguccaccacccaauugaugaaaccgagcagaggacguuguaucagaaugugggcacuuacguaucuguugggaccagcacacugaacaagcgguccacucccgaaaucgccacccgcccuaaggugaauggacaaggcgguagaauggaguuuucauggacacuacucgacaugugggauaccauaaacuucgaaaguacggggaaccugauugcuccagaguacggauuuaaaaucagcaagagggggucuuccggcauuaugaaaacugagggcacacuugaaaauugcgagaccaagugucagacuccgcugggagcaaucaacacaaccuugcccuuccauaauguccacccucucacgaucggugaaugcccaaaauaugugaagucagagaaacugguguuagccaccggccugcggaacgucccccagauugaaagccgcgggcucuuuggagcuauagccggcuucaucgaggguggguggcagggcaugguugacggaugguacggcuaucaucacaguaaugaucaagggucuggauacgcggcagacaaggaguccacacagaaggccuuugacgguauuacuaacaaagugaauagcguaaucgaaaagaugaacacccaguucgaggcugugggcaaagaauuugggaaucuugagcgaagacuggaaaacuugaauaagaggauggaggauggauuccuagacgucuggacauauaacgccgagcugcucgugcugauggaaaaugagcggacucuugauuuccacgacucgaacguuaaaaaucuguacgauaaggugcguaugcaguugcgcgacaacgucaaggaacucggcaacgguuguuuugaguucuaucauaaaugcgaugacgaguguaugaacucugugaagaaugggaccuacgauuacccuaaauaugaagaggaauccaagcugaauagaaacgagauaaaaggcguaaaguuaucaaguaugggaguuuaccaaauucuggcaaucuaugcuacaguggccggcagccuaucccucgcgaucaugauggccgggauuucuuuuuggaugugcagcaauggaucacugcagugcaggaucuguauuuga

SEQ ID NO: 141878 - RNA, 1701 nt, Artificial Sequence
  derived and/or modified CDS sequence (opt3) from hemagglutinin__InfluenzaA__AAA43187
augaagaccaucauugcccugagccacauauucugccucgugcuuggccaguaccugcccgggaacgacaauuccacagcuacuuuguguuuaggacaucacgcagucccuaacgguacgcugguuaaaaccaucacaaaugaucaaauugaggugacuaacgccaccgaauugguacagucuucaaguacaggcaagaucugcaauaacccacauaggauucucgacgggaucgauuguacccugauagacgcgcuucugggagauccgcacugcgacggcuuucagaaugagacuugggauuuguucguggaaagaagcaaggcuuuuuccaacuguuaucccuacgacgucccugauuaugccucucuccggucgcugguggcaucaagcgguacacuggaguucaucaccgaaggguuuacguggacuggaguuacccagaauggcggcaguaacgccugcaagcgcgggccaggauccgguuucuuuucucgacucaauugguuaacaaaaagcgaguccacuuaccccgugcugaacgucaccaugccuaauaacgacaauuucgauaaacuuuauauuuggggcgugcaucacccaucaacaaaccaagagcagaccaguuuguacguacaggcuagcgggcguguuacggugucuacuagaaggucccagcaaacaaucauucccaacaucggaucacggccuuggguccgcggccugagcaguagaauaucuauuuauuggaccaucgugaagccaggugacgugcuagucauuaauuccaacgcaaaucucaucgccccgaggggguacuuuaaaaugcggacuggaaagagcucgaucaugcgcucugaugcucccauugacacauguauauccgaaugcaucaccccuaacggcucaauuccaaaugacaaacccuuccagaacguuaauaagaucacguacggcgccuguccuaaauaugugaagcagaacacccugaaacuugcgacacgaaugagaaauguaccagagaaacagacuagggggcuguuuggagcaauagccgguuucauugaaaacggcugggaggggaugaucgauggaugguacggcuuucggcaccaaaauagugaggguaccgggcaggcugccgaccuaaagagcacacaggcagcuaucgaucaaauuaacggcaaacucaaucgugugaucgaaaagacuaacgagaaauuccaucagauugaaaaggaguucuccgaagucgagggacgcauacaggaccuggagaaauauguggaagauaccaagaucgacuuauggucuuacaaugccgagcugcucguugcgcuugaaaaccagcacacaauugaucugaccgacagcgagaugaacaaguuguuugaaaagacuagaaggcaacuacgggagaaugccgaggauaugggcaacgggugcuucaagaucuaugacaaaugugauaaugcaugcaucgaaucaauucgaaacggaacguacgaccaugacguguaucgcgaugaggcucugaauaacagauuucagauaaagggugucgaacucaaaaguggcuacaaggacuggauccuguggauuuccuucgccaucagcugcuuucuucugugugugguauugcucggguucauuaugugggcuugccagaggggaaauauccgguguaacauaugcaucuga

SEQ ID NO: 141879 - RNA, 1698 nt, Artificial Sequence
  derived and/or modified CDS sequence (opt3) from hemagglutinin__InfluenzaA__AAA43209
augaaggccaaacugcucgugcuucuguacgcuuucgucgcaaccgacgccgauacaaucugcauuggcuaucacgcgaacaauagcacugacacgguugauaccauauuugagaagaacguggcuguaacacauuccgugaauuuguuagaagacagacacaacgggaaacuguguaagcuaaaaggaaucgcaccccuccagcuggguaagugcaauauuacuggcuggcuucuggggaacccugagugugauucuuugcucccagccaggucauggaguuacaucgucgaaaccccgaauagcgagaacggagccugcuaucccggcgacuucauugauuacgaggagcugcgggagcaacuguccucugugucgucacucgaacgcuuugagaucuucccuaaggaaagcaguuggccaaaucauacauuuaacgguguuaccguguccuguucucaccgagggaaaagcuccuucuaucguaauuuacuguggcuuacuaagaaaggagacucauaccccaaguugacaaacaguuaugucaauaacaaaggcaaggaggugcugguacuauggggcguucaucacccuucuagcuccgaugagcagcagucacucuacagcaaugggaacgcuuacgugagugucgcaucuuccaacuauaauagaagguuuaccccagaaauagccgcucggcccaaggugaaagaccagcacggacgcaugaacuacuauuggacgcugcuugagccuggugauacuaucauuuucgaagccaccggcaaucugaucgcgccaugguacgcauuugccuugagcagaggguucgagucgggaauuaucacaucuaacgcuuccaugcaugaaugcaauacuaagugucaaaccccgcagggcucaauaaacaguaaucuccccuuucagaacauucacccugugacaaucggugagugcccaaaauaugucaggagcaccaagcugcggaugguuacgggguuacgcaauauucccuccauccaguaccgaggacuguucggcgccaucgcaggcuuuauugaagggggauggacugguaugauagacggcugguauggguaccaucaccaaaacgaacagggaucuggcuacgcugccgaucagaaaagcacacagaaugcgaucaacgguauuaccaauaaggugaacucaguaaucgagaaaaugaauacucaauucacagccguggggaaggaguucaacaaccucgaaaagagaauggaaaaucuuaacaaaaaggucgacgacggcuuucuggauauauggaccuauaaugcagaguugcuagugcugcucgagaacgaaaggacgcuggacuuccacgaucuuaauguuaaaaaccuguacgagaaggugaaaagucaguugaagaauaacgcuaaggaaauuggaaauggcuguuuugaguucuaucauaaaugcgacaacgaauguauggaguccguccggaaugggaccuacgauuauccuaaguacagcgaggaaucuaaacucaaccgugagaagaucgacggagugaaacuggaaucaauggguguauaucagaucuuagccauuuacaguacaguugcuagcucccuggugcuacucgucucucugggcgccaucucguuuuggaugugcagcaaugggucccuucaaugccgcauuuguauauga

SEQ ID NO: 141880 - RNA, 1683 nt, Artificial Sequence
  derived and/or modified CDS sequence (opt3) from hemagglutinin__InfluenzaA__AAC40998
augaacacccagauccugauucucgcccuuguggcuauaauccccacaaaugcagacaagauuugccugggccaccaugccgucagcaacggggcgaaaguuaauacuuugacggagagaggaguggaaguagugaacgcuaccgagacagucgaaaggacuaaugugccucggaucuguuccaaggguaaacgcaccguugauuuaggccaaugcgggcugcuaggaacaauuaccggcccaccgcagugugaccaguuccucgaguuuucugccgaucugaucauagaacgacgugaggguaacgacgugugcuaccccgggaaguucgucaaugaggaagcacuuagacagauccugaggaaaucaggaggcauugauaaggagacuaugggcuuuacauauagugggauccggaccaacggagccacgagcgcuugucgcagauccgguucuucguucuacgcagaaaugaagugguugcucucaaauacugacaacgccgcuuuuccucaaaugaccaaaagcuauaagaauauuaggaaagauccagcccugaucauauggggcauucaccauaguggguccacagcggagcagacuaagcuguacggaucuggcaacaaacucaucaccguggguagcuccaauuaucagcagucauucguacccaguccuggggcacggccacaaguuaacggacagagcggccgcauugacuuucacugguuaaugcugaaucccaacgauacagugaccuucucuuuuaacggcgccuucaucgcuccugaccgagccuccuuucuuagagggaagucaaugggaauccagagcgagguccagguggaugcaaauugcgaaggugacuguuaccauaguggcgggacgauuuugucuucccugccauuccaaaacauaaauagcaggacugugggagagugcccgcgguaugucaagcaggaaucgcuacuccuggcuacaggcaugaaaaacguucccgagaucccuaagggucgugggcuuuuuggcgccauugcgggauucaucgaaaauggcugggaggggcugguggauggaugguacgguuuccgccaccagaacgcccaaggcgaggggaccgcagcugacuacaaaucuacucaguccgccauagaccagauuacaggaaaguugaauagacucaucgagaaaaccaaccagcaauuugaacugaucgauaaugaguucacggaaguagaaaagcagauuggcaacgugaucaauuggaccagggacucauuaacagagauguggaguuauaacgcugagcugcucgucgccauggaaaaucagcacacuauugaucuugcagacagcgagaugaacaaacuguacgaacgggugcgacgccaguugagagagaaugccgaagaggaugguaccggguguuuugagauauuccauaagugcgacgaugacuguauggcuuccaucaggaacaacacauaugaucacucuaaguaccgggaagaggcgauucaaaaucgcauccagaucgacccaguuaaacuaagcucaggcuauaaggaugugauucugugguuuaguuucggagcauccugcuuuauacuccuggccaucgcuaugggccuugucuucauuugcgugaaaaacgggaauaugagauguacuaucugcauuuga

SEQ ID NO: 141881 - RNA, 1683 nt, Artificial Sequence
  derived and/or modified CDS sequence (opt3) from hemagglutinin__InfluenzaA__AAC40999
augaacacccagauccugauucucgcccuuguagcuauaauccccacaaaugcagacaagauuugccugggccaccaugccgucagcaacgggacuaaaguuaauacguugaccgagagaggaguggaaguagugaacgcgacagagacugucgaaaggaccaaugugccucggaucuguuccaaggguaaacgcacaguugauuuaggccaaugcgggcugcuaggaaccauuacuggcccaccgcagugugaccaguuccucgaguuuucugcugaucugaucauagaacgacgugagggugacgaugugugcuaccccgggaaguucgucaacgaggaagcccuuagacagauccugagggagucaggaggcauugacaaagaaacaaugggcuuuaccuauagugggauccggacgaauggagcaacuagcgccugucgcagauccgguucuucguucuacgcugagaugaagugguugcucucaaacaccgauaaugcagccuuuccucaaaugacaaagagcuauaaaaacauuaggaaggacccagcucugaucauauggggcauucaccauaguggguccacugccgagcagaccaaacuguacggaucuggcaauaagcucaucacaguggguagcuccaacuaucagcagucauucguacccauuccuggggcgcggccacaaguuaauggacagaguggccgcaucgauuuucacugguuaaugcugaaccccaaugacaccgugacguucagcuuuaacggcgcauucaucgccccugaucgagcuucuuuucuuagagggaaauccauggguauucagucagaaguccagguggacgccaacugcgagggagauuguuaccauagcggcgggacuauauugaauaaccugccauuccaaaauaucaacggaagggcagugggcaagugcccgcgguaugucaagcaggaaagucuacuccuggcuacagguaugaaaaauguucccgagauuccuaaggggcguggccuuuuuggagccaucgcgggcuucauagaaaacgggugggagggacugguggacgguugguacggcuuccgccaccagaaugcccaaggggagggaaccgcagcugacuacaaaucuacucaguccgccauugaucagaucacaggcaaguugaacagacucaucgagaaaaccaaucagcaauuugaacugauugacaacgaguucacggaaguagaaaagcagaucgguaaugugauuaacuggaccagggauagcaugacagaggucuggucguauaaugcugaguuacugguggccauggaaaaccagcacacuauagaccucgcagauucugagaugaauaaacuuuacgaacggguucgacgccagcugagagagaacgccgaagaggacgggaccggcuguuuugagaucuuccauaagugcgaugacgauuguauggcuuccauuaggaacaauacauaugaccacucaaaguaccgggaagaggcgauccaaaaccgcauccagauugauccagugaaauugaguagcggauauaaggacgucauacuaugguuuuccuucggcgcaucuugcuuuauccugcucgccauugcuauggggcugguguucaucugcgugaaaaauggaaacaugagauguacuauuugcaucuga

SEQ ID NO: 141882 - RNA, 1698 nt, Artificial Sequence; identical to SEQ ID NO: 130536
  derived and/or modified CDS sequence (opt3) from hemagglutinin__InfluenzaA__ACA28844

SEQ ID NO: 141883 - RNA, 1698 nt, Artificial Sequence; identical to SEQ ID NO: 135841
  derived and/or modified CDS sequence (opt3) from hemagglutinin__InfluenzaA__ACA28844/m1

SEQ ID NO: 141884 - RNA, 1701 nt, Artificial Sequence; identical to SEQ ID NO: 137198
  derived and/or modified CDS sequence (opt3) from hemagglutinin__InfluenzaA__ACV82259

SEQ ID NO: 141885 - RNA, 1701 nt, Artificial Sequence; identical to SEQ ID NO: 137198
  derived and/or modified CDS sequence (opt3) from hemagglutinin__InfluenzaA__ACV82259/m1

SEQ ID NO: 141886 - RNA, 1701 nt, Artificial Sequence; identical to SEQ ID NO: 137198
  derived and/or modified CDS sequence (opt3) from hemagglutinin__InfluenzaA__ACV82259/m2

SEQ ID NO: 141887 - RNA, 1701 nt, Artificial Sequence; identical to SEQ ID NO: 130715
  derived and/or modified CDS sequence (opt3) from hemagglutinin__InfluenzaA__ACP41953

SEQ ID NO: 141888 - RNA, 1701 nt, Artificial Sequence; identical to SEQ ID NO: 140289
  derived and/or modified CDS sequence (opt3) from hemagglutinin__InfluenzaA__AFM72832

SEQ ID NO: 141889 - RNA, 1701 nt, Artificial Sequence
  derived and/or modified CDS sequence (opt3) from hemagglutinin__InfluenzaA__EPI516528
augaaggccauccuggugguccuccuuuacaccuucgcuacagcaaacgccgacacucugugcauuggcuaucacgcgaauaacagcacggauaccguugacacaguguuggagaagaauguaacugugacccauuccgucaacuuacuggaagauaagcacaaugggaaacuauguaagcucagaggaguggcuccccugcaucuugguaaaugcaacauagccggcuggauccuggggaauccugagugugaaucuuugucaacagcaaguagcugguccuacauuguugagaccccaucuucggacaacggaacuugcuauccgggcgauuuuaucgacuacgaggagcucagggagcagcugucaagcgugaguuccuucgaacgguuugagauuuuccccaagacaucuagcuggccuaaucacgauuccaacaagggugucaccgccgcuuguccacaugcaggggccaaaucauuuuauaagaaucugaucuggcucgugaaaaagggaaacaguuaccccaaauuaagcaagucuuauauaaaugacaagggcaaagaaguacugguucuuuggggcauccaccacccuuccacgucagcugaucaacagagcuuguaccagaacgccgacgcguacguguucgucgggaguucucgcuauuccaagaaauuuaagccagagauugcaauccgacccaaagugcgugaucaggagggaagaaugaauuacuauuggacucugguggaaccuggugacaagauuaccuucgaggccacaggcaaccuagucguuccaagguacgcuuuugccauggaacggaacgcagggagcggaaucauaauuucggauacuccggugcaugacugcaauaccacaugucaaacccccaaaggcgcuaucaacacgucucucccuuuccagaauauucacccaaucacuaucgguaagugccccaaguauguaaaauccacaaagcugcgccuugccaccgggcugagaaacauuccuucaauacagaguaggggauuguuuggcgcgaucgccggcuucauugaagggggauggacugguaugguggacggcugguacggguaucaucaccagaaugaacaaggaagcggcuacgcagcugaucucaaauccacacagaacgccaucgacgagauaaccaauaaggucaacucugugauugagaaaaugaauacgcaguuuaccgcuguugguaaggaguucaaccaccuggaaaagcggaucgaaaauuuaaacaaaaagguggaugacggguuccuggauaucuggacauacaaugccgagcuccuuguccuguuggaaaacgagcgcacucuagacuaucaugauagcaaugugaaaaaccuguacgagaagguacgaucacagcucaaaaacaaugcaaaggaaauuggcaacggauguuuugaguucuaucacaagugcgacaauaccuguauggaaaguguuaaaaacggcacauacgauuauccaaaguacuccgaggaagccaaacugaauagagaggagaucgacggggugaaacuugaaagcacuaggauuuaucaaauacuggcuaucuacucuaccgucgcgucaaguuuggugcucgucgugagccugggagcaauuuccuuuuggaugugcucuaacgguucguuacauugccggaucuguguuuga

SEQ ID NO: 141890 - RNA, 1701 nt, Artificial Sequence
  derived and/or modified CDS sequence (opt3) from hemagglutinin__InfluenzaA__AGM53850
augaaggccauccuggugguccuccuuuacaccuucgcuacagcaaacgccgacacucugugcauuggcuaucacgcgaauaacagcacggauaccguugacacaguguuggagaagaauguaacugugacccauuccgucaacuuacuggaagauaagcacaaugggaaacuauguaagcucagaggaguggcuccccugcaucuugguaaaugcaacauagccggcuggauccuggggaauccugagugugaaucuuugucaacagcaaguagcugguccuacauuguugagaccccaucuucggacaacggaacuugcuauccgggcgauuuuaucgacuacgaggagcucagggagcagcugucaagcgugaguuccuucgaacgguuugagauuuuccccaagacaucuagcuggccuaaucacgauuccaacaagggugucaccgccgcuuguccacaugcaggggccaaaucauuuuauaagaaucugaucuggcucgugaaaaagggaaacaguuaccccaaauuaagcaagucuuauauaaaugacaagggcaaagaaguacugguucuuuggggcauccaccacccuccaacguccgcugaucaacagucauuguaccagaacgccgacgcguacguguucgucgggagcagucgcuauucuaagaaauuuaagcccgagauugcaauccgaccuaaagugcgugaucaggagggaagaaugaauuacuauuggacucugguggaaccaggugacaagauuaccuucgaggccacaggcaaccuagucguuccgagguacgcuuuugccauggaacggaacgcaggguccggaaucauaauuagcgauacucccgugcaugacugcaauaccacaugucaaaccccuaaaggcgcuaucaacacgucgcucccauuccagaauauucaccccaucacuaucgguaagugcccuaaguauguaaaaucuacaaagcugcgccuugccaccgggcugagaaacauuccauccauacagucaaggggauuguuuggcgcgaucgccggcuucauugaagggggauggacugguaugguggacggcugguacggguaucaucaccagaaugaacaaggaaguggcuacgcagcugaucucaaaagcacacagaacgccaucgacgagauaaccaauaaggucaacuccgugauugagaaaaugaauacgcaguuuaccgcuguugguaaggaguucaaccaccuggaaaagcggaucgaaaauuuaaacaaaaagguggaugacggguuccuggauaucuggacauacaaugccgagcuccuuguccuguuggaaaacgagcgcacucuagacuaucaugauucuaaugugaaaaaccuguacgagaagguacgaagccagcucaaaaacaaugcaaaggaaauuggcaacggauguuuugaguucuaucacaagugcgacaauaccuguauggaaucaguuaaaaacggcacauacgauuaucccaaguacagugaggaagccaaacugaauagagaggagaucgacggggugaaacuugaauccacuaggauuuaucaaauacuggcuaucuacagcaccgucgcgucuucauuggugcucgucgugagucugggagcaauuagcuuuuggaugugcuccaacgguucuuuacagugccggaucuguaucuga

SEQ ID NO: 141891 - RNA, 1701 nt, Artificial Sequence
  derived and/or modified CDS sequence (opt3) from hemagglutinin__InfluenzaA__EPI731463
augaaggccauccuggugguccuccuuuacaccuucgcuacagcaaacgccgacacucugugcauuggcuaucacgcgaauaacagcacggauaccguugacacaguguuggagaaaaauguaacugugacccauuccgucaacuuacuggaagauaagcacaaugggaaacuauguaagcucagaggaguggcuccccugcaucuugguaaaugcaacauagccggcuggauccuggggaauccugagugugaaucuuugucaacagcaaguagcugguccuacauuguugagaccccaucuucggacaacggaacuugcuauccgggcgauuuuaucgacuacgaagaacucagggagcagcugucaagcgugaguuccuucgaacgguuugagauuuuccccaauacaucuagcuggccuaaccacgauuccaauaagggugucaccgccgcuuguccacaugcaggggccaagucauuuuauaaaaaccugaucuggcucgugaagaaaggaaauaguuaccccaaguuaagcaaaucuuauauaaacgacaagggcaaggaaguacugguucuuuggggcauccaccacccuuccacgucagcugaucaacagagcuuguaccagaaugccgacgcguacguguucgucgggaguucucgcuauuccaaaaaguuuaaaccagagauugcaauccgacccaaggugcguggacaggaggguagaaugaacuacuauuggacucugguggaaccuggcgauaaaauuaccuucgaggccacagggaaccuagucguuccaagguacgcuuuugccauggaacggaaugcaggaagcggcaucauaauuucggacacuccggugcaugauugcaacaccacaugucaaacccccaagggugcuaucaauacgucucucccuuuccagaacauucacccaaucacuaucgggaaaugccccaaguauguaaaguccacaaaacugcgccuugccaccggacugagaaauauuccuucaauacagaguaggggcuuguuuggcgcgaucgccggguucauugagggagguuggacuggcaugguggacgggugguacggauaucaucaccagaacgaacaaggcagcgguuacgcagcugaccucaaguccacacagaaugccaucgaugagauaaccaacaaagucaauucugugauugagaagaugaacacgcaguuuaccgcuguugggaaagaguucaaucaccuggagaagcggaucgaaaacuuaaauaagaaaguggacgauggcuuccuggacaucuggacauacaacgccgagcuccuuguccuguuggaaaaugagcgcacucuagauuaucaugacagcaacgugaagaaccuguacgagaaaguacgaucacagcucaagaauaacgcaaaagaaauuggaaauggcuguuuugaguucuaucacaagugcgauaacaccuguauggaaaguguuaagaaugggacauacgacuauccaaaauacuccgaggaagccaagcugaacagagaggagaucgauggagugaaacuugaaagcacuaggauuuaucaaauacuggcuaucuacucuaccgucgcgucaaguuuggugcucgucgugagccugggugcaauuuccuuuuggaugugcucuaauggcucguuacagugccggaucuguaucuga

SEQ ID NO: 141892 - RNA, 1701 nt, Artificial Sequence; identical to SEQ ID NO: 132546
  derived and/or modified CDS sequence (opt3) from hemagglutinin__InfluenzaA__EPI696972

SEQ ID NO: 141893 - RNA, 1701 nt, Artificial Sequence; identical to SEQ ID NO: 141734
  derived and/or modified CDS sequence (opt3) from hemagglutinin__InfluenzaA__EPI662594

SEQ ID NO: 141894 - RNA, 1701 nt, Artificial Sequence
  derived and/or modified CDS sequence (opt3) from hemagglutinin__InfluenzaA__EPI685579
augaaggccauccuggugguccuccuuuacaccuucacaacugcuaacgcagacacgcugugcauuggcuaucacgccaauaacagcaccgauacaguugacacuguguuggagaagaauguaaccgugacacauuccgucaacuuacuggaagauaagcacaaugggaaacuauguaagcucagaggaguggcgccccugcaucuugguaaaugcaacauagcuggcuggauccuggggaauccugagugugaaucuuugucaaccgccaguagcugguccuacauuguugagacuucuaacucggacaauggaacaugcuauccaggcgauuuuaucaacuacgaagaacucagggagcagcugucaagcgugaguuccuucgaacgguuugagauuuucccgaagaccucuagcuggcccaaucacgacuccaacaagggugucacggcagccuguccucaugcuggggcaaaaucauuuuauaagaaucugaucuggcucgugaaaaagggaaacaguuacccaaaauuaaaucaaagcuauauaaacgauaagggcaaggaaguacugguucuuuggggcauccaccaccccucuacuaccgccgaccagcaguccuuguaccagaacgcugaugccuacguguucgucgggacaucacgcuauagcaaaaaguuuaaaccugagauugcgacucgaccaaaggugcgugacagagagggaaggaugaauuacuauuggacccugguggaacccggugauaaaaucacauucgaggcaaccggcaaccuagucguuccucgguacgccuuuacgauggaacgcaaugcugggaguggaauuaucauaucugacacuccagugcaugauugcaacacaaccugucaaacuccggagggcgccauuaauacaucccuccccuuccagaacauccacccuauuaccaucgguaagugcccaaaauauguaaagagcacgaagcugagacuugcaaccgggcugaggaaugugcccucgauccagucucggggauuguuuggcgcuauugccggcuucauagaagggggauggacagguauggucgacggcugguacggguaucaucaccagaacgagcaaggauccggcuacgcggccgaccucaaaucaacucagaaugcaaucgauaagauuaccaacaaagugaauaguguuaucgagaagaugaacacacaguuuacugcuguggguaaagaguucaaucaccuggagaagcgcauagaaaacuuaaauaagaaagucgacgauggguuccuggacauuuggaccuacaacgccgagcuccuugugcuguuggaaaacgagcgaacacuagauuaucaugacagcaauguaaagaaccuguacgagaaaguuagaaaucagcucaagaacaaugcuaaagaaaucggcaacggauguuuugaguucuaucacaagugcgauaauaccuguauggaauccgugaagaacggcacuuacgacuauccuaaauacucugaggaagccaagcugaauagggagaaaaucgauggggucaaacuugagagcacgcggauuuaucaaauccuggcaauuuacucaacaguggccaguuccuugguccucgugguuagccugggagcuauaucuuuuuggaugugcucaaacgguaguuuacagugccguaucuguauuuga

SEQ ID NO: 141895 - RNA, 1701 nt, Artificial Sequence
  derived and/or modified CDS sequence (opt3) from hemagglutinin__InfluenzaA__EPI830230
augaaggccauccuggugguccuccuuuacaccuucacaacugcuaacgcagacacgcugugcauuggcuaucacgccaauaacagcaccgauacaguugacacuguguuggagaaaaauguaaccgugacacauuccgucaacuuacuggaagauaagcacaaugggaaacuauguaagcucagaggaguggcgccccugcaucuugguaaaugcaacauagcuggcuggauccuggggaauccugagugugaaucuuugucaaccgccaguagcugguccuacauuguugagacuucuaacucggacaauggaacaugcuauccaggcgauuuuaucaacuacgaagaacucagggagcagcugucaagcgugaguuccuucgaacgguuugagauuuucccgaagaccucuagcuggcccaaucacgacuccaacaagggugucacggcagccuguccucaugcuggggcaaaaucauuuuauaagaaucugaucuggcucgugaaaaagggaaacaguuacccaaaauuaaaucaaagcuauauaaacgauaagggcaaggaaguacugguucuuuggggcauccaccaccccucuacuaccgccgaccagcaguccuuguaccagaacgcugaugccuacguguucgucgggacaucacgcuauagcaaaauguuuaagccugagauugcgacucgaccaaaagugcgugacagagagggaaggaugaauuacuauuggacccugguggaacccggugauaagaucacauucgaggcaaccggcaaccuagucguuccucgguacgccuuuacgauggaacgcaaugcugggaguggaauuaucauaucugacacuccagugcaugauugcaacacaaccugucaaacuccggagggcgccauuaauacaucccuccccuuccagaacauccacccuauuaccaucgguaaaugcccaaaguauguaaaaagcacgaagcugagacuugcaaccgggcugaggaaugugcccucgauccagucucggggauuguuuggcgcuauugccggcuucauagaagggggauggacagguauggucgacggcugguacggguaucaucaccagaacgagcaaggauccggcuacgcggccgaccucaagucaacucagaaugcaaucgauaaaauuaccaacaaggugaauaguguuaucgagaaaaugaacacacaguuuacugcuguggguaaggaguucaaucaccuggagaaacgcauagaaaacuuaaauaagaaggucgacgauggguuccuggacauuuggaccuacaacgccgagcuccuugugcuguuggaaaacgagcgaacacuagauuaucaugacagcaauguuaaaaaccuguacgagaagguaagaaaucagcucaaaaacaaugcuaaggaaaucggcaacggauguuuugaguucuaucacaaaugcgauaauaccuguauggaauccgugaagaacggcacuuacgacuauccuaaguacucugaggaagccaaacugaauagggagaagaucgauggggucaaacuugagagcacgcggauuuaucaaauccuggcaauuuacucaacaguggccaguuccuugguccucgugguuagccugggagcuauaucuuuuuggaugugcucaaacgguaguuuacagugccguaucuguauuuga

SEQ ID NO: 141896 - RNA, 1701 nt, Artificial Sequence; identical to SEQ ID NO: 130704
  derived and/or modified CDS sequence (opt3) from hemagglutinin__InfluenzaA__ACQ45338

SEQ ID NO: 141897 - RNA, 1701 nt, Artificial Sequence; identical to SEQ ID NO: 130704
  derived and/or modified CDS sequence (opt3) from hemagglutinin__InfluenzaA__ACQ45338/m1

SEQ ID NO: 141898 - RNA, 1701 nt, Artificial Sequence; identical to SEQ ID NO: 130704
  derived and/or modified CDS sequence (opt3) from hemagglutinin__InfluenzaA__ACQ45338/m2

SEQ ID NO: 141899 - RNA, 1701 nt, Artificial Sequence; identical to SEQ ID NO: 130366
  derived and/or modified CDS sequence (opt3) from hemagglutinin__InfluenzaA__ACU79871

SEQ ID NO: 141900 - RNA, 1701 nt, Artificial Sequence
  derived and/or modified CDS sequence (opt3) from hemagglutinin__InfluenzaA__ACU79871/m1
augaagaccaucauugcccugagcuacauauucugccucgcucuuggccaggaccugcccgggaacgauaauuccacagcaacuuuguguuuaggacaccaugccgugccuaacgguacgcuggucaaaaccaucacagacgaucaaauugagguuacuaaugcgaccgagcuagugcagucuucaaguacaggcaagaucugcaacaauccacacaggauucucgacgggaucgauuguacccugauagacgcucugcugggagauccgcauugcgacguauuucagaacgaaacuugggauuuguucguggaaagaagcaaagccuuuuccaauuguuaucccuacgacgucccugauuaugcaucucuccggucgcugguggccucaagcggcacacuggaguucaucaccgaagguuuuacguggacugggguuacccagaacggaggcaguaaugcuugcaagcgcggcccaggguccggauucuuuucucgacucaacugguuaacaaaaagcgguuccacuuaccccgugcugaaugucaccaugccuaacaaugacaacuucgauaaacuuuauauuuggggcgugcaccauccaucaacaaaucaagagcagaccaguuuguacguacaggcaagcgggcguguuacggugucuacuagaaggucccagcaaacaaucauucccaacaucgagucacggccuuggguccgcggacagagcaguagaauaucuauuuauuggaccaucgugaagccaggcgacgugcuggucauuaacuccaaugguaaccuaaucgccccgaggggguacuuuaaaaugcggacuggaaagagcucgaucaugcgcucugacgcucccauugauacauguauauccgaaugcaucaccccuaauggcucaauuccaaacgacaaacccuuccagaauguuaacaagaucacguacggcgccuguccuaaauaugugaagcagaauacccucaagcuggcgacagggaugcgaaacguaccagagaaacaaacuagaggacuuuuuggugcaauagccggcuucauugaaaaugggugggagggaaugaucgauggcugguacgguuuuaggcaccagaacagugaggggaccggccaggcugccgaccuuaagagcacacaagcagcuaucgaucagauuaauggaaaagugaaccggaucauugaaaagacuaaugagaaauuccaccagauagaaaaggaguucuccgaagucgagggccguauccaggacuuggagaaauauguggaagauaccaagauugaccucuggucuuacaacgccgagcuguuaguugcgcuggaaaaucaacauacaaucgaucucaccgacagcgagaugaacaaacuuuuugaaaagacucgcagacagcugagggagaacgccgaggauauggggaauggaugcuucaagaucuaucacaagugugacaacgcaugcauugaaucaauacggagugguacguacgaccaugauguguaucgagacgaggcuuugaauaaccgcuuucagaucaagggcgucgaacuaaaauccggguacaaggauuggauucuguggaucagcuucgccauuucuugcuuucuccugugugugguacuucugggauucaucaugugggcuugccagagaggcaauauaagguguaacaucugcauuuga

SEQ ID NO: 141901 - RNA, 1701 nt, Artificial Sequence
  derived and/or modified CDS sequence (opt3) from hemagglutinin__InfluenzaA__EPI643118
augaagaccaucauugcccugagcuacauacucugccuuguguucgcucagaaaauccccggcaacgacaauuccacagcaacucuguguuuggggcaccaugccgucccuaacggaacgauuguuaagaccaucacaaaugauagaauugaggugacuaacgcgaccgaauuaguacaaaauucuucaaucggugagauaugcgacaguccacaccagauccuggauggcgaaaacuguacacuaauugacgcucuccugggggauccgcagugcgacggauuucagaauaaaaagugggaucuuuucguggagaggagcaaagccuauuccaacuguuaccccuaugacgucccugauuacgcaucucugcggucguugguggccucaagcggcacccucgaauuuaauaacgagaguuucaauuggacugguguuacacaaaacgggaccuccucugcuugcauccgccgaagcuccucaaguuucuucagccgucugaauuggcugacgcaucucaacuauaaguacccagcauuaaaugugacuaugcccaacaacgagcaguuugacaagcuguauauuuggggaguccaccauccuggcaccgauaaagaccagaucuucccauacgcccagucuuccggcagaauaauugugucaacaaagaggagccaacaggcuguaauccccaauauugggagucggccucgcaucagagauaucccaucuaggauuuccauauacuggacuaucguuaaaccgggagacauucuuuugaucaacagcaccgguaaucugauagcgccccggggcuauuuuaagcuacgcucggggaaaucuuccauuaugcgaucagacgccccuaucggaaaguguaagagugaaugcaucacaccaaacggcagcauucccaaugauaaaccuuuccagaacgugaauagaaucaccuacggugcauguccaagguaugucaagcacuccacgcucaaacuggccacugggaugcggaacgugcccgagaagcagacacguggaauuuuuggcgcuauagccggcuucaucgaaaaugggugggagggaaugguggacgguugguacggcuuucgccaccaaaacucugaggggagaggacaggcagcugaucuuaaaagcacccaggccgcgauugaccaaaucaauggcaagcugaacagguugaucgguaaaacuaaugaaaaguuccaucagauugagaaggaauuuucagaggucgaagggcggauacaggaucucgagaaauauguugaggacacaaagaucgaucuguggaguuacaacgccgaauuacugguggcacucgagaaucagcacaccauugaccuuacggauuccgaaaugaacaaacuguuugagaagaccaaaaagcaauugcgagaaaacgcugaggacaugggcaauggaugcuucaagaucuaucauaaaugugauaacgccugcauuggcagcauccgcaaugggacauacgaccacaacguauacagagacgaggcucuaaauaacagguuucagauaaagggaguggaacugaaaucugguuauaaggauuggauccucuggauuucauucgccaucaguugcuuucugcuuugugucgcacuguugggcuucauuaugugggccugccagaaagggaauauccgguguaacauaugcauuuga

SEQ ID NO: 141902 - RNA, 1701 nt, Artificial Sequence; identical to SEQ ID NO: 140489
  derived and/or modified CDS sequence (opt3) from hemagglutinin__InfluenzaA__EPI675798

SEQ ID NO: 141903 - RNA, 1701 nt, Artificial Sequence
  derived and/or modified CDS sequence (opt3) from hemagglutinin__InfluenzaA__EPI578430
augaagaccaucauugcccugagcuacauacucugccuuguguucgcucagaaaauccccggcaacgacaauuccacagcaacucuguguuuggggcaccaugccgucccuaacggaacgauuguuaagaccaucacaaaugauagaauugaggugacuaacgcgaccgaauuaguacaaaauucuucaaucggugagauaugcgacaguccacaccagauccuggauggcgaaaacuguacacuaauugacgcucuccugggggauccgcagugcgacggauuucagaauaaaaagugggaucuuuucguggagaggagcaaagccuauuccucuuguuaccccuaugacgucccugauuacgcaucgcugcggucauugguggccagcaguggcacccucgaauuuaacaaugaguccuucaacuggacugguguuacacaaaaugggaccucuagcgcuugcauccgccgauccucaaguagcuuuuucucucgucugaacuggcugacgcaucucaauuauaaguacccagcauuaaacgugacuaugcccaauaacgagcaguuugacaagcuguauauuuggggaguccaccauccuggcaccgauaaagaccagaucuucccauacgcccaguccucaggcagaauaacagugagcacuaagaggagucaacaggcuguaauucccaacaucgggucucggccucgcauuagagauaucccauccaggaucagcauuuacuggaccauaguuaaaccgggagacauccuuuugauuaauucgacagguaaccugaucgcgccccggggcuauuuuaagauacgcucugggaaauccucaauuaugcgaagugacgccccuaucggaaaguguaagagcgaaugcaucaccccaaauggcuccauucccaacgauaaaccuuuccagaaugugaacagaaucacguacggugcauguccaagguaugucaagcacucuacucuaaaacucgccacagggaugcggaaugugcccgagaagcagacccguggaauuuuuggcgcuauagccggcuucaucgaaaacgggugggagggaaugguggacgguugguacggcuuucgccaccaaaauagcgaggggagaggacaggcagcugaucugaaaucaacucaggccgcgauugaccaaaucaacggcaaacuuaauaggcugaucgguaaaacaaacgaaaaguuccaucagauugagaaggaguucagugaagucgaagggcggauacaggauuuggagaaauauguugaggacaccaagaucgaucucugguccuacaaugccgaacuguuaguggcacuggagaaccagcacacgauugaccucaccgauagcgaaaugaauaaacuuuuugagaagacaaagaagcaacugcgagaaaacgcugaggacaugggcaacggaugcuucaagaucuaucauaaaugugauaaugccugcauuggcucuauccgcaacgggacuuacgaccacaauguauacagagacgaggcuuugaacaauagguuucagauaaagggaguggaacuaaaaucagguuauaaggauuggauccuguggauuaguuucgccaucagcugcuuucuccugugugucgcacuucugggcuucauuaugugggccugccagaaagggaacauccgguguaauauaugcauuuga

SEQ ID NO: 141904 - RNA, 1701 nt, Artificial Sequence
  derived and/or modified CDS sequence (opt3) from hemagglutinin__InfluenzaA__EPI614406
augaagaccaucauugcccugagcuacauacucugccuuguguucgcucagaaaauccccggcaacgacaauuccacagcaacucuguguuuggggcaccaugccgucccuaacggaacgauuguuaagaccaucacaaaugauagaauugaggugacuaacgcgaccgaauuaguacaaaauucuucaaucggugagauaugcgacaguccacaccagauccuggauggcgaaaacuguacacuaauugacgcucuccugggggauccgcagugcgacggauuucagaauaaaaagugggaucuuuucguggagaggagcaaagccuauuccucuuguuaccccuaugacgucccugauuacgcaucgcugcggucauugguggccagcaguggcacccucgaauuuaacaaugaguccuucaacuggacugguguuacacaaaaugggaccucuagcgcuugcauccgccgauccucaaguagcuuuuucucucgucugaacuggcugacgcaucucaauuauaaguacccagcauuaaacgugacuaugcccaauaacgagcaguuugacaagcuguauauuuggggaguccaccauccuggcaccgauaaagaccagaucuucccauacgcccaguccucaggcagaauaacagugagcacuaagaggagucaacaggcuguaauucccaacaucgggucucggccucgcauuagaaauaucccauccaggaucagcauuuacuggaccauaguuaaaccgggagauauccuuuugauuaacucgacagguaaucugaucgcgccccggggcuauuuuaagauacgcucugggaaauccucaauuaugcgaagugacgccccuaucggaaaguguaagagcgaaugcaucaccccaaacggcuccauucccaaugacaaaccuuuccagaacgugaauagaaucacguacggugcauguccaagguaugucaagcacucuacucuaaaacucgccacagggaugcggaacgugcccgagaagcagacccguggaauuuuuggcgcuauagccggcuucaucgaaaaugggugggagggaaugguggaugguugguacggcuuucgccaccaaaacagcgaggggagaggacaggcagcugaccugaaaucaacucaggccgcgauugaucaaaucaauggcaaacuuaacaggcugaucgguaaaacaaaugaaaaguuccaucagauugagaaggaguucagugaagucgaagggcggauacaggacuuggagaaauauguugaggauaccaagaucgaccucugguccuacaacgccgaacuguuaguggcacuggagaaucagcacacgauugaucucaccgacagcgaaaugaacaaacuuuuugagaagacaaagaagcaacugcgagaaaacgcugaggauaugggcaauggaugcuucaagaucuaucauaaaugugacaacgccugcauuggcucuauccgcaaugggacuuacgaucacaacguauacagagacgaggcuuugaauaacagguuucagauaaagggaguggaacuaaaaucagguuauaaggacuggauccuguggauuaguuucgccaucagcugcuuucuccugugugucgcacuucugggcuucauuaugugggccugccagaaagggaauauccgguguaacauaugcauuuga

SEQ ID NO: 141905 - RNA, 1695 nt, Artificial Sequence
  derived and/or modified CDS sequence (opt3) from hemagglutinin__InfluenzaA__ACU65077/m1
auggagaagaucgugcuccuguucgccauugucagccuuguuaaauccgaccagauaugcaucggcuaccacgcuaacaauucuaccgaacaaguggauacaauuauggagaagaacguaacugugacgcaugcacaggacauccuggaaaagacccacaaugggaaguugugugauuuagacggagucaaaccccugauucuaagagauugcucaguggccgguuggcuccugggcaacccuaugugugacgaguuuaucaauguuccagaauggaguuauauaguggagaaggcgaacccggucaaugaucuuugcuaccccggggacuucaacgauuaugaggaacugaagcauuugcucagcaggaucaaucacuuugagaaaauucagaucauuccuaaguccucuuggucgucacaugaagcuagccugggagugaguuccgccuguccauaccagggcaaaucuagcuucuuucggaacguaguuuggcugaucaagaaaaauuccacauaucccacuauaaagcgcucauacaacaauaccaaccaagaggaccucuuagugcugugggguauucaccacccuaaugaugcagccgagcagacaaaacuuuaucagaacccaaccacuuacaucagugucgggacaagcaccuugaaccagcgacuggugccccguauugcuacgagaucuaaagugaauggacaauccggcaggauggaguucuuuuggacuauccuaaagccuaacgacgcaaucaauuucgaaucaaacggcaauuuuauugccccagaauacgcuuauaaaauagucaagaaaggggauagcaccaucaugaagagugagcucgaauacggaaacugcaauacaaaaugucagacuccgaugggugccauuaacucuuccaugcccuuccauaauauccacccucugaccauaggcgagugcccaaaguauguuaagagcaaccggcuugugcuggcgacaggguugcgcaauucgccccagagagagaccaggggacucuuuggcgcaauugccgguuucaucgaagggggauggcagggcaugguagacggcugguacggguaucaucacucuaacgagcaaggauccgguuacgcugccgacaaagaaucaacgcagaaggcaaucgauggcgugacuaauaaagucaacaguauuaucgacaagaugaauacacaguuugaggcuguggggcgggaguucaacaaccuggaacgccgaauugagaauuuaaacaaaaagauggaagauggauuccuggacguuuggaccuauaaugccgagcuccuugugcugauggaaaacgagagaacuuuggauuuucacgacagcaaugucaagaaccuauacgauaaagugaggcugcaacuccgggacaaugcgaaggaacugggcaacgguuguuucgaguuuuaccauaaaugcgauaaugaguguauggaauccguacguaacgggacauaugacuacccucaguauucugaggaagcccgccuuaagagagaggagauaagcggcguuaaacuggaaucaaucggaauuuaccagaucuugaguaucuauuccaccguggcaagcucucucgcucuggccauuauggucgcuggcuuaucacuguggaugugcaguaaugggagccuacagugcaggauauguaucuga

SEQ ID NO: 141906 - RNA, 1695 nt, Artificial Sequence; identical to SEQ ID NO: 141905
  derived and/or modified CDS sequence (opt3) from hemagglutinin__InfluenzaA__ACU65077/m2

SEQ ID NO: 141907 - RNA, 1707 nt, Artificial Sequence; identical to SEQ ID NO: 128076
  derived and/or modified CDS sequence (opt3) from hemagglutinin__InfluenzaA__ABP51976

SEQ ID NO: 141908 - RNA, 1707 nt, Artificial Sequence; identical to SEQ ID NO: 128076
  derived and/or modified CDS sequence (opt3) from hemagglutinin__InfluenzaA__ABP51976/m1

SEQ ID NO: 141909 - RNA, 1695 nt, Artificial Sequence
  derived and/or modified CDS sequence (opt3) from hemagglutinin__InfluenzaA__ABW90125
auggagaagaucgugcuccuguucgccauugucagccuuguuaaauccgaccagauaugcaucggcuaccacgcuaacaauucuaccgaacaaguggauacaauuauggagaagaacguaacugugacgcaugcacaggacauccuggagaaaaagcacaaugggaaauugugugauuuagacggagucaagccccugauucuaagagauugcucaguggccgguuggcuccugggcaacccuaugugugacgaauuuaucaauguuccagaauggaguuauauaguggagaaggcgaacccggucaaugaucuuugcuaccccggggacuucaacgauuaugaggaacugaaacauuugcucagcaggaucaaucacuuugagaagauucagaucauuccuaaauccuacuggucuucgcaugaggcuucacugggagugagcagugccuguccauaucagggcaaguccucuuucuuucggaacguaguuuggcugaccaaaaagaauagcacauaccccacuaucaagcgcuccuauaacaauaccaaccaagaagaccucuuagugcugugggguauacaccacccuaaugaugcagccgagcagacaaaacuuuaccagaacccaaccacuuacauuucagucgggacaaguaccuugaaccagcgacuggugccccguaucgcuacgagaagcaaggugaauggacaaucuggcaggauggaguucuuuuggacuauucuaaaaccuaacgacgcaaucaauuucgaauccaacggcaauuuuaucgccccagaauaugcuuacaagauugucaaaaagggggauucaaccauaaugaaaagcgagcucgaauauggaaacugcaauacaaagugucagacuccgaugggugccaucaacaguucuaugcccuuccauaauauucacccucugaccaucggcgagugcccaaaguacguuaaauccaaccggcuugugcuggcgacaggguugcgcaauagcccccagagagagaccaggggacucuuuggcgcaauagccgguuucauugaagggggauggcagggcaugguagacggcugguauggguaccaucacucgaacgagcaaggaucugguuaugcugccgacaaggaauccacgcagaaagcaaucgauggcgugacuaauaaggucaacucaaucauugacaaaaugaauacacaguuugaggcuguggggcgggaguucaacaaccuggaacgccgaaucgagaauuuaaacaagaagauggaagauggauuccuggacguuuggaccuacaaugccgagcuccuugugcugauggaaaacgagagaacuuuggauuuucacgacaguaaugucaaaaaccuauacgauaaggugaggcugcaacuccgggacaaugcgaaagaacugggcaacgguuguuucgaguuuuaucauaagugcgauaaugaguguauggaaagcguacguaacgggacauacgacuauccucaguacuccgaggaagcccgccuuaaaagagaggagauuucuggcguuaagcuggaaagcauaggaaucuaucagauuuugucaaucuacaguaccguggcauccagccucgcucuggccaucauggucgcuggcuuaucucuguggaugugcucaaaugggagucuacagugcaggauuuguauauga

SEQ ID NO: 141910 - RNA, 1695 nt, Artificial Sequence
  derived and/or modified CDS sequence (opt3) from hemagglutinin__InfluenzaA__ABW90126
auggagaagaucgugcuccuguucgccauugucagccuuguuaaauccgaccagauaugcaucggcuaccacgcuaacaauucuaccgaacaaguggauacaauuauggagaagaacguaacugugacgcaugcacaggacauccuggagaaaaagcacaaugggaaauugugugauuuagacggagucaagccccugauucuaagagauugcucaguggccgguuggcuccugggcaacccuaugugugacgaauuuaucaauguuccagaauggaguuauauaguggagaaggcgaacccggucaaugaucuuugcuaccccggggacuucaacgauuaugaggaacugaaacauuugcucagcaggaucaaucacuuugagaagauucagaucauuccuaaauccucuuggucgucacaugaagcuagccugggagugaguuccgccuguccauaccagggcaagucuagcuucuuucggaacguaguuuggcugaucaaaaagaacuccaccuaucccacaauaaaggguucauacaauaauacuaaccaagaggaccucuuagugcugugggggauucaccacccuaaugaugcagccgagcagaccaaacuuuaucagaacccaacaaccuacaucagugucggaacuagcacauugaaccagcgccuggugccccgaauugcuacccguucuaaggugaauggccaauccggcagaauggaguucuuuuggacgauccuaaaaccuaacgacgcaaucaauuucgaaucaaacgggaauuuuauugccccagaauacgcuuauaagauagucaaaaagggagauagcacuaucaugaaaagugagcucgaauacgguaacugcaauaccaagugucagacaccgaugggcgccauuaacucuuccaugcccuuccauaauauccacccucugacuauaggggagugcccaaaguauguuaaaagcaacaggcuugugcuggcgaccggauugcgcaauucgccccagcgggagacaagaggccucuuuggugcaauugccggguucaucgaaggaggcuggcagggcaugguagacgggugguacggauaucaucacucuaacgagcaagguuccggcuacgcugccgacaaggaaucaacccagaaagcaaucgauggggugacgaauaaggucaacaguauuaucgacaaaaugaauacucaguuugaggcugugggaagggaguucaacaaccuggaacggcgcauugagaauuuaaacaagaagauggaagauggcuuccuggacguuuggacauauaaugccgagcuccuugugcugauggaaaacgagcgaaccuuggauuuucacgacagcaaugucaaaaaccuauacgauaaggugagacugcaacucagggacaaugcgaaagaacuggguaacggguguuucgaguuuuaccauaagugcgauaaugaguguauggaauccguacggaacggcacuuaugacuacccucaguauucugaggaagcccgucuuaaacgcgaggagauaagcggaguuaagcuggaaucaaucggcauuuaccagaucuugaguaucuauuccacaguggcaagcucucucgcucuggccauuauggucgcuggguuaucacuguggaugugcaguaauggaagccuacagugcagaauauguaucuga

SEQ ID NO: 141911 - RNA, 1695 nt, Artificial Sequence
  derived and/or modified CDS sequence (opt3) from hemagglutinin__InfluenzaA__ABW90127
auggagaagaucgugcuucucuucgccauugucagccuuguuaaauccgaccagauaugcaucggcuaccacgcuaacaauucuaccgaacaaguggauacaauuauggagaagaacguaacugugacgcaugcacaggacauccuggagaaaaagcacaaugggaaauugugugauuuagacggagucaagccccugauucuaagagauugcucaguggccgguuggcuccugggcaacccuaugugugacgaguuuaucaauguuccagaauggaguuauauaguggagaaggcgaacccggucaaugaucuuugcuaccccggggacuucaacgauuaugaggaacugaaacauuugcucagcaggaucaaucacuuugagaagauucagaucauuccuaaauccucuuggucgucacaugaagcuagccugggagugaguuccgccuguccauaccagggcgagucuagcuucuuucggaacguaguuuggcugaucaagaaaaauuccaccuaucccacaauaaagcgcucauacaacaauacuaaccaagaggaccucuuagugcugugggguauucaccacccuaaugaugcagccgaacagaccaagcuguaucagaacccaacaaccuacaucagugucgggacuagcacauugaaccagcgacuggugccccguauugcuaccagaucuaaagugaauggacaauccggcaggauggaguucuuuuggacgauccuaaagccuaacgacgcaaucaauuucgaaucaaacggcaauuuuauugccccagaguacgcuuauaaaauagucaagaaaggggauagcacuaucaugaagagugaacucgaguacggaaacugcaauaccaaaugucagacaccgaugggugccauuaacucuuccaugcccuuccauaauauccacccucugacuauaggcgagugcccaaaguauguuaagagcaaccggcuugugcuggcgaccggguugcgcaauucgccccagagagaaacaaggggacucuuuggcgcaauugccgguuucaucgaagggggauggcagggcaugguagacggcugguacggguaucaucacucuaacgaacaaggauccgguuacgcugccgacaaagagucaacccagaaggcaaucgauggcgugacgaauaaagucaacaguauuaucgacaagaugaauacucaguuugaagcuguggggcgggaguucaacaaccuggagcgccgaauugaaaauuuaaacaaaaagauggaggauggauuccuggacguuuggacauauaaugccgaacuccuugugcugauggagaacgaaagaaccuuggauuuucacgacagcaaugucaagaaccuauacgauaaagugaggcugcaacuccgggacaaugcgaaggagcugggcaacgguuguuucgaguuuuaccauaaaugcgauaaugaauguauggaguccguacguaacgggacuuaugacuacccucaguauucugaagaggcccgccuuaagagagaggaaauaagcggcguuaaacuggagucaaucggaauuuaccagaucuugaguaucuauuccacaguggcaagcucucucgcucuggccauuauggucgcuggcuuaucacuguggaugugcaguaaugggagccuacagugcaggauauguaucuga

SEQ ID NO: 141912 - RNA, 1695 nt, Artificial Sequence
  derived and/or modified CDS sequence (opt3) from hemagglutinin__InfluenzaA__ABW90128
auggagaagaucgugcuucucuucgccauugucagccuuguuaaauccgaccagauaugcaucggcuaccacgcuaacaauucuaccgaacaaguggauacaauuauggagaagaacguaacugugacgcaugcacaggacauccuggagaaaaagcacaaugggaaauugugugauuuagacggagucaagccccugauucuaagagauugcucaguggccgguuggcuccugggcaacccuaugugugacgaguuuaucaauguuccagaauggaguuauauaguggagaaggcgaacccggucaaugaucuuugcuaccccggggacuucaacgauuaugaggaacugaaacauuugcucagcaggaucaaucacuuugagaagauucagaucauuccuaaauccucuuggucgucacaugaagcuagccugggagugaguuccgccuguccauaccagggcaagucuagcuucuuucggaacguaguuuggcugaucgagaaaaauuccaccuaucccacaauaaagcgcucauacaacaauacuaaccaagaggaccucuuagugcugugggguauucaccacccuaaugaugcagccgaacagaccaagcuguaucagaacccaacaaccuacaucagugucgggacuagcacauugaaccagcgacuggugccccguauugcuaccagaucuaaagugaauggacaauccggcaggauggaguucuuuuggacgauccuaaagccuaacgacgcaaucaauuucgaaucaaacggcaauuuuauugccccagaguacgcuuauaaaauagucaagaaaggggauagcacuaucaugaagagugaacucgaguacggaaacugcaauaccaaaugucagacaccgaugggugccauuaacucuuccaugcccuuccauaauauccacccucugacuauaggcgagugcccaaaguauguuaagagcaaccggcuugugcuggcgaccggguugcgcaauucgccccagagagaaacaaggggacucuuuggcgcaauugccgguuucaucgaagggggauggcagggcaugguagacggcugguacggguaucaucacucuaacgaacaaggauccgguuacgcugccgacaaagagucaacccagaaggcaaucgauggcgugacgaauaaagucaacaguauuaucgacaagaugaauacucaguuugaagcuguggggcgggaguucaacaaccuggagcgccgaauugaaaauuuaaacaaaaagauggaggauggauuccuggacguuuggacauauaaugccgaacuccuugugcugauggagaacgaaagaaccuuggauuuucacgacagcaaugucaagaaccuauacgauaaagugaggcugcaacuccgggacaaugcgaaggagcugggcaacgguuguuucgaguuuuaccauaaaugcgauaaugaauguauggaguccguacguaacgggacuuaugacuacccucaguauucugaagaggcccgccuuaagagagaggaaauaagcggcguuaaacuggagucaaucggaauuuaccagaucuugaguaucuauuccacaguggcaagcucucucgcucuggccauuauggucgcuggcuuaucacuguggaugugcaguaaugggagccuacagugcaggauauguaucuga

SEQ ID NO: 141913 - RNA, 1695 nt, Artificial Sequence
  derived and/or modified CDS sequence (opt3) from hemagglutinin__InfluenzaA__ABW90129
auggagaagaucgugcuccuguucgccauugucagccuuguuaaauccgaccagauaugcaucggcuaccacgcuaacaauucuaccgaacaaguggauacaauuauggagaagaacguaacugugacgcaugcacaggacauccuggagaaaaagcacaaugggaaauugugugauuuagacggagucaagccccugauucuaagagauugcucaguggccgguuggcuccugggcaacccuaugugugacgaguuuaucaauguuccagaauggaguuauauaguggagaaggcgaacccggucaaugaucuuugcuaccccggggacuucaacgauuaugaggaacugaaacauuugcucagcaggaucaaucacuuugagaagauucagaucauuccuaaauccucuuggucgucacaugaagcuagccugggagugaguuccgccuguccauaccagggcaagucuagcuucuuucggaacguaguuuggcugaucaaaaagaacuccgcauaucccaccauaaagcgcucauacaauaauacaaaccaagaggaccucuuagugcugugggguauucaccacccuaaugaugccgcugagcagacugaacuuuaucagaacccaaccacauacaucagugucgggaccagcacuuugaaccagcgacuggugccccguauugcaacaagaucuaaagugaauggacaauccggcaggauggaguucuuuuggaccauccuaaagccuaacgacgccaucaauuucgaaucaaacggcaauuuuauugcuccagaguacgccuauaaaauagucaagaaaggggauagcacgaucaugaagagugaacucgaguacggaaacugcaauacuaaaugucagaccccgaugggugcgauuaacucuuccaugcccuuccauaauauccacccucugacaauaggcgagugcccaaaguauguuaagagcaaccggcuugugcuggcaacuggguugcgcaauucgccccagagagaaaccaggggacucuuuggcgccauugcugguuucaucgaagggggauggcagggcaugguagacggcugguacggguaucaucacucuaacgaacaaggauccgguuacgccgcagacaaagagucaacacagaaggcuaucgauggcgugaccaauaaagucaacaguauuaucgacaagaugaauacgcaguuugaagccguggggcgggaguucaacaaccuggagcgccgaauugaaaauuuaaacaaaaagauggaggauggauuccuggacguuuggacuuauaaugcggaacuccuugugcugauggagaacgaaagaacauuggauuuucacgacagcaaugucaagaaccuauacgauaaagugaggcugcaacuccgggacaaugccaaggagcugggcaacgguuguuucgaguuuuaccauaaaugcgauaaugaauguauggaguccguacguaacgggaccuaugacuacccucaguauucugaagaggcacgccuuaagagagaggaaauaagcggcguuaaacuggagucaaucggaauuuaccagaucuugaguaucuauuccacuguggcuagcucucucgcccuggcuauuauggucgccggcuuaucacuguggaugugcaguaaugggagccuacagugcaggauauguaucuga

SEQ ID NO: 141914 - RNA, 1695 nt, Artificial Sequence
  derived and/or modified CDS sequence (opt3) from hemagglutinin__InfluenzaA__ABW90130
auggagaagaucgugcuccuguucgccauugucagccuuguuaaauccgaccagauaugcaucggcuaccacgcuaacaauucuaccgaacaaguggauacaauuauggagaagaacguaacugugacgcaugcacaggacauccuggagaaaaagcacaaugggaaauugugugauuuagacggagucaagccccugauucuaagagauugcucaguggccgguuggcuccugggcaacccuaugugugacgaauuuaucaauguuccagaauggaguuauauaguggagaaggcgaacccggucaaugaucuuugcuaccccggggacuucaacgauuaugaggaacugaaacauuugcucagcaggaucaaucacuuugagaagauucagaucauuccuaaauccucuuggucgucacaugaagcuagccugggagugaguuccgccuguccauaccagggcaaguucucuuucuuccggaacguaguuuggcugaucaaaaagaauagcaccuaucccacaauaaagcgcuccuacaacaauacuaaccaagaggaccucuuagugcugugggguauucaccacccuaaugaugcagccgagcagaccaaacuuuaucagaacccaacaaccuacaucucagucgggacaaguacuuugaaccagcgacuggugccccguauugcuaccagaagcaaggugaauggacaaucuggcaggauggaauuuuucuggacgauccuaaaaccuaacgacgcaaucaauuuugaguccaacggcaauuucauugccccagaauacgcuuauaagauagucaaaaagggggauucaacuaucaugaaaagcgagcucgaauacggaaacugcaauaccaagugucagacaccgaugggugccauuaacaguucuaugcccuuucauaauauccacccucugacuauaggcgagugcccaaaguauguuaaauccaaccggcuugugcuggcgaccggguugcgcaauagcccccagagagagacaaggggacucuucggcgcaauugccgguuuuaucgaagggggauggcagggcaugguagacggcugguacggguaucaucacucgaacgagcaaggaucugguuacgcugccgacaaggaauccacccagaaagcaaucgauggcgugacgaauaaggucaacucaauuaucgacaaaaugaauacucaguucgaggcuguggggcgggaauuuaacaaccuggagcgccgaauugagaauuuaaacaagaagauggaagauggauuucuggacguuuggacauauaaugccgagcuccuugugcugauggaaaacgagagaaccuuggauuuccacgacaguaaugucaaaaaccuauacgauaaggugaggcugcaacuccgggacaaugcgaaagaacugggcaacgguuguuuugaguucuaccauaagugcgauaaugaguguauggaaagcguacguaacgggacuuaugacuacccucaguauuccgaggaagcccgccuuaaaagagaggagauaucuggcguuaagcuggaaagcaucggaauuuaccagaucuugucaaucuauaguacaguggcauccagccucgcucuggccauuauggucgcuggcuuaucucuguggaugugcucaaaugggagucuacagugcaggauauguaucuga

SEQ ID NO: 141915 - RNA, 1695 nt, Artificial Sequence
  derived and/or modified CDS sequence (opt3) from hemagglutinin__InfluenzaA__ABW90132
auggagaagaucgugcuccuguucgccauugucagccuuguuaaauccgaccagauaugcaucggcuaccacgcuaacaauucuaccgaacaaguggauacaauuauggagaagaacguaacugugacgcaugcacaggacauccuggagaaaaagcacaaugggaaauugugugauuuagacggagucaagccccugauucuaagagauugcucaguggccgguuggcuccugggcaacccuaugugugacgaguuuaucaauguuccagaauggaguuauauaguggagaaggcgaacccggucaaugaucuuugcuaccccggggacuucaacgauuaugaggaacugaaacauuugcucagcaggaucaaucacuuugagaagauucagaucauuccuaaauccucuuggucgucacaugaagcuagccugggagugaguuccgccuguccauaccagggcaagucuagcuucuuucggaacguaguuuggcugaucaaaaagaacuccaccuaucccacaauaaagcgcucauacaauaauacuaaccaagaggaccucuuagugcugugggguauucaccacccuaauaacgcagccgagcagaccgaacuuuaucagaacccaacaaccuacaucagugucgggacuagcacauugaaucagcgacuggugccccguauugcuaccagaucuaaagugaacggacaauccggcaggauggaguucuuuuggacgauccuaaagccuaaugaugcaaucaacuucgaaucaaauggcaacuuuauugccccagaguacgcuuauaaaauagucaagaaaggggacagcacuaucaugaagagugaacucgaguacggaaauugcaacaccaaaugucagacaccgaugggugccauuaauucuuccaugcccuuccauaacauccacccucugacuauaggcgagugcccaaaguauguuaagagcaaucggcuugugcuggcgaccggguugcgcaacucgccccagagagaaacaaggggacucuuuggcgcaauugccgguuucaucgaagggggauggcagggcaugguagauggcugguacggguaucaucacucuaaugaacaaggauccgguuacgcugccgacaaagagucaacccagaaggcaaucgacggcgugacgaacaaagucaauaguauuaucgauaagaugaacacucaguuugaagcuguggggcgggaguucaacaaucuggagcgccgaauugaaaacuuaaauaaaaagauggaggacggauuccuggauguuuggacauauaacgccgaacuccuugugcugauggagaaugaaagaaccuuggacuuucacgauagcaacgucaagaaucuauacgacaaagugaggcugcaacuccgggauaacgcgaaggagcugggcaaugguuguuucgaguuuuaccauaaaugcgacaacgaauguauggaguccguacguaaugggacuuaugauuacccucaguauucugaagaggcccgccuuaagagagaggaaauaagcggcguuaaacuggagucaaucggaauuuaccagaucuugaguaucuauuccacaguggcaagcucucucgcucuggccauuauggucgcuggcuuaucacuguggaugugcaguaacgggagccuacagugcaggauauguaucuga

SEQ ID NO: 141916 - RNA, 1695 nt, Artificial Sequence
  derived and/or modified CDS sequence (opt3) from hemagglutinin__InfluenzaA__ABW90133
auggagaagaucgugcuccuguucgccauugucagccuuguuaaauccgaccagauaugcaucggcuaccacgcuaacaauucuaccgaacaaguggauacaauuauggagaagaacguaacugugacgcaugcacaggacauccuggagaaaaagcacaaugggaaauugugugauuuagacggagucaagccccugauucuaagagauugcucaguggccgguuggcuccugggcaacccuaugugugacgaauuuaucaauguuccagaauggaguuauauaguggagaaggcgaacccggucaaugaucuuugcuaccccggggacuucaacgauuaugaggaacugaaacauuugcucagcaggaucaaucacuuugagaagauucagaucauuccuaaauccucuuggucgucacaugaagcuagccugggagugaguuccgccuguccauaccagggcaagcccucuuucuuucggaacguaguuuggcugaucaaaaagaauagcaccuauccuacaauaaagcgcuccuacaacaauacuaaccaagaggaccucuuagugcugugggguauucaccacccaaaugaugcagccgagcagaccaaacuuuaucagaaccccacaaccuacaucucagucgggacaaguacuuugaaccagcgacuggugccucguauugcuaccagaagcaaggugaauggacaaucuggcaggauggaguucuuuuggacgauccuaaaaccaaacgacgcaaucaauuucgaauccaacggcaauuuuauugccccggaauacgcuuauaagauagucaaaaagggggauucaacuaucaugaaaagcgagcucgaauacggaaacugcaauaccaagugucagacacccaugggugccauuaacaguucuaugccuuuccauaauauccacccacugacuauaggcgagugccccaaguauguuaaauccaaccggcuugugcuggcgaccggguugcgcaauagcccucagagagagacaaggggacucuuuggcgcaauugccgguuucaucgaagggggauggcagggcaugguagacggcugguacggguaucaucacucgaacgagcaaggaucugguuacgcugccgacaaggaauccacccagaaagcaaucgauggcgugacgaauaaggucaacucaauuaucgacaaaaugaauacucaguuugaggcuguggggcgggaguucaacaaccuggaacgccgaauugagaauuuaaacaagaagauggaagauggauuccuggacguuuggacauauaaugccgagcuccuugugcugauggaaaacgagagaaccuuggauuuucacgacaguaaugucaaaaaccuauacgauaaggugaggcugcaacuccgggacaaugcgaaagaacugggcaacgguuguuucgaguuuuaccauaagugcgauaaugaguguauggaaagcguacguaacgggacuuaugacuacccacaguauuccgaggaagcccgccuuaaaagagaggagauaucuggcguuaagcuggaaagcaucggaauuuaccagaucuugucaaucuauaguacaguggcauccagccucgcucuggccauuauggucgcuggcuuaucucuguggaugugcucaaaugggagucuacagugcaggauauguaucuga

SEQ ID NO: 141917 - RNA, 1695 nt, Artificial Sequence
  derived and/or modified CDS sequence (opt3) from hemagglutinin__InfluenzaA__ABW90134
auggagaagaucgugcuccuguucgccauugucagccuuguuaaauccgaccagauaugcaucggcuaccacgcuaacaauucuaccgaacaaguggauacaauuauggagaagaacguaacugugacgcaugcacaggacauccuggagaaaaagcacaaugggaaauugugugauuuagacggagucaagccccugauucuaagagauugcucaguggccgguuggcuccugggcaacccuaugugugacgaauuuaucaauguuccagaauggaguuauauaguggagaaggcgaacccggucaaugaucuuugcuaccccggggacuucaacgauuaugaggaacugaaacauuugcucagcaggaucaaucacuuugagaagauucagaucauuccuaaauccucuuggucgucacaugaagcuagccugggagugaguuccgccuguccauaccaggagaagucuagcuucuuucggaacguaguuuggcugaucaaaaagaacuccaccuaucccacaauaaagcgcucauacaauaauacuaaccaagaggaccucuuagugcuguggggcauucaccacccuaaugaugcagccgaacagaccaaacuuuaucagaacccaacaaccuacaucagugucgguacuagcacauugaaccagcgacuggugccccguauugcuaccagaucuaaggugaaugggcaauccggaaggauggaguucuuuuggacgauccuaaaaccuaacgacgcaaucaauuucgaaucaaacggcaauuuuauugccccagaguacgcuuauaagauagucaaaaagggcgauagcacuaucaugaaaagugaacucgaguacgggaacugcaauaccaagugucagacaccgaugggagccauuaacucuuccaugcccuuccauaauauccacccucugacuauaggugagugcccaaaguauguuaaaagcaaccggcuugugcuggcgaccggcuugcgcaauucgccccagagagaaacaagggggcucuuuggagcaauugccggcuucaucgaggguggguggcagggaaugguagacggcugguacggcuaucaucacucuaacgaacaaggguccggauacgcugccgacaaggagucaacccagaaagcaaucgauggugugacgaauaaggucaacaguauuaucgacaaaaugaauacucaguuugaagcugugggccgggaguucaacaaccuggagcgccgaauugaaaauuuaaacaagaagauggaggauggguuccuggacguuuggacauauaaugccgaacuccuugugcugauggagaacgaaagaaccuuggauuuucacgacagcaaugucaaaaaccuauacgauaaggugaggcugcaacuccgggacaaugcgaaagagcugggaaacggcuguuucgaguuuuaccauaagugcgauaaugaauguauggaguccguacguaacgguacuuaugacuacccucaguauucugaagaggcccgccuuaaaagagaggaaauaagcgggguuaagcuggagucaaucggcauuuaccagaucuugaguaucuauuccacaguggcaagcucucucgcucuggccauuauggucgcuggauuaucacuguggaugugcaguaauggcagccuacagugcaggauauguaucuga

SEQ ID NO: 141918 - RNA, 1695 nt, Artificial Sequence
  derived and/or modified CDS sequence (opt3) from hemagglutinin__InfluenzaA__ABW90135
auggagaagaucgugcuccuguucgccauugucagccuuguuaaauccgaccagauaugcaucggcuaccacgcuaacaauucuaccgaacaaguggauacaauuauggagaagaacguaacugugacgcaugcacaggacauccuggaaaagaagcacaaugggaaauugugugauuuagacggagucaagccccugauucuaagagauugcucaguggccgguuggcuccugggcaacccuaugugugacgaguuuaucaauguuccagaauggaguuauauaguggagaaggcgaacccggucaaugaucuuugcuaccccggggacuucaacgauuaugaggaacugaaacauuugcucagcaggaucaaucacuuugagaagauucagaucauuccuaaauccucuuggucgucacaugaagcuagccugggagugaguuccgccuguccauaccagggcaagucuagcuucuuucggaacguaguuuggcugaucaauaaaaacuccaccuaucccacaauaaagcgcucauacaauaacacuaaucaagaggaccucuuagugcugugggguauucaccacccuaacgaugcagccgagcagaccaaacuuuaucagaacccaacaaccuacaucagugucgggacuagcacauugaaucagcgacuggugccccguauugcuaccagaucuaaagugaacggacaauccggcaggauggaguucuuuuggacgauccuaaagccuaaugacgcaaucaacuucgaaucaaauggcaacuuuauugccccagaauacgcuuauaaaauagucaagaaaggggauagcacuaucaugaagagugagcucgaauacggaaauugcaacaccaaaugucagacaccgaugggugccauuaauucuuccaugcccuuccauaacauccacccucugacuauaggcgagugcccaaaguauguuaagagcaaucggcuugugcuggcgaccggguugcgcaacucgccccagagagagacaaggggacucuuuggcgcaauugccgguuucaucgaagggggauggcagggcaugguagacggcugguacggguaucaucacucuaaugagcaaggauccgguuacgcugccgacaaagaaucaacccagaaggcaaucgauggcgugacgaacaaagucaauaguauuaucgacaagaugaacacucaguuugaggcuguggggcgggaguucaacaaucuggaacgccgaauugagaacuuaaauaaaaagauggaagauggauuccuggacguuuggacauauaacgccgagcuccuugugcugauggaaaaugagagaaccuuggauuuucacgacagcaacgucaagaaucuauacgauaaagugaggcugcaacuccgggacaacgcgaaggaacugggcaaugguuguuucgaguuuuaccauaaaugcgauaacgaguguauggaauccguacguaaugggacuuaugacuacccucaguauucugaggaagcccgccuuaagagagaggagauaagcggcguuaaacuggaaucaaucggaauuuaccagaucuugaguaucuauuccacaguggcaagcucucucgcucuggccauuauggucgcuggcuuaucacuguggaugugcaguaacgggagccuacagugcaggauauguaucuga

SEQ ID NO: 141919 - RNA, 1695 nt, Artificial Sequence
  derived and/or modified CDS sequence (opt3) from hemagglutinin__InfluenzaA__HB649491
auggagaagaucgugcuccuguucgccauugucagccuuguuaaauccgaccagauaugcaucggcuaccacgcuaacaauucuaccgaacaaguggauacaauuauggagaagaacguaacugugacgcaugcacaggacauccuggagaaaaagcacaaugggaaauugugugauuuagacggagucaagccccugauucuaagagauugcucaguggccgguuggcuccugggcaacccuaugugugacgaauuuaucaauguuccagaauggaguuauauaguggagaaggcgaacccggucaaugaucuuugcuaccccggggacuucaacgauuaugaggaacugaaacauuugcucagcaggaucaaucacuuugagaagauucagaucauuccuaaauccucuuggucgucacaugaagcuagccugggagugaguuccgccuguccauaccagggcaagucuagcuucuuucggaacguaguuuggcugaucaaaaagaacuccaccuaucccacaauaaagcgcucauacaauaauacuaaccaagaggaccucuuagugcugugggguauucaccacccuaaugaugcagccgagcagaccaaacuuuaucagaacccaacaaccuacaucagugucgggacuagcacauugaaccagcgacuggugccccguauugcuaccagaucuaaggugaauggacaauccggcaggauggaguucuuuuggacgauccuaaaaccuaacgacgcaaucaauuucgaaucaaacggcaauuuuauugccccagaauacgcuuauaagauagucaaaaagggggauagcacuaucaugaaaagugagcucgaauacggaaacugcaauaccaagugucagacaccgaugggugccauuaacucuuccaugcccuuccauaauauccacccucugacuauaggcgagugcccaaaguauguuaaaagcaaccggcuugugcuggcgaccggguugcgcaauucgccccagagagagacaaggggacucuuuggcgcaauugccgguuucaucgaagggggauggcagggcaugguagacggcugguacggguaucaucacucuaacgagcaaggauccgguuacgcugccgacaaggaaucaacccagaaagcaaucgauggcgugacgaauaaggucaacaguauuaucgacaaaaugaauacucaguuugaggcuguggggcgggaguucaacaaccuggaacgccgaauugagaauuuaaacaagaagauggaagauggauuccuggacguuuggacauauaaugccgagcuccuugugcugauggaaaacgagagaaccuuggauuuucacgacagcaaugucaaaaaccuauacgauaaggugaggcugcaacuccgggacaaugcgaaagaacugggcaacgguuguuucgaguuuuaccauaagugcgauaaugaguguauggaauccguacguaacgggacuuaugacuacccucaguauucugaggaagcccgccuuaaaagagaggagauaagcggcguuaagcuggaaucaaucggaauuuaccagaucuugaguaucuauuccacaguggcaagcucucucgcucuggccauuauggucgcuggcuuaucacuguggaugugcaguaaugggagccuacagugcaggauauguaucuga

SEQ ID NO: 141920 - RNA, 1683 nt, Artificial Sequence; identical to SEQ ID NO: 138036
  derived and/or modified CDS sequence (opt3) from hemagglutinin__InfluenzaA__EPI439507

SEQ ID NO: 141921 - RNA, 1701 nt, Artificial Sequence
  derived and/or modified CDS sequence (opt3) from hemagglutinin__InfluenzaA__EPI482777
augaaggccauccuggugguccuccuuuacaccuucacaacugcuaacgcagacacgcugugcauuggcuaucacgccaauaacagcaccgauacaguugacacuguguuggagaaaaauguaaccgugacacauuccgucaacuuacuggaaaauagacacaacgggaagcuauguaaacucaggggaguggcgccccugcaucuugguaagugcaauauagcuggcuggcuguuggggaacccugagugugaaucucucucaaccgccaguagcugguccuacaucguugagacuucuaauucggauaacggaacaugcuauccaggcgacuuuauuaauuacgaagaacugcgggagcagcugucaagcgugaguuccuucgaacgcuuugagaucuucccgaaaaccucuagcuggcccaaccacgauacgaaucgaggugucacugcagccuguccucaugcuggggcaaacuccuuuuaucguaaucucgugugguuaguaaagaagggaaacucauacccaaaaauuaacaagaguuauaucaauaacaaagaaaaggagguucuggugcuuugggccauacaccaccccagcaccucugcugaccaacaguccuuguaccagaaugccgaugcguacgucuucgugggcucaagcagauauaguaggaaauuugagccugaaaucgcaacacggccaaaggugcgcgaccaggccggcagaaugaacuacuauuggacucuggucgagcccggggauaagauuaccuucgaagcuacaggaaaucuaguugccccuagguacgcauuugcucucaaacggaacucugguuccggcaucauuaucagcgacaccucggugcaugauugcgacacgacuugucaaacaccaaauggggccauaaacaccucucugccguuccagaauauucaccccguaacuaucggagagugcccuaaguaugugaaauccacaaaguuacgcauggcgaccggccugcgaaacauuccaucaauccagaguagagguuuguuuggggccaucgcaggauucauugaaggcggcuggacggggaugauagauggaugguacgguuaucaucaccagaaugagcaaggcagcggguacgcugccgaccucaaauccacccagaacgcuaucgacggaauuacaaauaaggucaacucugugaucgagaaaaugaauacucaguuuaccgccguuggcaaggaguucagccaccuggagaggcggauagaaaacuuaaacaagaaaguggaugacgguuuccuggauauuuggacauacaaugcagagcuccuuguccuguuggaaaacgagcguacucuagacuaucaugauucaaaugugaagaaccuguacgagaaaguacgcagucagcucaagaauaacgccaaagaaaucgggaauggcuguuuugaguucuaucacaagugcgacgauauguguauggaauccguuaagaacggaaccuacgacuaucccaaauacagcgaggaagcuaagcugaauagagaggagaucgauggcgugaaacuugaaucuacaaggauuuaucaaauccuggcgauuuacucaaccgucgcaaguagcuuggugcucgucgugucccugggggccauaucuuuuuggaugugcucgaacggaagccuucagugccggaucuguauuuga

SEQ ID NO: 141922 - RNA, 1701 nt, Artificial Sequence; identical to SEQ ID NO: 133632
  derived and/or modified CDS sequence (opt3) from hemagglutinin__InfluenzaA__EPI745532

SEQ ID NO: 141923 - RNA, 1701 nt, Artificial Sequence
  derived and/or modified CDS sequence (opt3) from hemagglutinin__InfluenzaA__EPI278594
augaaggccauccuggugguccuccuuuacaccuucgcuacagcaaacgccgacacucugugcauuggcuaucacgcgaauaacagcacggauaccguugacacaguguuggagaaaaauguaacugugacccauuccgucaacuuacuggaagauaagcacaaugggaaacuauguaagcucagaggaguggcuccccugcaucuugguaaaugcaacauagccggcuggauccuggggaauccugagugugaaucuuugucaacagcaaguagcugguccuacauuguugagaccucuucgucagacaacggaacuugcuauccaggcgauuuuaucgacuacgaagaacucagggagcagcugagcaguguguccucuuucgaacgguuugagauuuucccgaagacaagcuccuggcccgaucacgaaucaaauaagggugucaccgccgcuuguccucaugcaggggccaaaaguuuuuauaagaaccugaucuggcucgugaaaaagggaaauagcuacccaaaauuaucuaaguccuauauaaacgacaagggcaaagagguacugguucuuuggggcauccaccaccccucaacgagcgcugaucaacagaguuuguaccagaaugccgacgcguacguguucgucgggacuucucgcuauuccaagaaauuuaagccugagauugcaauccgaccaaaagugcgugaucaggaaggaagaaugaacuacuauuggacccugguggagcccggugacaagauuacauucgaagccacuggcaaucuagucguuccuagguacgcuuuugccauggagcggaacgcagggagcggaaucauaauuucggauaccccagugcaugacugcaacacaaccugucaaacgccgaaaggcgcuaucaauacuucucuccccuuccagaacauucacccuaucacaaucgguaagugcccaaaguauguaaaauccaccaagcugcgccuugccacugggcugagaaaugugcccucaauucagaguaggggauuguuuggcgcgauagccggcuucaucgaagggggauggacagguauggucgacggcugguacggguaucaucaccagaacgagcaaggaagcggcuacgcagcugaucucaaauccacccagaaugccauugacaagaucacgaacaaaguuaauucugugauagagaagaugaacacccaguuuacagcuguggguaaggaguucaaucaccuggagaaacggauugaaaacuuaaauaagaaagucgaugacggguuccuggauaucuggacuuacaacgccgagcuccuugugcuguuggaaaaugagcgcacccuagacuaucaugauagcaacguaaagaaucuguacgagaaaguucgaucacagcucaagaacaacgcaaaggaaaucggcaauggauguuuugaguucuaucacaaaugcgacaacacauguauggaaagugugaagaauggcacuuacgauuauccuaaauacuccgaggaagccaagcugaacagagaggagauugacggggucaaacuugaaagcaccaggaucuaucaaauucuggcuauauacucuacaguggcgucaaguuugguccucgugguuagccugggagcaaucuccuuuuggaugugcucuaaugguucguuacagugccggauuuguaucuga

SEQ ID NO: 141924 - RNA, 1701 nt, Artificial Sequence
  derived and/or modified CDS sequence (opt3) from hemagglutinin__InfluenzaA__AEE69009
augaaggccauccuggugguccuccuuuacaccuucgcuacagcaaacgccgacacucugugcauuggcuaucacgcgaauaacagcacggauaccguugacacaguguuggagaagaauguaacugugacccauuccgucaacuuacuggaagauaagcacaaugggaaacuauguaagcucagaggaguggcuccccugcaucuugguaaaugcaacauagccggcuggauccuggggaauccugagugugaaucuuugucaacagcaaguagcugguccuacauuguugagaccccaucuucggacaacggaacuugcuauccgggcgauuuuaucgacuacgaggagcucagggagcagcugucaagcgugaguuccuucgaacgguuugagauuuuccccaagacaucuagcuggccuaaucacgauuccaacaagggugucaccgccgcuuguccacaugcaggggccaaaucauuuuauaagaaucugaucuggcucgugaaaaagggaaacaguuaccccaaauuaagcaagucuuauauaaaugacaagggcaaagaaguacugguucuuuggggcauccaccacccuccaacguccgcugaucaacagucauuguaccagaacgccgacacuuacguguucgucgggagcagucgcuauucuaagaaauuuaagcccgagauugcgauccgaccuaaagugcgugaucaggagggaagaaugaauuacuauuggacccugguggaaccaggugacaagauuacauucgaggcaacuggcaaccuagucguuccgagguacgccuuugcuauggaacggaacgccggguccggaaucauaauuagcgauacccccgugcaugacugcaauacaaccugucaaacgccuaaaggcgcaaucaacacuucgcucccauuccagaauauucaccccaucacaaucgguaagugcccuaaguauguaaaaucuaccaagcugcgccuugcuacugggcugagaaacauuccauccauacagucaaggggauuguuuggcgccaucgcgggcuucauugaagggggauggacagguaugguggacggcugguacggguaucaucaccagaaugaacaaggaaguggcuacgccgcagaucucaaaagcacccagaacgcuaucgacgagauaacgaauaaggucaacuccgugauugagaaaaugaauacccaguuuacagccguugguaaggaguucaaccaccuggaaaagcggaucgaaaauuuaaacaaaaagguggaugacggguuccuggauaucuggacuuacaaugcugagcuccuuguccuguuggaaaacgagcgcacccuagacuaucaugauucuaaugugaaaaaccuguacgagaagguacgaagccagcucaaaaacaaugccaaggaaauuggcaacggauguuuugaguucuaucacaagugcgacaauacauguauggaaucaguuaaaaacggcacuuacgauuaucccaaguacagugaggaagcaaaacugaauagagaggagaucgacggggugaaacuugaauccaccaggauuuaucaaauacuggccaucuacagcacagucgcuucuucauuggugcucgucgugagucugggagcgauuagcuuuuggaugugcuccaacgguucuuuacagugccggaucuguaucuga

SEQ ID NO: 141925 - RNA, 1701 nt, Artificial Sequence; identical to SEQ ID NO: 130999
  derived and/or modified CDS sequence (opt3) from hemagglutinin__InfluenzaA__GQ280797

SEQ ID NO: 141926 - RNA, 1701 nt, Artificial Sequence; identical to SEQ ID NO: 130732
  derived and/or modified CDS sequence (opt3) from hemagglutinin__InfluenzaA__EPI178457

SEQ ID NO: 141927 - RNA, 1701 nt, Artificial Sequence; identical to SEQ ID NO: 130732
  derived and/or modified CDS sequence (opt3) from hemagglutinin__InfluenzaA__EPI176470

SEQ ID NO: 141928 - RNA, 1701 nt, Artificial Sequence
  derived and/or modified CDS sequence (opt3) from hemagglutinin__InfluenzaA__EPI280341
augaaggccauccuggugguccuccuucacaccuucgcuacagcaaacgccgacacucugugcauuggcuaccaugcgaauaacagcacggauaccguugacacaguguuggagaagaauguaacugugacccacuccgucaacuuacuggaagauaagcauaaugggaaacuauguaagcucagaggaguggcuccccugcaccuugguaaaugcaacauagccggcuggauccuggggaauccugagugugaaucuuugucaacagcaaguagcugguccuauauuguugagaccucuucgucagacaacggaacuugcuacccaggcaauuuuaucgauuaugaggagcucagggagcagcugagcaguguguccucuuucgaacgguuugagauuuucccgaagacaagcuccuggcccgaccaugauucaaacaagggugucaccgccgcuuguccucacgcaggggccaaaaguuuuuacaagaaucugaucuggcucgugaaaaagggaaacagcuauccaacguuaucuaaauccuacauaaaugacaagggcaaggaaguacugguucuuuggggcauccaccaucccucaacuagcgcugaucaacagaguuuguaucagaacgccgacgcguacguguucgucgggaccucucgcuacuccaaaaaguuuaaaccugagauugcaauccgaccaaaggugcguaaucaggagggaagaaugaacuauuacuggacacugguggaacccggugauaaaauuacuuucgaggccaccggcaaccuagucgcuccuagguaugccuuugcaauggaacggaaugcugggagcggaaucauaauuucggacacaccaguucacgauugcaacaccacgugucaaacuccgaagggcgccaucaauacaucucuccccuuccagaacauucauccuaucaccaucgguaaaugcccaaaguacgugaaguccacuaaacugcgccuugcgacagggcugagaaauguacccucaauucagaguaggggauuguuuggcgccauagcaggcuucaucgaagggggauggaccgguaugguggacggcugguauggguaccaccaccagaacgaacaaggaagcggcuaugcugccgaccucaaguccacgcagaaugcuauugauaaaaucaccaacaaggucaauucugugauagagaaaaugaacacacaguuuacugccguugguaaggaguucaaucaucuggaaaagcggauugagaacuuaaauaaaaagguggacgauggguuccuggacaucuggaccuacaacgcagaacuccuuguccuguuggagaaugaacgcacacuagauuaccacgacagcaacgugaaaaaccuguaugagaagguacgaucacagcucaaaaauaacgccaaggagaucggcaauggauguuuugaguucuaccauaagugcgauaacacuuguauggaaaguguuaaaaauggcaccuaugacuacccuaaguauuccgaagaggcuaaacugaacagagaagagauugauggggugaaacuugagagcacaaggaucuaccaaauucuggcgauauauucuaccgucgcaucaaguuuggugcucgucgugagccugggagccaucuccuuuuggaugugcucuaaugguucguuacagugccggauuuguaucuga

SEQ ID NO: 141929 - RNA, 1701 nt, Artificial Sequence
  derived and/or modified CDS sequence (opt3) from hemagglutinin__InfluenzaA__EPI240319
augaaggccauccuggugguccuccuuuacaccuucgcuacagcaaacgccgacacucugugcauuggcuaucacgcgaauaacagcacggauaccguugacacaguguuggagaaaaauguaacugugacccauuccgucaacauauuagaagauaagcacaaugggaaacuguguaagcuaagaggaguggcuccccuccaucuggguaaaugcaacaucgccggcuggauucuugggaauccugagugugaaucucugucaacagcaaguagcugguccuacaucguugagaccucuucgucagacaacggaacuugcuauccaggcgauuuuauugacuacgaagaguugagggagcagcucagcaguguguccucuuucgaacgguuugagaucuucccgaagacaagcuccuggcccaaucacgauucaaacaagggugucaccgccgcuuguccucaugcaggggccaaaaguuuuuauaagaaucugauauggcuggugaaaaagggaaacagcuacccaaaacucucuaaguccuauaucaaugacaagggcaaagaaguauuaguucuguggggcauucaccaccccucaacgagcgcugaucaacagagucuuuaccagaacgccgacgcguacguguucgucgggucuucccgcuauagcaagaaauuuaagccugagaucgcaauucgaccaaaagugcgugauagagagggaaggaugaauuacuauuggacuuugguggaacccggugacaagaucaccuucgaggccacaggcaaccuggucguuccucgguacgcuuuugccauggaacgcaacgcagggucgggaauaauuaucucugauacuccagugcaugacugcaauaccacaugucagaccccgaaaggcgcuauuaacacgucccuacccuuccaaaauauccacccuaucacuauugguaagugcccaaaguauguaaaaucaacaaagcucagacuggccaccgggcuuaggaacgugcccaguauacagagccggggacuguuuggcgcgaucgccggcuucauugaagggggauggacugguauggucgacggcugguacggguaucaucaccagaaugaacagggauccggcuacgcagcugauuugaaaucuacacaaaacgccaucgacgagauaaccaauaaggugaacagcguuauugagaaaaugaauacgcaguuuaccgcuguggguaaggaguucaaccaccucgagaagcgcaucgaaaaucugaacaaaaaggucgaugacggguucuuagauaucuggacauacaaugccgagcugcucgugcuucuggaaaacgagcgaacuuuggacuaucaugauucaaauguuaaaaaccuauacgagaagguaagaagucagcugaaaaacaaugcaaaggaaauuggcaacggauguuuugaguucuaucacaagugcgacaauaccuguauggaauccgugaaaaacggcacauacgauuauccuaaguacagcgaggaagccaaacucaauagggaggagaucgacggggucaagcuggaaucuacucggauuuaucagauacuugcuaucuacucaaccguggcgaguagccuggucuuggugguuucccucggagcaauuucuuuuuggaugugcucgaacgguagccugcaaugccguaucuguaucuga

SEQ ID NO: 141930 - RNA, 1701 nt, Artificial Sequence; identical to SEQ ID NO: 130897
  derived and/or modified CDS sequence (opt3) from hemagglutinin__InfluenzaA__EPI183134

SEQ ID NO: 141931 - RNA, 1701 nt, Artificial Sequence
  derived and/or modified CDS sequence (opt3) from hemagglutinin__InfluenzaA__EPI368693
augaaggccauccuggugguccuccuuuacaccuucgcuacagcaaacgccgacacucugugcauuggcuaucacgcgaauaacagcacggauaccguugacacaguguuggagaaaaauguaacugugacccauuccgucaacauauuagaagauaagcacaaugggaaacuguguaagcuaagaggaguggcuccccuccaucuggguaaaugcaacaucgccggcuggauucuugggaauccugagugugaaucucugucaacagcaaguagcugguccuacaucguugagaccucuucgucagacaacggaacuugcuauccaggcgauuuuauugacuacgaagaguugagggagcagcucagcaguguguccucuuucgaacgguuugagaucuucccgaagacaagcuccuggcccaaucacgauucaaacaagggugucaccgccaguuguccucaugcuggggcaaagagcuuuuauaaaaaucugauauggcuggugaaaaagggaaacucuuacccaaaacucuccaagucauauaucaaugacaagggcaaagaaguauuaguucuguggggcauucaccaccccagcacgagugccgaucaacagucucuuuaccagaacgcugacgccuacguguucgucggguccagccgcuauucgaagaaauuuaagccugagaucgcgauucgaccaaaagugcguggacaggaggguagaaugaauuacuauuggacuuugguggaacccggcgauaagaucaccuucgaggcaacagggaaccuggucguuccuagguacgccuuugcuauggaacggaacgccggaucuggcauaauuaucuccgacacuccagugcaugauugcaauaccacaugucaaaccccgaaaggugcaauuaacacgucacuacccuuccagaauauccacccuaucacuauugggaagugcccaaaguauguaaaaaguacaaagcuccgccuggcuaccggacuuagaaacgugcccagcauacaguccaggggccuguuuggcgccaucgcgggguucauugagggagguuggacuggcauggucgacgggugguacggauaucaucaccagaaugaacaaggcucugguuacgccgcagacuugaaaagcacacagaacgcuaucgaugagauaaccaauaaggugaacucaguuauugagaaaaugaauacgcaguuuaccgccguggggaaggaguucaaccaccucgaaaagcggaucgaaaaucugaacaaaaaggucgacgauggcuucuuagacaucuggacauacaaugcugagcugcucgugcuucuggaaaacgagcgcacuuuggauuaucaugacaguaauguuaaaaaccuauacgagaagguacgaucccagcugaaaaacaaugccaaggaaauuggaaacggcuguuuugaguucuaucacaagugcgauaauaccuguauggaaagcgugaaaaacgggacauacgacuauccuaaguacucugaggaagcaaaacucaauagagaggagaucgauggagucaagcuggaaucaacuaggauuuaucaaauacuugccaucuacaguaccguggcuagcucccuggucuuggugguuucucucggugcgauuucguuuuggaugugcagcaacggcucccugcagugccggaucuguaucuga

SEQ ID NO: 141932 - RNA, 1701 nt, Artificial Sequence
  derived and/or modified CDS sequence (opt3) from hemagglutinin__InfluenzaA__EPI291788
augaaggccauccuggugguccuccuuuacaccuucacaacugcuaacgcagacacgcugugcauuggcuaucacgccaauaacagcaccgauacaguugacacuguguuggagaaaaauguaaccgugacacauuccgucaacuuacuggaaaauagacacaacgggaagcuauguaaacucaggggaguggcgccccugcaucuugguaagugcaauauagcuggcuggcuguuggggaacccugagugugaaucucucucaaccgccaguagcugguccuacaucguugagacuucuaauucggauaacggaacaugcuauccaggcgacuuuauuaauuacgaagaacugcgggagcagcugucaagcgugaguuccuucgaacgcuuugagaucuucccgaaaaccucuagcuggcccaaccacgauacgaaucgaggugucacugcagccuguccucaugcugggaccaacuccuuuuaucguaaucucauuugguuagugaagaagggaaacucauacccaaaaaucaacaagaguuauauaaauaacaaagaaaaggagguacugguucuuugggcaauccaccaccccagcacaucugccgaccaacaguccuuguaccagaaugcugaugccuacguguucgucggcucaagcagauauaguaggaaauuugagccugaaauugcgacucggccaaaggugcgcgaccaggcaggcagaaugaacuacuauuggacccugguggagcccggggauaagaucacauucgaagccaccggaaaucuagucguuccuagguacgcuuuugcccucaaacggaacucugguuccggcauuaucauaagcgacacgucggugcaugauugcgacacuacaugucaaaccccaaauggggcaauuaacacuucucugccguuccagaauauccaccccguaacaauuggagagugcccuaaguaugugaaauccaccaaguuacgcauggcuacgggccugcgaaacaucccaucaauccagaguagagguuuguuuggggccauugcgggauucauagaaggcggcuggaccgggaugaucgauggaugguacgguuaucaucaccagaaugagcaaggcagcggguacgccgcagaccucaaauccacacagaacgcuauugacggaaucacuaauaaggucaacucugugauagagaaaaugaauacccaguuuacagccguuggcaaggaguucagccaccuggagaggcggauugaaaacuuaaacaagaaaguggaugacgguuuccuggauaucuggacuuacaaugcugagcuccuuguccuguuggaaaacgagcguacccuagacuaucaugauucaaaugugaagaaccuguacgagaaaguacgcagucagcucaagaauaacgccaaagaaaucgggaauggcuguuuugaguucuaucacaagugcgacgauacauguauggaauccguuaagaacggaaccuacgacuaucccaaauacagcgaggaagcaaagcugaauagagaggagauugauggcgugaaacuugaaucuacuaggaucuaucaaauucuggccauauacucaacggucgcuaguagcuuggugcucgucgugucccugggggcgaucucuuuuuggaugugcucgaacggaagccuucagugccggauuuguaucuga

SEQ ID NO: 141933 - RNA, 1701 nt, Artificial Sequence
  derived and/or modified CDS sequence (opt3) from hemagglutinin__InfluenzaA__EPI482788
augaaggccauccuggugguccuccuuuacaccuucacaacugcuaacgcagacacgcugugcauuggcuaucacgccaauaacagcaccgauacaguugacacuguguuggagaaaaauguaaccgugacacauuccgucaacuuacuggaaaauagacacaacgggaagcuauguaaacucaggggaguggcgccccugcaucuugguaagugcaauauagcuggcuggcuguuggggaacccugagugugaaucucucucaaccgccaguagcugguccuacaucguugagacuucuaauucggauaacggaacaugcuauccaggcgacuuuauuaauuacgaagaacugcgggagcagcugucaagcgugaguuccuucgaacgcuuugagaucuucccgaaaaccucuagcuggcccaaccacgauacgaaucgaggugucacugcagccuguccucaugcugggaccaacuccuuuuaucguaaucucauuugguuagugaagaagggaaacucauacccaaaaaucaacaagaguuauauaaauaacaaagaaaaggagguacugguucuuugggcaauccaccaccccagcacaucugccgaccaacaguccauuuaccagaaugcugaugccuacguguucgucggcucaagcagauauaguaggaaauuugagccugaaaucgcgacucggccaaaggugcgcgaccaggcaggcagaaugaacuacuauuggaccuugguggagcccggggauaagauuacauucgaagccaccggaaaucuggucguuccuagguacgcuuuugcccuaaaacggaacucugguuccggcaucauaauuagcgacacgucggugcaugauugcgacacuacaugucaaaccccaaauggggcaaucaacacuucucucccguuccagaauauucaccccguaacaaucggagagugcccuaaguaugugaaauccaccaagcugcgcauggcuacgggccuucgaaacaucccaucaauucagaguagaggucuguuuggggccauagcgggauucaucgaaggcggcuggaccgggaugauugauggaugguacgguuaucaucaccagaaugagcaaggcagcggguacgccgcagacuugaaauccacacagaacgcuaucgacggaauaacuaauaaggucaacucugugauugagaaaaugaauacccaguuuacagccguuggcaaggaguucagccaccucgagaggcggaucgaaaaccugaacaagaaaguggaugacgguuucuuagauaucuggacuuacaaugcugagcugcucguccuucuggaaaacgagcguaccuuggacuaucaugauucaaaugugaagaaccuauacgagaaaguacgcagucagcugaagaauaacgccaaagaaauugggaauggcuguuuugaguucuaucacaagugcgacgauacauguauggaauccguuaagaacggaaccuacgacuaucccaaauacagcgaggaagcaaagcucaauagagaggagaucgauggcgugaaacuggaaucuacuaggauuuaucaaauacuugccaucuacucaacggucgcuaguagccugguguuggucgugucccucggggcgauuucuuuuuggaugugcucgaacggaagccugcagugccggaucuguaucuga

SEQ ID NO: 141934 - RNA, 1701 nt, Artificial Sequence
  derived and/or modified CDS sequence (opt3) from hemagglutinin__InfluenzaA__EPI178946/m1
augaaggccaucauugugguccugcucuacaccuucgcuacagcagacgccgauacucuuugcauaggcuaucacgcgaacaauagcacggacaccguugauacagugcuggagaaaaacguaacugugacccauuccgucaauuuguuagaaaacaagcacgacgggaaacuguguaagcuaagaggaguggcuccccuccaucuggguaaaugcaauaucgccggcuggcuucuggggaacccugagugugaaucuuuguuuacagcaucaaguuggagcuacauuguugagaccccaaauuccgauaacggaacuugcuauccgggcgacuucaucaauuacgaagaacucagggagcaccugucuucggugagcucauuugaacgguucgagauuuuucccaaggccaacaguuggccuaaucaugauacaaacaagggugucaccgcugcauguccauaugccggggcuaauuccuucuaccgcaaccugaucuggcucgugaaaaagggaaauucuuaucccaaauuaagcaaguccuacauaaacaacaaaaagaaggaaguacugguuaucuggggcauucaccacccuccaacgucaacugaccagcaaacccuuuaccagaaugccgaugcguauguguuugucggcaguagcaaauacucuaagcgauucaaacccgagaucgcagcccguccuaaggugagaaaccaggcugggaggaugaauuauuacuggacauugauugagccaggagacacuaucaccuuugaagccacagguaaccugguggucccgcgguaugcauucgcuaugaaacgcggcuccgggucaggaauaauuguuagcgaugcccccgugcaugacugcaauaccacgugucagacuccuaagggcgcgaucaacacaagucuaccauuucaaaauauucaccccguaaccaucggugagugcccuaaauacgugaagucuacuaagcucagaauggccacagggcugaggaacaucccauccauucagagccggggacuuuucggcgcaauagcuggcuuucuggaagggggauggaccgguaugaucgauggcugguauggguaccaucaccagaaugagcagggaucgggcuacgccgcugaccaaaaaucuacgcagaacgccauugacgguaucaccaauaaggucaacuccauaauugagaaaaugaauacacaguucacugcaguggggaaggaguucaaccaguuggagaaacgcaucgaaucacucaauaacaagguugaugacggcuuucuggauaucuggaccuauaacgccgagauguuagugcugcucgaaaaugagcgaacacuugacuaccacgauaguaacgucaagaaucuguaugaaaaagugagaagccaauugaagaacaaugcuaaagagauuggaaacggcuguuucgaguuuuaccauaagugcgacaauacuuguauggaauccguuaaaaacgggaccuaugauuaccccaaguauucugaggaagcgaagcuaaauagggaggaaaucgacggaguaaaacuggagagcgcacggauuuaccagauacucgccaucuacucaacaguggcuaguucccugguccuucuggugagcuugggugccgucucuuucuggaugugcucaaacggcagucuccagugccguauuuguaucuga

SEQ ID NO: 141935 - RNA, 1701 nt, Artificial Sequence
  derived and/or modified CDS sequence (opt3) from hemagglutinin__InfluenzaA__EPI482791/m2
augaaggccaucauugugguccugcucuacaccuucgcuacagcagacgccgauacucuuugcauaggcuaucacgcgaacaauagcacggacaccguugauacagugcuggagaaaaacguaacugugacccauuccgucaauuuguuagaaaacaagcacgacgggaaacuguguaagcuaagaggaguggcuccccuccaucuggguaaaugcaauaucgccggcuggcuucuggggaacccugagugugaaucuuuguuuacagcaucaaguuggagcuacauuguugagaccccaaauuccgauaacggaacuugcuauccgggcgacuucaucaauuacgaggagcucagggagcaccugucuucggugagcucauuugaacgguucgagauuuuucccaaggccaacaguuggccuaaucaugaaacaaacaagggugucaccgcugcauguccauaugccggggcuaauuccuucuaccgcaaccugaucuggcucgugaaaaagggaaauucuuaucccaaauuaagcaaguccuacauaaacaacaaaaagaaggagguacugguuaucuggggcauucaccacccuccaacgucaacugaucagcaaacccuuuaccagaaugccgacgcguauguguuugucggcaguagcaaauacucuaagcgauucaaacccgagaucgcagcccguccuaaggugagaaaccaggcugggaggaugaauuauuacuggacauugauugaaccaggagauacuaucaccuuugaggccacagguaaccugguggucccgcgguaugcauucgcuaugaaacgcggcuccgggucaggaauaauuguuagcgacgcccccgugcaugauugcaauaccacgugucagacuccuaagggcgcgaucaacacaagucuaccauuucaaaauauucaccccguaaccaucggugaaugcccuaaauacgugaagucuacuaagcucagaauggccacagggcugaggaacaucccauccauucagagccggggacuuuucggcgcaauagcuggcuuucuggaagggggauggaccgguaugaucgacggcugguauggguaccaucaccagaaugaacagggaucgggcuacgccgcugaucaaaaaucuacgcagaacgccauugacgguaucaccaauaaggucaacuccauaauugagaaaaugaauacacaguucacugcaguggggaaggaguucaaccaguuggaaaaacgcaucgagucacucaauaacaagguugacgauggcuuucuggacaucuggaccuauaacgccgaaauguuagugcugcucgagaaugaacgaacacuugauuaccacgacaguaacgucaagaaucuguaugagaaagugagaagccaauugaagaacaaugcuaaagagauuggaaacggcuguuucgaauuuuaccauaagugcgauaauacuuguauggaguccguuaaaaacgggaccuaugacuaccccaaguauucugaagaggcgaagcuaaauagggaagagaucgauggaguaaaacuggagagcgcacggauuuaccagauacucgccaucuacucaacaguggcuaguucccugguccuucuggugagcuugggugccgucucuuucuggaugugcucaaacggcagucuccagugccguauuuguaucuga

SEQ ID NO: 141936 - RNA, 1701 nt, Artificial Sequence
  derived and/or modified CDS sequence (opt3) from hemagglutinin__InfluenzaA__EPI291799
augaaggccauccuggugguccuccuuuacaccuucacaacugcuaacgcagacacgcugugcauuggcuaucacgccaauaacagcaccgauacaguugacacuguguuggagaaaaauguaaccgugacacauuccgucaacuuacuggaaaauagacacaacgggaagcuauguaaacucaggggaguggcgccccugcaucuugguaagugcaauauagcuggcuggcuguuggggaacccugagugugaaucucucucaaccgccaguagcugguccuacaucguugagacuucuaauucggauaacggaacaugcuauccaggcgacuuuauuaauuacgaagaacugcgggagcagcugucaagcgugaguuccuucgaacgcuuugagaucuucccgaaaaccucuagcuggcccaaccacgauacgaaucgaggugucacugcagccuguccucaugcugggaccaacuccuuuuaucguaaucucauuugguuagugaagaagggaaacucauacccaaaaaucaacaagaguuauauaaauaacaaagaaaaggagguacugguucuuugggcaauccaccaccccagcacaucugccgaccaacaguccuuguaccagaaugcugaugccuacguguucgucggcucaagcagauauaguaggaaauuugagccugaaauugcgacucggccaaaggugcgcgaccaggcaggcagaaugaacuacuauuggacccugguggagcccggggauaagaucacauucgaagccaccggaaaucuagucguuccuagguacgcuuuugcccucaaacggacgucugguuccggcauuaucauaagcgacacuucggugcaugauugcgacacaaccugucaaacuccaaacggggcaauuaauacaucucugccguuccagaacauccaccccguaaccauuggagagugcccuaaguaugugaaauccacgaaguuacgcauggcuaccggccugcgaaauaucccaucaauccagaguagagguuuguuuggggccauugcgggauucauagaaggcggcuggacagggaugaucgauggaugguacgguuaucaucaccagaacgagcaaggcagcggguacgccgcagaccucaaauccacucagaaugcuauugacggaaucaccaacaaggucaauucugugauagagaaaaugaacacacaguuuacugccguuggcaaggaguucagccaccuggagaggcggauugaaaauuuaaacaagaaaguggaugacgguuuccuggauaucuggaccuacaacgcugagcuccuuguccuguuggaaaaugagcguacacuagacuaucaugauucaaacgugaagaaucuguacgagaaaguacgcagucagcucaagaacaaugccaaagaaaucgggaacggcuguuuugaguucuaucacaagugcgacgauaccuguauggaauccguuaagaauggaacuuacgacuaucccaaauacagcgaggaagcaaagcugaacagagaggagauugauggcgugaaacuugaaucuacgaggaucuaucaaauucuggccauauacucaacagucgcuaguagcuuggugcucgucgugucccugggggcgaucucuuuuuggaugugcucgaauggaagccuucagugccggauuuguaucuga

SEQ ID NO: 141937 - RNA, 1701 nt, Artificial Sequence
  derived and/or modified CDS sequence (opt3) from hemagglutinin__InfluenzaA__EPI482799
augaaggccauccuggugguccuccuuuacaccuucacaacugcuaacgcagacacgcugugcauuggauaucacgccaauaacagcaccgauacaguugacacuguguuggagaaaaauguaaccgugacacauuccgucaacuuacuggaaaauagacacaacgggaagcuauguaaacucaggggaguggcgccccugcaucuugguaagugcaauauagcuggcuggcuguuggggaacccugagugugaaucucucucaaccgccaguagcugguccuacaucguugagacuucuaauucggauaacggaacaugcuauccaggcgacuuuauuaauuacgaagaacugcgggagcagcugucaagcgugaguuccuucgaacgcuuugagaucuucccgaaaaccucuagcuggcccaaccacgaaacgaaucgaggugucacugcagccuguccucaugcugggaccaacuccuuuuaucguaaucucauuugguuagugaagaagggaaacucauacccaaaaaucaacaagaguuauauaaauaacaaagagaaggagguacugguucuuugggcaauccaccaccccagcacaucugccgaucaacaguccuuguaccagaaugcugacgccuacguguucgucggcucaagcagauauaguaggaaauuugaaccugagauugcgacucggccaaaggugcgcgaucaggcaggcagaaugaacuacuauuggacccugguggaacccggggacaagaucacauucgaggccaccggaaaucuagucguuccuagguacgcuuuugcccucaaacggacgucugguuccggcauuaucauaagcgauacuucggugcaugacugcgauacaaccugucaaacuccaaacggggcaauuaauacaucucugccguuccagaacauccaccccguaaccauuggagaaugcccuaaguaugugaaauccacgaaacuucgcauggcuaccggccugcgaaauaucccaucaauccagaguagagguuuguuuggggccauugcgggauucauagagggcggcuggacagggaugaucgacggaugguacgguuaucaucaccagaacgagcaaggcagcggguacgccgcagaucucaaauccacucagaaugcuauugacggaaucaccaacaaggucaauucugugauagaaaagaugaacacacaguuuacugccguuggcaaggaguucagccaccuggaaaggcggauugagaauuuaaacaagaaaguggacgaugguuuccuggacaucuggaccuacaacgcugaacuccuuguccuguuggagaaugagcguacacuagauuaucaugacucaaacgugaagaaucuguacgaaaaaguacgcagucagcucaagaacaaugccaaagagaucgggaacggcuguuuugaguucuaucacaagugcgaugacaccuguauggaguccguuaagaauggaacuuacgauuaucccaaauacagcgaagaggcaaagcugaacagagaggaaauugacggcgugaaacuugagucuacgaggaucuaucaaauucuggccauauacucaacagucgcuaguagcuuggugcucgucgugucccugggggcgaucucuuuuuggaugugcucgaauggcagcuuacagugccggauuuguaucuga

SEQ ID NO: 141938 - RNA, 1701 nt, Artificial Sequence
  derived and/or modified CDS sequence (opt3) from hemagglutinin__InfluenzaA__EPI291807
augaaggccaucauugugguccugcucuacaccuucgcuacagcagacgccgauacucuuugcauaggcuaucacgcgaacaauagcacggacaccguugauacagugcuggagaaaaacguaacugugacccauuccgucaauuuguuagaaaacaagcacgacgggaaacuguguaagcuaagaggaguggcuccccuccaucuggguaaaugcaauaucgccggcuggcuucuggggaacccugagugugaaucuuuguuugcagccucaaguuggagcuacauuguugagacaccaaauuccgauaacggaaccugcuauccgggcgacuucaucaauuacgaagaacucagggagcaccugucuucggugaguagcuuugaacgguucgagauuuuucccaaggcuaacaguuggccuaaucaugauacuaacaagggugucacagcagccuguccauaugcuggggccaauuccuucuaccgcaaccugaucuggcucgugaaaaagggaaauucuuaucccaaauuaagcaaguccuacauaaacaacaaaaagaaggaaguacugguuaucuggggcauucaccacccuccaaccucaacggaccagcaaacucuuuaccagaaugcggaugcauauguguuugucggcaguagcaaauacucuaagcgauucaaacccgagaucgccgcucguccuaaggugagagaccaggccgggaggauggauuauuacuggaccuugauugagccaggagacacaaucacuuuugaagcaaccgguaaccugguggucccgcgguaugcuuucgccaugaaacgcggcuccgggucaggaauaauuguuagcgaugcgcccgugcaugacugcaauacaaccugucagacgccuaagggcgccaucaacacuucacuaccauuucaaaauauucaccccguaacaaucggugagugcccuaaauacgugaagucuaccaagcucagaauggcaacugggcugaggaacaucccauccauucagagccggggacuuuucggcgcuauagccggcuuuaucgaagggggauggacagguaugauugacggcugguauggguaccaucaccagaaugagcagggaucgggcuacgcugccgaucaaaaaucuacccagaacgcaaucgacgguauaacgaauaaggucaacuccauuaucgagaaaaugaauacccaguucacagccguggggaaggaguucucacagcuggagaaacgcaucgaaaguuugaacaauaagguugaugacggcuuucucgauauuuggacuuauaacgcugagcuguuagugcugcucgaaaaugagcgaacccuugacuaccacgauagcaacgucaagaaccuguaugaaaaagugagaucccaauugaagaauaacgcgaaagagaucggaaauggcuguuucgaguuuuaccauaagugcgacaacacauguauggaaucuguuaaaaaugggacuuaugauuaccccaaguauagcgaggaagcaaagcuaaacagggaggaaauugacggaguaaaacuggagucagcccggauauaccagauccucgcuauuuacaguaccguggccuccagccugguccuucuggugucuuugggugcagucucauucuggaugugcaguaauggcagccuccagugccguaucuguaucuga

SEQ ID NO: 141939 - RNA, 1701 nt, Artificial Sequence
  derived and/or modified CDS sequence (opt3) from hemagglutinin__InfluenzaA__EPI638970
augaaggccauccuggugguccuccuuuacaccuucacaacugcuaacgcagacacgcugugcauuggcuaucacgccaauaacagcaccgauacaguugacacuguguuggagaaaaauguaaccgugacacauuccgucaacuuacuggaaaauagacacaacgggaagcuauguaaacucaggggaguggcgccccugcaucuugguaagugcaauauagcuggcuggauccuggggaacccugagugugaaucuuugucaaccgccaguagcugguccuacauuguugagacuucuaauucggaaaacggaacaugcuauccaggcgauuuuaucaauuacgaggagcuccgggaacagcugucaagcgugaguuccuucgagcgcuuugaaauuuucccgaaaaccucuagcuggcccaaccacgacacgaauaagggugucacugcagccuguccucauuccgggaccaacucauuuuaucgaaaucugguguggcucguacaaaagggaaacaguuacccaaaaaucaacaagagcuauauaaauaacaaagagaaugagguuuuagugcugugggcuauccaccaccccucuacauccgcagaucagcagucacuuuacaagaacgccgacgcuuacgucuucgugggcagcagucguuauucuagaaaauuugaaccugagauugccacuaggccaaaggugcgggaucaggcgggccgcaugaauuacuauuggaccuuggucgaacccggggacaagaucacauucgaggcaaccggaaaccugguugccccuagauacgcuuuuacgcuaaaaaggaacuccgguagcggcauuaucauaucggauacuucugugcaugacugcgauacaaccugucaaacuccaaauggggccauuaauacaucccucccguuccagaacauccaccccguaaccauuggagaaugcccuaaguaugugaaaucaacgaagcugcggauggcaaccggccuucgcaauaucccaaguauccagagccgaggucuguuuggggcuauugccggauucauagagggcggcuggacagggaugaucgacggaugguacgguuaucaucaccagaacgagcaaggcuccggguacgcggccgauuugaaaucuacucagaaugcaauugacggaaucaccaacaaggucaauagcgugauagaaaagaugaacacacaguuuacugcuguuggcaaagaguucucacaccucgaaagaaggauugagaaccugaauaagaaaguggacgaugguuucuuagacaucuggaccuacaacgccgaacugcucguccuucuggagaaugagcggacauuggauuaucaugacaguaacgugaagaaucuauacgaaaaaguacguucccagcugaagaacaaugcuaaagagaucgggaacggcuguuuugaguucuaucacaagugcgaugacauguguauggaaagcguuaagaauggaaccuacgauuaucccaaauacucugaagaggccaagcucaaccgcgaggaaauugacggcgugaaacuggagucaacuaagaucuaucaaauucuugcaauauacaguacggucgccagcucccugguguuggucgugucucucggggcuaucucguuuuggaugugcagcaauggaucccugcagugcagaauuuguaucuga

SEQ ID NO: 141940 - RNA, 1701 nt, Artificial Sequence
  derived and/or modified CDS sequence (opt3) from hemagglutinin__InfluenzaA__ABI19015
augaaggccaucauugugguccugcucuacaccuucgcuacagcagacgccgauacucuuugcauaggcuaucacgcgaacaauagcacggacaccguugauacagugcuggagaaaaacguaacugugacccauuccgucaauuuguuagaaaacaagcacgacgggaaacuguguaagcuaagaggaaucgcuccccuccaucuggguaaaugcaauauugccggcuggauccuugggaacccugagugugaaucucuguuuacaaccucaaguuggagcuacauuguggagacuccaaauuccgauaacggaacaugcuauccgggcgacuucaucaauuacgaagaguugagggagcaccucucuucgguuaguagcuuugaacgguucgagauauuucccaaggcaaacaguuggccuuaucaugauaccaauaagggugugacggccgcuuguccauacgcaggggccaacuccuucuaucgcaaucugaucuggcuggucaaaaagggaaacucuuaccccaaacucagcaaguccuacauuaauaacaaaaagaaggaaguguuaguaaucuggggcauucaccacccuccaacuucaaccgaccagcaaacacuguaucagaacgcugaugccuacguuuuugugggcaguagcaaauauucuaagcgauucaaacccgagaucgcggcacguccuaaggucagagaccaggccgggaggauggauuacuauuggacucuuauagagccaggagacaccauuacauuugaagcuaccgguaauuugguggugccgcgguacgccuucacgaugaaacgcggcuccgggucaggaaucauugucagcgaugcacccguucaugacugcaacacuacaugucagaccccuaagggcgcuaucaauacuucacugccauuucaaaacauccaccccgugacaauuggugagugcccuaaauauguaaagucuaccaagcuaagaauggccacggggcucaggaauauaccauccauccagagccggggacuguucggcgcgauugccggcuuuaucgaagggggauggaccgguaugauagacggcugguacggguaccaucaccagaacgagcagggaucgggcuaugcagcugaucaaaaaucuacacagaaugccauugacgguaucacuaacaaggucaauuccaucauugaaaagaugaacacccaguucacagcuguggggaaagaguucucacagcuugagaaacgcaucgaaagucugaauaacaagguggaugacggcuuuuuggauauuuggacuuacaaugccgagcuccugguuuuacuggaaaacgagcgaacccucgacuaucacgauagcaaugugaagaaccuuuacgaaaaagucagaucccaacugaagaacaaugcaaaagagauaggaaacggcuguuucgaguuuuaucauaagugcgacgauacauguauggaaucugugaaaaaugggaccuacgacuaucccaaguacagcgaggaagccaaguugaacaggcaggagaucgauggaguaaaacuagaaucagcucggauuuaccagauccuggcgaucuauaguacuguugcauccagccucgugcugcuugucucucugggugccgugucauucuggaugugcaguaauggcagcuugcaaugccguauuuguauauga

SEQ ID NO: 141941 - RNA, 1701 nt, Artificial Sequence
  derived and/or modified CDS sequence (opt3) from hemagglutinin__InfluenzaA__EPI687790
augaaggccauccuggugguccuccuuuacaccuucacaacugcuaacgcagacacgcugugcauuggcuaucacgccaauaacagcaccgauacaguugacacuguguuggagaagaauguaaccgugacacauuccgucaacuuacuggaagauaagcacaaugggaaacuauguaagcucggagguguggcgccccugcaucuuggcaaaugcaacauagcuggguggauccugggaaauccugagugugaaucuuugucaaccgccaguagcugguccuacauuguugagacuucuaacucggacaauggcacaugcuauccaggugauuuuaucaacuacgaagaacucagagagcagcugucaagcgugaguuccuucgaaagguuugagauuuucccgaagaccucuagcuggcccaaucacgacuccaacaagggggucacggcagccuguccucaugcuggagcaaaaucauuuuauaagaaucugaucuggcucgugaaaaagggcaacaguuacccaaaauuaaaucaaagcuauauaaacgauaagggcaaggaaguacugguucuuugggggauccaccaccccucuacuaccgccgaccagcaguccuuguaccagaacgcugaugccuacguguucgucggaacaucacgguauagcaaaaaguuuaaaccugagauugcgacucgcccaaaggugcgagaccaagagggucguaugaauuacuauuggacccugguggaacccggcgauaaaaucacauucgaggcaaccgggaaccuagucguuccuagauacgccuuuacgauggaaaggaaugcuggaaguggcauuaucauaucugacacuccagugcaugauugcaacacaaccugucagacuccggagggugccauuaauacaucccuccccuuccagaacauccacccuauuaccaucgggaagugcccaaaauauguaaagagcacgaagcugcggcuugcaaccggacugcgcaaugugcccucgauccagucuagaggcuuguuuggcgcuauugccggguucauagaaggagguuggacaggcauggucgacgggugguacggauaucaucaccaaaacgagcagggcuccgguuacgcggccgaccucaaaucaacucagaaugcaaucgauaagauuaccaacaaagugaauaguguuaucgagaagaugaacacacaguuuacugcuguggggaaagaguucaaucaccuggagaagaggauagaaaacuuaaauaagaaagucgacgauggcuuccuggacauuuggaccuacaacgccgagcuccuugugcuguuggaaaacgagcggacacuagauuaucaugacagcaauguaaagaaccuguacgagaaaguucgcaaucaacucaagaacaaugcuaaagaaaucggaaacggcuguuuugaguucuaucacaagugcgauaauaccuguauggaauccgugaagaacgggacuuacgacuauccuaaauacucugaggaagccaagcugaaucgagagaaaaucgauggagucaaacuugagagcacgagaauuuaucagauccuggcaauuuacucaacaguggccaguuccuugguccucgugguuagccugggugcuauaucuuuuuggaugugcucaaacggcaguuuacagugcaggaucuguauuuga

SEQ ID NO: 141942 - RNA, 1701 nt, Artificial Sequence
  derived and/or modified CDS sequence (opt3) from hemagglutinin__InfluenzaA__EPI841265
augaaggccauccuggugguccuccuuuacaccuucacaacugcuaacgcagacacgcugugcauuggcuaucacgccaauaacagcaccgauacaguugacacuguguuggagaaaaauguaaccgugacacauuccgucaacuuacuggaagauaagcacaaugggaaacuauguaagcucggagguguggcgccccugcaucuuggcaaaugcaacauagcuggguggauccugggaaauccugagugugaaucuuugucaaccgccaguagcugguccuacauuguugagacuucuaacucggacaauggcacaugcuauccaggugauuuuaucaacuacgaagaacucagagagcagcugucaagcgugaguuccuucgaaagguuugagauuuucccgaagaccucuagcuggcccaaucacgacuccaacaagggggucacggcagccuguccucaugcuggagcaaaaucauuuuauaagaaucugaucuggcucgugaaaaagggcaacaguuacccaaaauuaaaucaaagcuauauaaacgauaagggcaaggaaguacugguucuuugggggauccaccaccccucuacuaccgccgaccagcaguccauuuaccagaacgcugaugccuacguguucgucggaacaucacgguauagcaaaaaguuuaaaccugagaucgcgacucgcccaaaggugcgagaccaagagggucguauuaauuacuauuggaccuugguggaacccggcgauaaaaucacauucgaggcaaccgggaaccuggucguuccuagauacgccuuuacgauggaaaggaaugcuggaaguggcauaauuaucucuaacacuccagugcaugacugcaauacaaccugucagacuccggagggugccauuaacacaucccuacccuuccagaauauccacccuaucaccauugggaagugcccaaaauauguaaagagcacgaagcuccggcuggcaaccggacuucgcaacgugcccucgauacagucuagaggccuguuuggcgcuaucgccggguucauugaaggagguuggacaggcauggucgaugggugguacggauaucaucaccaaaaugagcagggcuccgguuacgcggccgacuugaaaucaacucagaacgcaaucgacaagauaaccaauaaagugaacaguguuauugagaagaugaauacacaguuuacugcuguggggaaagaguucaaccaccucgagaagaggaucgaaaaucugaacaagaaagucgaugacggcuucuuagauaucuggaccuacaacgccgagcugcucgugcuucuggaaaaugagcggacauuggacuaucaugauagcaacguaaagaaucuauacgagaaaguucgcaaccaacugaagaauaacgcuaaagaaauuggaaauggcuguuuugaguucuaucacaagugcgacaacaccuguauggaauccgugaagaaugggacuuacgauuauccuaaauacucugaggaagccaagcucaaccgagagaaaaucgacggagucaagcuggagagcacgagaauuuaucagauacuugcaaucuacucaacaguggccaguucccuggucuuggugguuagccucggugcuauuucuuuuuggaugugcucaaauggcagucugcagugcaggaucuguaucuga

SEQ ID NO: 141943 - RNA, 1701 nt, Artificial Sequence
  derived and/or modified CDS sequence (opt3) from hemagglutinin__InfluenzaA__EPI291846
augaaggccaucauugugguccugcucuacaccuucgcuacagcagacgccgauacucuuugcauaggcuaucacgcgaacaauagcacggacaccguugauacagugcuggagaaaaacguaacugugacccauuccgucaauuuguuagaaaacaagcacgacgggaaacuguguaaucuaaagggaguggcuccccuccaucuggguaaaugcaacaucgccggcuggcuucuggggaauccugagugugaaucuuuguuuacagcaucaaguuggagcuacauuguugagaccccaaacuccgauaauggaacuugcuauccgggcgacuucaucaacuacgaggagcucagagagcaccugucuucggugagcucauuugaaagguucgagauuuuucccaaggucaauaguuggccuaaccaugauacaaauaagggugugaccgccgcuuguccauaugcaggggccaacuccuucuaccggaaucugaucuggcucgugaaaaagggaaacucuuaucccaaauuaagcaaguccuacauaaacaauaaaaagaaggaaguucuggugaucuggggcauucaccacccuccaacgucaacugaccagcaaacccuuuaccagaacgcugaugccuaugucuuugugggcaguagcaaauacucuaagcgcuucgagcccgagaucgcggcacgaccuaaagugcguaaucaggccgggagaaugaacuauuacuggacauugauugaaccaggagacacuaucaccuuugaggcuacagguaaucuggucguuccgagguaugccuucgcaaugcggcgcggcuccgggucaggaauaauugugagcgaugcucccguacaugacugcaacaccacgugucagacuccuaagggcgccaucaauacaagucuaccauuucaaaacauucaccccgugaccaucggugaaugcccuaaauacgucaagucuacuaaacucagaauggcgacagggcugaggaauaucccauccauucagagccggggacuuuucggcgccauagcaggcuuucuggaagggggauggaccgguaugaucgauggcugguauggguaccaucaccagaacgaacagggaucgggcuacgcugccgaccaaaagucuacgcagaaugcuauugacgguaucaccaacaagguaaauuccauaauugagaaaaugaacacacaguucacugccguugggaaggaguucucacaguuggaaaaacgcaucgagagucucaauaacaagguggaugacggcuuucuggauaucuggaccuauaacgcagaaauguuaguccugcucgagaaugaacgaacacuugacuaccacgauagcaacgugaaaaaucuguaugagaagguaagaucccaauugaagaacaaugccaaagagauuggaaacggcuguuucgaauuuuaccauaagugcgacaauacuuguauggagucuguuaggaacgggaccuaugauuaccccaaauauagcgaagaggcuaagcuaaaucgggaagagaucgacggagugaaacuggagucagcgcguauuuaccagauacucgcaaucuacaguacagucgccuccagccuggugcuucuggucucuuugggugcugugucauucuggaugugcaguaacggcagccuccagugccgcauuuguaucuga

SEQ ID NO: 141944 - RNA, 1695 nt, Artificial Sequence
  derived and/or modified CDS sequence (opt3) from hemagglutinin__InfluenzaA__EPI558121
augaaggccauccuggugguccuccuuuacaccuucacaacugcuaacgcagacacgcugugcauuggcuaucacgccaauaacagcaccgauacaguugacacuguguuggagaaaaauguaaccgugacacauuccgucaacuuacuggaaaauagacacaacgggaagcuauguaaacucaggggaguggcgccccugcaucuugguaagugcaauauagcuggcuggcuguuggggaacccugagugugaaucucucucaaccgccaguagcugguccuacaucguugagacuucuaauucggauaacggaacaugcuauccaggcgacuuuauuaauuacgaagaacugcgggagcagcugucaagcgugaguuccuucgaacgcuuugagaucuucccgcaaaccucuagcuggcccaaccacgauacgaaucgaggugucacugcagccuguccucaugcugggaccaacuccuuuuaucguaaucucgugugguuaguaaagaagggaaacucauacaguaagauuaacaaaagcuauaucaauaacaaggaaaaagagguucuggugcuuugggcaauacaccacccaucuacauccgccgaccagcagucauuguaccagaaugcugaugccuacgucuucgugggcagcaguagauauucuaggaaguuugagcccgaaaucgcgacucggccuaaagugcgcgaccaagcaggcagaaugaacuacuauuggacccuggucgagccaggggauaagauuacauucgaagccaccggaaaucuaguugcucccagguacgccuuugcacucaagcggaacuccgguagcggcaucauuaucucggacacgucugugcaugauugcgacacuacaugucagaccccuaauggggcuauaaacacuucccugccauuccagaauauucacccgguaacaaucggagagugccccaaauaugugaagucaaccaaacuucgcauggccacgggccugcgaaacauuccuaguauccagagcagagguuuguuuggggcgaucgccggauucauugaaggcggcuggaccgggaugauagauggaugguacgguuaucaucaccaaaaugagcagggcuccggguacgcagcugaccucaagucuacacagaacgccaucgacggaauuacuaauaaagucaacagcgugaucgagaagaugaauacccaguuuacagcuguuggcaaagaguucucacaccuggagaggcggauagaaaacuuaaacaagaagguggaugacgguuuccuggauauuuggacuuacaaugccgagcuccuuguccuguuggaaaacgagcguacccuagacuaucaugauaguaaugugaaaaaccuguacgagaagguacgcucccaacucaaaaauaacgcaaaggaaaucgggaauggcuguuuugaguucuaucacaaaugcgacgauauguguauggaaagcguuaagaacggaacauacgacuauccaaaguacucugaggaagccaaacugaauagagaggagaucgauggcgugaaacuugaaucaaccaggauuuaucagauccuggcuauuuacaguacugucgcgagcuccuuggugcucgucgugucucugggggcaauaucguuuuggaugugcagcaacggauccuuacagugccggaucuga

SEQ ID NO: 141945 - RNA, 1701 nt, Artificial Sequence; identical to SEQ ID NO: 140489
  derived and/or modified CDS sequence (opt3) from hemagglutinin__InfluenzaA__EPI564139

SEQ ID NO: 141946 - RNA, 1701 nt, Artificial Sequence; identical to SEQ ID NO: 141734
  derived and/or modified CDS sequence (opt3) from hemagglutinin__InfluenzaA__EPI786706

SEQ ID NO: 141947 - RNA, 1701 nt, Artificial Sequence
  derived and/or modified CDS sequence (opt3) from hemagglutinin__InfluenzaA__EPI395313
augaaggccauccugauugugcuccuuuacaccuucacaacugcuaacgcagacacgcugugcauaggcuaucacgccaauaacagcaccgauacagucgacacuguuuuggagaaaaaugugaccguaacacauuccgugaacuuacuggaaaauagacacaacgggaagcuauguaaacucaggggagucgcgccccugcaucuugguaagugcaauaucgcuggcuggcuguuggggaacccugagugugaaucucucucaaccgccaguagcugguccuacauuguggagacuucuaauucggauaacggaacaugcuauccaggcgacuuuaucaauuacgaagaacugcgggagcagcugucaagcguuaguuccuucgaacgcuuugagauuuucccgaaaaccucuagcuggcccaaccacgauacgaaucgaggugugacugcagccuguccucaugcugggaccaaguccuuuuauaagaaccucaucuggauagccaaaaagggaaauucauacccaaaaaucaacaagaguuauauuaacaauaaagaaaaggaggucuuagugcugugggcaauccaccaccccagcacaucugcugaccaacagucccuuuaccagaacgccgaugcguacguauucguuggcucaagccguuauaguagaaaguuugagccugaaauugcaacuaggccaaaagugcgggaccaggccggccgcaugaauuacuauuggaccuuggucgagcccggggauaagaucacauucgaagcuaccggaaaccugguggccccuagauacgcauuugcucuaaaaaggaacucugguuccggcauaauuaucagcgacacgucggugcaugauugcgacacuacaugucaaaccccaaauggggccauuaauacuucucucccguuccagaacauccaccccgucacaaucggagagugcccuaaguauguuaaauccaccaagcugcggauggcgacgggccuucgcaauauuccaucaauacagagucgaggucuguuuggggccaucgcaggauucauugaaggcggcuggaccgggaugaucgauggaugguacgguuaucaucaccagaacgagcaaggcagcggguacgcugccgacuugaaauccacacagaaugcuauagacggaauuacuaacaagguaaauucugugaucgagaagaugaacacccaguuuacagccgugggcaaagaguucagccaccucgagagaaggaucgaaaaucugaacaagaaagucgaugacgguuucuuagauauuuggacuuacaacgcagagcugcucgugcuucuggaaaaugagcggaccuuggacuaucaugauucaaacguuaagaaucuauacgagaaagugcguagucagcugaagaacaaugccaaggaaaucgggaacggcuguuuugaguucuaucacaaaugcgacgauauguguauggaauccgucaagaauggaacauacgacuaucccaaauacagcgaggaagcuaagcucaaccgcgaggugauugauggcguaaaacuggagucuaccagaauauaucaaauccuugcgauuuacgcaacuguugccucaagucugguguuggucgugagccucggggcuaucuccuuuuggaugugcucuaauggaucgcugcagugcaggaucuguauuuga

SEQ ID NO: 141948 - RNA, 1701 nt, Artificial Sequence
  derived and/or modified CDS sequence (opt3) from hemagglutinin__InfluenzaA__EPI291696
augaaggccauccugcucgugcuucuguacaccuucacagcugcaaacgccgacacuuugugcauuggcuaucacgcgaauaacagcacggauaccgucgacacaguuuuagagaaaaaugugacuguaacccauuccgugaaccugcuagaaaauagacacaacgggaagcucuguaaacugaggggagugcccccucuucaucuggguaagugcaauauagcuggcugguugcucgggaacccagagugugaacugcuguuuacagccucuucauggaguuacaucgucgagaccagcaauuccgauaacggaacuugcuauccgggcgacuucauuaauuacgaggaacuccgggagcaguuaucuucgguuucuagcuuugaacgcuucgagaucuuucccaaagcaaguuccuggccugaucacgaaacaaaccgaggugugaccgccgcuuguccauaugcaggggccaauucuuucuaccguaaccugauuuggcuugucaagaagggaaauagcuaucccaaauuguccaagucauacgugaacaacaaagagaaggagguacugguucuauggggcauccaucacccuccaacgaguacugaccaacagagccucuaccagaaugcugaugccuauguguuugucggcucauccaaauacaacaagaaguucaaacccgaaauggcggcaagaccuaaggugagggggcaggccggacggaugaauuauuacuggacccugguggcuccaggugacacaauaacuuuugaggccaccggcaaccuugucguuccgcgcuaugcauucgcuaugaaaagagggucaggaagcggcaucauuaucagugauacacccgugcacgacugcaauaccacgugucaaacuccuaagggugccauuaacacaucucugccauuucagaauauccaucccguaaccauaggggaaugcccuaaauacgugaaguccacuaaauugaggauggcgacaggacuccggaacauuccaagcauccagucgcgcggccuguucggcgccauugcaggguuuaucgagggagguuggaccggcaugaucgaugggugguauggauaccaccaucagaaugaacaaggcucugguuacgcugccgaccgaaaguccacgcagaacgcuauugaugggauaaccaauaaggucaacucagugaucgagaaaaugaauacacaguucacugccguuggcaaggaguucaaccacuuagaaaagagaauugagaaucugaacaagaaaguggacgacggauuucucgaugucuggaccuauaacgcagaacuucugguguugcuagagaaugaaaggacacuggacuaccacgauaguaacguaaagaaucucuaugagaagguucggagccagcugaaaaacaaugccaaggagaucggcaacggguguuucgaauuuuaccauaaaugcgacgauacuuguauggaguccgugaagaauggaaccuaugacuaccccaaauauucugaagagagcaaacuuaaccgugaagagauagauggugucaagcuggagucaacacgcauuuaccaaaucuuggcuaucuacaguaccguggcguccagccucguccugucugugucauuaggcgcaauuaguuucuggaugugcagcaaugggucccugcagugcagaaucuguauuuga

SEQ ID NO: 141949 - RNA, 1701 nt, Artificial Sequence; identical to SEQ ID NO: 137879
  derived and/or modified CDS sequence (opt3) from hemagglutinin__InfluenzaA__ACU80014

SEQ ID NO: 141950 - RNA, 1701 nt, Artificial Sequence; identical to SEQ ID NO: 130717
  derived and/or modified CDS sequence (opt3) from hemagglutinin__InfluenzaA__EPI177400

SEQ ID NO: 141951 - RNA, 1701 nt, Artificial Sequence; identical to SEQ ID NO: 131160
  derived and/or modified CDS sequence (opt3) from hemagglutinin__InfluenzaA__ACT36512

SEQ ID NO: 141952 - RNA, 1704 nt, Artificial Sequence
  derived and/or modified CDS sequence (opt3) from hemagglutinin__InfluenzaA__AJE30344
auggagaagaucgugcugcuccuugccgucauuagccugguuaaauccgaccagauaugcaucggcuaccacgcuaacaauucuaccaagcaaguggauacaauuauggagaaaaacguaacugugacgcaugcacaggacaucuuggagaagacccacaaugggaaauuaugugaucugaacggagucaagccccuaauucucaaggacugcucaguggccgguuggcugcuuggcaauccuaugugugaugaguucaucagaguuccagaauggaguuauauaguggaaagggcgaacccggcuaaugaccugugcuaccccgggacauugaacgauuaugaggagcucaaacaucugcugagccggaucaaucacuuugaaaagaaccucauuaucccucgcuccucuuggccaaaucaugagacuucguuaggagucucagccgcaugucccuaccagggcgccagcaguuucuuucgaaacgugguauggcugauuaaaaagaaugacgcuuauccuaccaucaaaauauccuacaacaauacaaaccgugaagaucuuuugauucugugggguauccaccacucuaacaaugcagccgagcagaccaaccuauauaagaauccagacacuuacguuagcguggggacauccacccucaaccaaagacugguccccaagauugcuacgaggucacaggugaauggacagaguggccggauggauuucuuuuggacuauccuuaaaccuaacgacgccauccauuucgagagcaauggcaacuuuauugcgccagaauacgcauauaagauagugaaaaagggggauucuaccaucaugaaauccgagauggaauacggacacugcaauacaaagugucagacuccgauuggugccaucaacucaagcaugcccuuccauaauauacacccucugaccauuggcgagugcccaaaauaugucaagaguaacaaguugguucucgcuacagggcugcgcaauucucccuuaagagaaaggcggcgcaaacgaggacuguuuggcgccaucgcagguuucaucgaagggggauggcaaggcaugguggacggcugguacggguaucaccauuccaacgagcagggaagcgguuacgcugccgacaaggaaucgacccagaaagcgauugauggcguaacgaauaaggugaacucuaucauugacaaaaugaacacucaguuugaggccgucgggagagaguucaauaaccucgaaaggcggauagaaaaucuuaacaagaagauggaggauggauuucuggacguguggacauauaaugcagaguugcuaguucugauggaaaacgagcguacccucgauuuccacgacuccaaugugaaaaaccuguacgauaagguccgccuucaacugagagacaaugcuaaagaauugggcaacgguuguuucgaguuuuaccauaagugcgauaaugaauguauggagucagugaggaacgggacuuaugacuacccuaaauauagugaggaagccauccucaagcgggaggaaauuagcggcguaaagcuggaguccaucggaacauaccagaucuuaucuauuuauagcaccguugcuucaagucuggcccuagcaauaaucguggccggccucucccuguggaugugcagcaaugggucucuucagugccgaauuuguaucuga

SEQ ID NO: 141953 - RNA, 1701 nt, Artificial Sequence; identical to SEQ ID NO: 141932
  derived and/or modified CDS sequence (opt3) from hemagglutinin__InfluenzaA__EPI178948

SEQ ID NO: 141954 - RNA, 1701 nt, Artificial Sequence; identical to SEQ ID NO: 141932
  derived and/or modified CDS sequence (opt3) from hemagglutinin__InfluenzaA__EPI178949

SEQ ID NO: 141955 - RNA, 1701 nt, Artificial Sequence
  derived and/or modified CDS sequence (opt3) from hemagglutinin__InfluenzaA__EPI590132
augaaggccauccugauugugcuccuuuacaccuucacaacugcuaacgcagacaaaauaugcaucggcuaucacgccaauaacagcacggauaccgucgacacaguucuggagaagaaugugacuguaacccauuccgugaacuuguuagaaaauaaacacaacgggaagcuguguaaacuaagaggagucgcgccccuccaucuggguaagugcaauauugcuggcuggcuucuggggaacccugagugugaaucuuuggccacagcaucaaguuggagcuacaucguggagaccuccucuucgaauaacggaacuugcuauccaggcgauuuuauuaauuacgaagaacucagggagcagcugucaagcguuaguuccuucgaaaaguuugagaucuucccgaaaacaucuagcuggcccaaccacgaaaccaauaagggugugacggccgcuuguccucaugcagggacuaacuccuuuuauaaaaaucugauauggcucgucaagaaagagaacucauacccaaagaucaacauuaguuauaccaauaaccggggaaaggagguguuaguacugugggccauccaccaucccccuacaagcacugaccaacagucucuuuaccagaaugcuaacuccuacguuuucgugggcucaagccgcuauagucgaaaauuugaaccagagauugccacccgucccaaggucagaggccaggcggggaggaugaauuacuauuggacauugguggaaccuggagauaaaaucaccuucgaggcaacggguaaccugguggucccacgguacgccuuugcucuaaagcgcaauucuggcuccgggauaauuaucagcgaaacuccgguucacgacugcgauacaaccugucaaacucccaacggagccauuaauacaucgcucccuuuccagaacauccacccagugaccaucggcgagugccccaaauauguaaagucuacgaaacugagaauggcaaccggucuuaggaauauuccuuccauacagucacgggggcuguuuggagcuaucgccggcuucauugagggcggguggacaggaaugaucgacgguugguacggcuaucaucaccagaacgaacaagggaguggauacgcggccgaucucaagagcacucagaaugcaauagacggcauuaccaacaagguaaauuccgucaucgagaaaaugaacacacaguuuacugcuguggguaaggaguucucucacuuggagcgccgaaucgaaaaccugaauaaaaagguugaugacggguucauugauaucuggaccuacaacgccgaguuacuggugcuccuugagaaugaaagaacacuggacuaucaugacagcaacgucaaaaccuuguacgagaaggugaggucacagcuaaagaauaacgcuaaagaaauuggcaauggauguuuugaguucuaucacaagugcgaugacacuuguauggaaagugugaaaaacggcacguacgauuauccaaaguacuccgaggaggccaaacugaaucgggaagagauagacgggaucaagcucgaaagcacacguauuuaucaaauccuggcaaucuacucuaccguugccucaagucuugugcuggucgugagcuugggagcuauuuccuuuuggaugugcucuaacgguucgcuccagugccgcgucuguauauga

SEQ ID NO: 141956 - RNA, 1701 nt, Artificial Sequence; identical to SEQ ID NO: 129784
  derived and/or modified CDS sequence (opt3) from hemagglutinin__InfluenzaA__ABU80400

SEQ ID NO: 141957 - RNA, 1698 nt, Artificial Sequence
  derived and/or modified CDS sequence (opt3) from hemagglutinin__InfluenzaA__ABO21709
augaaggccaaccugcucgugcuucugugcgcuuuggcagccgcggacgcugauaccaucuguauuggcuaccacgccaauaacagcacagacacugucgauacgguuuuagagaaaaaugugaccguaacacauuccgugaaccugcuagaagacucucacaaugggaagcucugcagacugaaaggaauagcaccccuucagcuggguaaguguaacaucgccggcugguugcucgggaauccugagugcgauccacugcugccggucaggucauggaguuauauuguggaaacucccaacagcgagaauggaaucuguuacccuggcgacuucauugauuaugaagaacuccgggagcaauuauccucuguuucgucauuugaacgcuucgagaucuuuccaaaagaaagcaguuggcccaaccauaauaccaacggugugacagcugcaugcucccacgaggggaagucuagcuucuaccgaaaucugcuuugguugaccgagaaggaaggauccuauccuaaacugaagaacucauacgucaauaaaaagggcaaagaggugcuaguacucuggggcauacaucacccacccaacaguaaggaacagcagaaccuguaucagaaugagaacgccuacguuagcguggucacuucuaauuacaaccguagauuuacaccugaaaucgcugagaggccaaaggugcgggaccaagccgggcgcaugaauuauuacuggacccuucugaaaccgggagauacgauuaucuucgaggcgaacgguaauuugauugcacccauguaugccuuugcucucuccagaggcuucgggucaggaaucauaacuagcaacgccaguaugcacgaauguaauaccaagugccagacaccucugggcgcaauuaacucuuccuuaccauaccagaauauccaucccgugacuauuggugaguguccuaaauaugucaggagcgcuaagcugcggaugguuaccgggcuccgcaacaauccaucgauccagucucgaggacuuuuuggcgccaucgcgggcuucauugaagggggauggacagguaugauagacggcugguacggguaucaccaucaaaacgagcagggauccggcuacgccgcagaucagaaaucaacccagaaugcuaucaacgguauuacgaacaaggugaauacuguaaucgagaaaaugaacauacaauuuacagccguggggaaggaguucaauaagcuggagaaaagaauggaaaacuugaauaagaaagucgacgauggcuuucuagacauuuggaccuacaacgcugagcugcucgugcugcuugaaaaugagaggacucuggacuuccacgauaguaacguuaagaauuuguaugaaaaagucaagagccagcucaagaacaaugccaaagagaucggaaacggcugcuucgaguuuuaccacaagugugacaaugaaugcauggaguccgugcggaacgggacauaugauuaccccaaauauucugaagagagcaagcugaaucgugagaaaguggacggaguaaaguuagaaucaauggguaucuaccagauucuggcaaucuauaguaccguugccuccagccuagugcuccuggucucucuuggcgcuauuucauucuggaugugcaguaacgggagcuugcaaugucgcauaugcaucuga

SEQ ID NO: 141958 - RNA, 1701 nt, Artificial Sequence; identical to SEQ ID NO: 130704
  derived and/or modified CDS sequence (opt3) from hemagglutinin__InfluenzaA__CAZ65588

SEQ ID NO: 141959 - RNA, 1701 nt, Artificial Sequence; identical to SEQ ID NO: 141734
  derived and/or modified CDS sequence (opt3) from hemagglutinin__InfluenzaA__EPI697744

SEQ ID NO: 141960 - RNA, 1701 nt, Artificial Sequence; identical to SEQ ID NO: 141894
  derived and/or modified CDS sequence (opt3) from hemagglutinin__InfluenzaA__EPI768525

SEQ ID NO: 141961 - RNA, 1701 nt, Artificial Sequence
  derived and/or modified CDS sequence (opt3) from hemagglutinin__InfluenzaA__EPI726930
augaaggccauccuggugguccuccuuuacaccuucacaacugcuaacgcagacacgcugugcauuggcuaucacgccaauaacagcaccgauacaguugacacuguguuggagaagaauguaaccgugacacauuccgucaacuuacuggaagauaagcacaaugggaaacuauguaagcucagaggaguggcgccccugcaucuugguaaaugcaacauagcuggcuggauccuggggaauccugagugugaaucuuugucaaccgccaguagcugguccuacauuguugagacuucuaacucggacaauggaacaugcuauccaggcgauuuuaucaacuacgaagaacucagggagcagcugucaagcgugaguuccuucgaacgguuugagauuuucccgaaggcaucuagcuggcccaaucacgacuccaacaagggugucaccgccgcuuguccucaugcaggggccaaaucauuuuauaagaaucugaucuggcucgugaaaaagggaaacaguuacccaaaauuaaaucaaagcuauauaaacgauaagggcaaggaaguacugguucuuuggggcauccaccaccccucuacgacugcugaccagcaguccuuguaccagaacgccgaugcguacguguucgucgggaccucacgcuauagcaaaaaguuuaaaccugagauugcaacacgaccaaaggugcgugaccaagagggaagaaugaauuacuauuggacucugguggaacccggugauaaaaucaccuucgaggccacaggcaaccuagucguuccuagguacgcuuuuaccauggaacggaaugccgggaguggaauuaucauaucugacacgccagugcaugauugcaacacuacaugucagaccccggagggcgcaauuaauacuucccuccccuuccagaacauccacccuauuacaaucgguaagugcccaaaauauguaaagagcaccaagcugcgccuugcuacggggcugagaaaugugcccucgauccagucuaggggauuguuuggcgccauugcgggcuucauagaagggggauggaccgguauggucgacggcugguacggguaucaucaccaaaacgagcagggauccggcuacgccgcagaccucaaaucaacacagaaugcuaucgauaagauuacuaacaaagugaauaguguuaucgagaagaugaacacccaguuuacagccguggguaaagaguucaaucaccuggagaagcggauagaaaacuuaaauaagaaagucgacgauggguuccuggacauuuggacuuacaacgcugagcuccuugugcuguuggaaaacgagcgcacccuagauuaucaugacagcaauguaaagaaccuguacgagaaaguucgaaaucaacucaagaacaaugccaaagaaaucggcaacggauguuuugaguucuaucacaagugcgauaauacauguauggaauccgugaagaacggcaccuacgacuauccuaaauacucugaggaagcaaagcugaauagagagaaaaucgauggggucaaacuugagagcacuaggauuuaucagauccuggccauuuacucaacgguggcuaguuccuugguccucgugguuagccugggagcgauaucuuuuuggaugugcucaaacgguaguuuacagugccggaucuguauuuga

SEQ ID NO: 141962 - RNA, 1701 nt, Artificial Sequence
  derived and/or modified CDS sequence (opt3) from hemagglutinin__InfluenzaA__EPI813817
augaaggccauccuggugguccuccuuuacaccuucacaacugcuaacgcagacacgcugugcauuggcuaucacgccaauaacagcaccgauacaguugacacuguguuggagaagaauguaaccgugacacauuccgucaacuuacuggaagauaagcacaaugggaaacuauguaagcucagaggaguggcgccccugcaucuugguaaaugcaacauagcuggcuggauccuggggaauccugagugugaaucuuugucaaccgccaguagcugguccuacauuguugagacuucuaacucggacaauggaacaugcuauccaggcgauuuuaucaacuacgaagaacucagggagcagcugucaagcgugaguuccuucgaacgguuugagauuuucccgaaggcaucuagcuggcccaaucacgacuccaacaagggugucaccgccgcuuguccucaugcaggggccaaaucauuuuauaagaaucugaucuggcucgugaaaaagggaaacaguuacccaaaauuaaaucaaagcuauauaaacgauaagggcaaggaaguacugguucuuuggggcauccaccaccccucuacgacugcugaccagcaguccuuguaccagaacgccgaugcguacguguucgucgggaccucacgcuauagcaaaaaguuuaaaccugagauugcaacacgaccaaaggugcgugaccaagaggccagaaugaauuacuauuggacucugguggaacccggagauaaaaucaccuucgaggcuacagguaaccuagucguuccuagguacgccuuuaccauggaacggaaugcaggcagugggauuaucauaucugacacgccagugcaugauugcaacacuacaugucagaccccggagggagcuauuaauacuucccuccccuuccagaacauccacccuauuacaaucggcaagugcccaaaauauguaaagagcaccaagcugcgccuugccacgggucugagaaaugugcccucgauccagucuaggggguuguuuggagcgauugccggcuucauagaaggcggguggaccggaauggucgacgguugguacggcuaucaucaccaaaacgagcagggguccggauacgcagcugaccucaaaucaacacagaaugccaucgauaagauuacuaacaaagugaauaguguuaucgagaagaugaacacccaguuuacagcugugggcaaagaguucaaucaccuggagaagcggauagaaaacuuaaauaagaaagucgacgaugguuuccuggacauuuggacuuacaacgccgagcuccuugugcuguuggaaaacgagcgcacccuagauuaucaugacagcaauguaaagaaccuguacgagaaaguucgaaaucaacucaagaacaaugcaaaagaaaucgggaacggcuguuuugaguucuaucacaagugcgauaauacauguauggaauccgugaagaacggaaccuacgacuauccuaaauacucugaggaagccaagcugaauagagagaaaaucgauggcgucaaacuugagagcacuaggauuuaucagauccuggcuauuuacucaacgguggcgaguuccuugguccucgugguuagccugggggcaauaucuuuuuggaugugcucaaacggaaguuuacagugccggaucuguauuuga

SEQ ID NO: 141963 - RNA, 1701 nt, Artificial Sequence
  derived and/or modified CDS sequence (opt3) from hemagglutinin__InfluenzaA__EPI466626
augaaggccauccuggugguccuccuuuacaccuucgcuacagcaaacgccgacacucugugcauuggcuaucacgcgaauaacagcacggauaccguugacacaguguuggagaagaauguaacugugacccauuccgucaacuuacuggaagauaagcacaaugggaaacuauguaagcucagaggaguggcuccccugcaucuugguaaaugcaacauagccggcuggauccuggggaauccugagugugaaucuuugucaacagcaaguagcugguccuacauuguugagaccucuucgucagacaacggaacuugcuauccaggcgauuuuaucaauuacgaagaacucagggagcagcugagcaguguguccucuuucgaacgguuugagauuuucccgaagacaagcuccuggcccaaccacgacucaaauaagggugucaccgccgcuuguccucaugcaggggccaaaaguuuuuauaagaaccugaucuggcucgugaaaaagggaaauagcuacccaaaauuaucucaauccuauauaaacgauaagggcaaggaaguacugguucuuuggggcauccaccaccccucaacgacugcugaccagcagagcuuguaccagaaugccgaugcguacguguucgucgggaccagucgcuauucuaaaaaguuuaaaccugagauugcaauccgaccaaaggugcgugaccaagagggaagaaugaacuacuauuggacacugguggaacccggugauaaaauuacuuucgaggccaccggcaaccuagucguuccuagguacgcuuuuacaauggaacggaaugccggguccggaaucauaauuagcgacaccccagugcaugauugcaacacgacuugucagacaccggagggcgcaaucaauaccucgcuccccuuccagaacauucacccuaucacuaucgguaagugcccaaaauauguaaagucuacaaagcugcgccuugcuaccgggcugagaaaugugcccuccauucagucaaggggauuguuuggcgccauagcgggcuucaucgaagggggauggacggguauggucgacggcugguacggguaucaucaccaaaacgagcagggaaguggcuacgccgcagaccucaaaagcacccagaaugcuauugauaagaucacaaacaaaguuaauuccgugauagagaagaugaacacucaguuuaccgccguggguaaagaguucaaucaccuggagaagcggauugaaaacuuaaauaagaaagucgacgauggguuccuggacaucuggacauacaacgcugagcuccuugugcuguuggaaaaugagcgcacucuagauuaucaugacucuaacguaaagaaccuguacgagaaaguucgaaaucaacucaagaacaaugccaaagaaaucggcaacggauguuuugaguucuaucacaagugcgauaauaccuguauggaaagcgugaagaacggcacauacgacuauccuaaauacucagaggaagcaaagcugaauagagagaaaauugauggggucaaacuugagaguaccaggaucuaucagauucuggccauauacuccacuguggcuagcucugucguguugguugugucacucggagcgaucaguuuuuggaugugcagcaacgguucccugcagugccggauuuguaucuga

SEQ ID NO: 141964 - RNA, 1701 nt, Artificial Sequence
  derived and/or modified CDS sequence (opt3) from hemagglutinin__InfluenzaA__EPI541966
augaaggccauccuggugguccuccuuuacaccuucgcuacagcaaacgccgacacucugugcauuggcuaucacgcgaauaacagcacggauaccguugacacaguguuggagaagaauguaacugugacccauuccgucaacuuacuggaagauaagcacaaugggaaacuauguaagcucagaggaguggcuccccugcaucuugguaaaugcaacauagccggcuggauccuggggaauccugagugugaaucuuugucaacagcaaguagcugguccuacauuguugagaccucuucgucagacaacggaacuugcuauccaggcgauuuuaucaauuacgaggagcucagggagcagcugagcaguguguccucuuucgaacgguuugagauuuucccgaagacaagcuccuggcccaaccacgaaucaaauaagggugucaccgccgcuuguccucaugcaggggccaaaaguuuuuauaagaaccugaucuggcucgugaaaaagggaaauagcuacccaaaauuaucucaauccuauauaaacgacaagggcaaggagguacugguucuuuggggcauccaccaccccucaacgacugcugaucagcagagcuuguaccagaaugccgacgcguacguguucgucgggaccagucgcuauucuaaaaaguuuaaaccugagauugcaauccgaccaaaggugcgugaucaagaaggaagaaugaacuacuauuggacacugguggagcccggugacaaaauuacuuucgaagccaccggcaaccuagucguuccuagguacgcuuuuacaauggagcggaaugccggguccggaaucauaauuagcgauaccccagugcaugacugcaacacgacuugucagacaccggaaggcgcaaucaauaccucgcuccccuuccagaacauucacccuaucacuaucgguaagugcccaaaauauguaaagucuacaaagcugcgccuugcuaccgggcugagaaaugugcccuccauucagucaaggggauuguuuggcgccauagcgggcuucaucgaagggggauggacggguauggucgauggcugguacggguaucaucaccaaaacgagcagggaaguggcuacgccgcagaccucaaaagcacccagaaugcuauugacaagaucacaaacaaaguuaauuccgugauagaaaagaugaacacucaguuuaccgccguggguaaagaguucaaucaccuggaaaagcggauugagaacuuaaauaagaaagucgaugacggguuccuggauaucuggacauacaacgcugaacuccuugugcuguuggagaaugagcgcacucuagacuaucaugauucuaacguaaagaaccuguacgaaaaaguucgaaaucaacucaagaacaaugccaaagagaucggcaacggauguuuugaguucuaucacaagugcgacaauaccuguauggaaagcgugaagaacggcacauacgauuauccuaaauacucagaagaggcaaagcugaauagagagaaaauugacggggucaaacuugaaaguaccaggaucuaucagauucuggccauauacuccacuguggcuagcucugucguguugguugugucacucggagcgaucaguuuuuggaugugcagcaacgguucccugcagugccggauuuguaucuga

SEQ ID NO: 141965 - RNA, 1701 nt, Artificial Sequence
  derived and/or modified CDS sequence (opt3) from hemagglutinin__InfluenzaA__EPI652003
augaaggccauccuggugguccuccuuuacaccuucgcuacagcaaacgccgacacucugugcauuggcuaucacgcgaauaacagcacggauaccguugacacaguguuggagaagaauguaacugugacccauuccgucaacuuacuggaagauaagcacaaugggaaacuauguaagcucagaggaguggcuccccugcaucuugguaaaugcaacauagccggcuggauccuggggaauccugagugugaaucuuugucaacagcaaguagcugguccuacauuguugagaccucuucgucagacaacggaacuugcuauccaggcgauuuuaucaauuacgaggagcucagggagcagcugagcaguguguccucuuucgaacgguuugagauuuucccgaagacaagcuccuggcccaaccacgaaucaaauaagggugucaccgccgcuuguccucaugcaggggccaaaaguuuuuauaagaaccugaucuggcucgugaaaaagggaaauagcuacccaaaauuaucucaauccuauauaaacgacaagggcaaggagguacugguucuuuggggcauccaccaucccccuacgacugcugaucagcagucauuguaccagaaugccgacgcguacguguucgucgggaccagccgcuauaguaaaaaguuuaaaccagagauugcaauccgacccaaggugcgugaucaagaaggaagaaugaacuacuauuggacacugguggagccuggugacaaaauuacuuucgaagccaccggcaaccuagucguuccaagguacgcuuuuacaauggagcggaaugccgggucuggaaucauaauuuccgauaccccggugcacgacugcaacacgacuugucagacacccgaaggcgcaaucaauaccagccucccuuuccagaacauucacccaaucacuaucgguaagugccccaaauauguaaagucgacaaagcugcgccuugcuaccgggcugagaaaugugccuucuauucaguccaggggauuguuuggcgccauagcgggcuucaucgaagggggauggacggguauggucgauggcugguacggguaucaucaccaaaacgagcagggaucaggcuacgccgcagaccucaaaaguacccagaaugcuauugacaagaucacaaacaaagugaauagcguuauagaaaagaugaacacucaguuuaccgccguggguaaagaguucaaucaccuggaaaagcggauugagaacuuaaauaagaaagucgaugacggguuccuggauaucuggacauacaacgcugaacuccuugugcuguuggagaaugagcgcacucuagacuaucaugauuccaacguaaagaaccuguacgaaaaaguucgaaaucaacucaagaacaaugccaaagagaucggcaacggauguuuugaguucuaucacaagugcgacaauaccuguauggaaucugugaagaacggcacauacgauuauccaaaauacagcgaagaggcaaagcugaauagagagaaaauugacggggucaaacuugaaucaaccaggaucuaucagauucuggccauauacaguacuguggcuuccagcgucguguugguugugucucucggagcgaucucauuuuggaugugcaguaacgguagccugcagugccggauuuguaucuga

SEQ ID NO: 141966 - RNA, 1701 nt, Artificial Sequence
  derived and/or modified CDS sequence (opt3) from hemagglutinin__InfluenzaA__EPI291877
augaaggccaucauugugguccugcucuacaccuucgcuacagcagacgccgauacucuuugcauaggcuaucacgcgaacaauagcacggacaccguugauacagugcuggagaaaaacguaacugugacccauuccgucaauaucuuggaaaacaagcacgacgggaaauuauguaagcugagaggaguggcuccccuacaucucgguaaaugcaauauugccggcuggcugcuugggaacccugagugugaaucucuguuugcagccucaaguuggagcuacaucguugagacaccaaauuccgauaacggaaccugcuauccgggcgacuucauuaauuacgaagaguugagggagcaccucucuucggugagcucauuugaacgguucgagaucuuucccaaggcuaacaguuggccuaaucaugauacuaacaagggugucacagcagccuguccauaugcuggggccaauuccuucuaccgcaaccugauauggcuggugaaaaagggaaauucuuaucccaaacucagcaaguccuacaucaacaacaaaaagaaggaaguauuaguuauuuggggcauccaccacccuccaaccucaauugaccagcaaacgcuguaccagaaugcggaugcauauguguuugucggcaguagcaaauacucuaagcgauucaaacccgagaucgccgcucguccuaaggugagagaccaggccgggaggauggauuauuacuggacucuuauagagccaggagacaccauuacauuugaagcaacugguaacuugguggucccgcgguaugcuuucgccaugaaacgcggcuccgggucaggaaucauuguuagcgaugcgcccgugcaugacugcaauaccacaugucagaccccuaagggcgccaucaacacgagucugccauuucaaaauauccaccccguaacuauuggugagugcccuaaauacgugaagucuacaaagcuaagaauggcaaccgggcucaggaacauaccauccauccagagccggggacuguucggcgcuauugccggcuuuaucgaagggggauggacugguaugauagacggcugguauggguaccaucaccagaaugagcagggaucgggcuacgcugccgaucaaaaaucuacacagaacgcaauugacgguaucaccaauaaggucaacuccaucauugaaaagaugaauacgcaguucaccgccguggggaaagaguucucacagcuugagaaacgcaucgaaagucugaacaauaagguugaugacggcuuuuuggauauuuggacauauaacgcugagcuccugguguuacuggaaaaugagcgaacucucgacuaccacgauagcaacgucaagaaccuuuaugaaaaagugagaucccaacugaagaauaacgcgaaagagauaggaaauggcuguuucgaguuuuaccauaagugcgacaacaccuguauggaaucuguuaaaaaugggacauaugauuaccccaaguauagcgaggaagcaaaguugaacagggaggaaaucgacggaauuaaacuagagucagcccggaucuaccagauccuggcuauuuacaguacuguagccuccagccucgugcugcuugucucucugggugcagugucauucuggaugugcaguaauggcagcuugcagugccguauauguaucuga

SEQ ID NO: 141967 - RNA, 1701 nt, Artificial Sequence
  derived and/or modified CDS sequence (opt3) from hemagglutinin__InfluenzaA__ABR29595
augaaggccauccugcucgugcuucuguacaccuucacagcugcaaacgccgacacuuugugcauuggcuaucacgcgaauaacagcacggauaccgucgacacaguuuuagagaagaaugugacuguaacccauuccgugaaccugcuagaagauagacacaaugggaagcucuguaaacugaggggagucgcuccccuucaucuggguaagugcaacauagccggcugguugcucgggaauccugagugugaacugcuguuuacagcaucuucauggaguuacaucguggagaccagcaacuccgacaauggaacuugcuauccaggcgauuucauuaacuacgaagaacuccgggagcaguuaucuucgguuucuagcuuugaacgcuucgagaucuuuccgaaagccaguuccuggcccaaucacgaaacaaaccgaggugugaccgcugcauguccuuaugccggggcuaauucuuucuaccguaaccugauuuggcuugucaagaagggaaauagcuauccaaaauuguccaagucauacgugaacaacaaagagaaggagguacugguucuauggggcauccaucaucccccuacgaguacugaccaacagagccucuaccagaaugccgaugcguauguguuugucggcucauccaaauacaacaagaaguucaaaccagaaauagcaaccagacccaaggugagggggcaggccggacggaugaauuauuacuggacacugguggagccuggugacacuaucaccuuugaagcuacaggcaaccuugucguuccacgcuaugccuucgcaaugaaaagagggucaggaagcggcauuaucauuagugauaccccggugcacgacugcaauacgacuugucaaacacccaagggugcuaucaacaccucucugccuuuucagaauauacacccaguaacuauuggggagugccccaaauacgugaaguccacaaaauugaggauggccaccggacuccggaacaucccuagcauucagucgcgcggccuguucggcgcgaucgccggguuuaucgaaggagguuggacgggcaugauugaugggugguauggauaccaccaucagaaugagcaaggcucugguuacgcagcugaccgaaaguccacccagaacgccauagaugggaucacaaauaaggucaacucagugauugagaaaaugaauacucaguucaccgcuguuggcaaggaguucaaccacuuagagaaaagaaucgaaaaucugaacaagaaaguggacgacggauuucucgaugucuggacauauaacgccgagcuucugguguugcuagaaaaugagaggacucuggacuaccacgauaguaacguaaagaaucucuaugagaagguucggagccagcugaaaaacaaugcaaaggaaauaggcaacggguguuucgaguuuuaccauaaaugcgacgauaccuguauggaauccgugaagaauggaacauaugacuacccaaaauauucugaggaaagcaaacuuaaccgugaggagauugauggugucaagcuggaaucaacccgcaucuaccaaaucuuggccauuuacaguacuguggcuuccagccucguccuguuagugucucugggcgcgaucucauucuggaugugcaguaaugggagccuacagugcagaauuuguauauga

SEQ ID NO: 141968 - RNA, 1701 nt, Artificial Sequence
  derived and/or modified CDS sequence (opt3) from hemagglutinin__InfluenzaA__EPI291885
augaaggccaucauugugguccugcuccacaccuucgcuacagcagacgccgauacucuuugcauaggcuaccaugcgaacaauagcacggacaccguugauacagugcuggagaaaaacguaacugugacccacuccgucaauuuguuagaaacaaagcaugacgggaaacuguguaaccuaaagggaguggcuccccuccaccuggguaaaugcaauaucgccggcuggcuucuggggaacccugagugugaaucuuuguuuaccgcaucaaguuggagcuauauuguugagacuccaaauuccgauaacggaacaugcuacccgggcaauuucaucaacuaugaggagcucagagagcaucugucuucggugagcucauuugaaagguucgagauuuuucccaaggccaauaguuggccuaaccacgacaccaauaagggugucacggcugcauguccauacgccggggcuaacuccuucuaucggaaucugaucuggcucgugaaaaagggaaacucuuaccccaaauuaagcaaguccuauauaaacaauaaaaagaaggaaguacugguuaucuggggcauucaccauccuccaacuucaaccgaucagcaaacacuuuaccagaacgccgacgcguacguguuugucggcaguagcaaauauucuaagcgcuucgagcccgagaucgcagcccgaccuaaagugcguaaucaggcugggagaaugaacuacuauuggacuuugauugaaccaggagauaccaucacauuugaggccaccgguaaucugguggucccgagguacgcauucgcuaugcggcgcggcuccgggucaggaauaauuguuagcgacgcccccgugcacgauugcaacacgacuugucagacaccuaagggcgcgaucaauaccagucuaccauuucaaaacauucaucccguaacuaucggugaaugcccuaaauaugugaagucuacaaaacucagaauggccaccgggcugaggaauaucccauccauucagagccggggacuuuucggcgcaauagcuggcuuucuggaagggggauggacggguaugaucgacggcugguacggguaucaccaccagaacgaacagggaucgggcuacgccgcugaucaaaagucuacccagaaugccauugacgguaucacaaacaaggucaauuccauaauugagaaaaugaacacucaguucaccgcaguggggaaggaguucucacaguuggaaaaacgcaucgagagucucaauaacaagguugacgauggcuuucuggacaucuggacauacaacgccgaaauguuagugcugcucgagaaugaacgaacucuugauuaucaugacagcaacgucaaaaaucuguacgagaaggugagaucccaauugaagaacaaugcuaaagagauuggaaacggcuguuucgaauuuuaucacaagugcgauaauaccuguauggagucuguuaaaaacgggacauacgacuaucccaaguacagcgaagaggcgaaacuaaauagggaagagaucgauggaguaaagcuggagucagcacggauuuaucagauacucgccaucuacaguaccguggcuuccagccugguccuucuggugucuuugggugccgucucauucuggaugugcaguaacggcagccuccagugccguauuuguaucuga

SEQ ID NO: 141969 - RNA, 1701 nt, Artificial Sequence; identical to SEQ ID NO: 130704
  derived and/or modified CDS sequence (opt3) from hemagglutinin__InfluenzaA__EPI176515

SEQ ID NO: 141970 - RNA, 1701 nt, Artificial Sequence; identical to SEQ ID NO: 131160
  derived and/or modified CDS sequence (opt3) from hemagglutinin__InfluenzaA__EPI189182

SEQ ID NO: 141971 - RNA, 1701 nt, Artificial Sequence; identical to SEQ ID NO: 130952
  derived and/or modified CDS sequence (opt3) from hemagglutinin__InfluenzaA__EPI180574

SEQ ID NO: 141972 - RNA, 1701 nt, Artificial Sequence; identical to SEQ ID NO: 136757
  derived and/or modified CDS sequence (opt3) from hemagglutinin__InfluenzaA__EPI377499

SEQ ID NO: 141973 - RNA, 1701 nt, Artificial Sequence
  derived and/or modified CDS sequence (opt3) from hemagglutinin__InfluenzaA__EPI346916
augaaggccauccuggugguccuccuuuacaccuucacaacugcuacggcagacacccugugcauuggcuaucacgccaacaauagcacagauacuguugacaccguguuggagaaaaacguaacagugacccauuccgucaauuuacuggaaaacagacacaaugggaagcuauguaaacucaggggaguggcgccccugcaucuugguaagugcaacauagcuggcuggcuguuggggaauccugagugugaaucucucucaacugccaguagcugguccuacaucguugagacaucuaacucggauaauggaaccugcuauccaggcgacuuuauuaacuacgaagaacugcgggagcagcugucaagcgugaguuccuucgaacgcuuugagaucuucccgaaaacgucuagcuggcccaaucacgauacuaaccgaggugucaccgcagccuguccucaugacgggacaaauuccuuuuaucguaaccucauuugguuagugaagaagggaaauucauacccaaaaaucaacaagaguuauauaaacaauaaagaaaaggagauccugguacuuugggcuauucaccaccccagcacuucugcagaucaacaguccuuguaccagaacgccgacgcuuacguuuucgugggcucaagcagauauaguaggaaauuugagccugaagucgccacccggccaaaggugcgcgaucaggcgggcagaaugaauuacuauuggacacugguggagcccggggacaagaucaccuucgaagcaacgggaaaccuagucguuccuagguacgccuuugcucucaaacgcaauucugguuccggcauuaucauaagcgauacuucggugcaugacugcgauacaaacugucaaaccccaaauggggccauuaacacuucucugccguuccagaauauccaccccguaacaauuggagagugcccuaaguaugugaaauccaccaaguuacggauggcaacgggccugcgaaacaucccaucaauccagaguagagguuuguuuggggcuauugccggauucauagaaggcggcuggaccgggaugaucgacggaugguacgguuaucaucaccagaaugagcaaggcagcggguacgcggccgaccucaaauccacacagaacgcaauugauggaaucacuaauaaggucaacucugugauagagaaaaugaauacccaguuuacagcuguuggcaaggaguucagccaccuggagaggcggauugaaaacuuaaacaagaaaguggacgaugguuuccuggacaucuggacuuacaaugccgagcuccuuguccuguuggaaaacgagcguacccuagauuaucaugacucaaaugugaagaaccuguacgagaaaguacgcagucagcucaagaauaacgcuaaagaaaucgggaauggcuguuuugaguucuaucacaagugcgaugacauguguauggaauccguuaagaacggaacauacgauuaucccaaauacagcgaggaagccaagcugaauagagaggagauugacggcgugaaacuugaaucuaccaggaucuaucaaauucuggcaauauacucaacugucgccaguagcuuggugcucgucgugucccugggggcuaucucuuuuuggaugugcucgaacggaagccuucagugccggauuuguaucuga

SEQ ID NO: 141974 - RNA, 1689 nt, Artificial Sequence; identical to SEQ ID NO: 131331
  derived and/or modified CDS sequence (opt3) from hemagglutinin__InfluenzaA__ACV49600

SEQ ID NO: 141975 - RNA, 1701 nt, Artificial Sequence; identical to SEQ ID NO: 130377
  derived and/or modified CDS sequence (opt3) from hemagglutinin__InfluenzaA__BAF48361

SEQ ID NO: 141976 - RNA, 1701 nt, Artificial Sequence
  derived and/or modified CDS sequence (opt3) from hemagglutinin__InfluenzaA__EPI507594
augaagaccaucauugcccugagcuacauacucugccuuguguucgcucagaaacugcccggcaacgacaauuccacagcaacuuuguguuuagggcaccaugccgucccuaacggaacgaucguuaagaccauuacaaaugauagaaucgaggugacuaacgcgaccgaacugguacaaaauucuucaauuggugagaucugcgacaguccacaccagauacuagauggcgaaaacuguacacucaucgacgcucugcuuggggauccgcagugcgacggauuucagaauaaaaagugggaucuguucguggagaggagcaaagccuauuccaacuguuaccccuaugacgucccugauuacgcaucuuugcggucgcucguggccucaagcggcacccuggaauuuaauaacgagaguuucaauugggcugguguuacucaaaacgggacauccucugcaugcaagcgcggaagcaauuccucauuuuucagucgacugaacuggcucacccauuuaaauuuuaaguauccagcccugaacgugacgaugcccaacaaugagcaguucgacaaacuuuacauuuggggcguccaccauccugugacugauaaggaccagaucuuuuuguaugcucagagcucuggccguauuaccguauccacaaaaagaucacaacaggccguuaucccaaacauaggguucaggccccggauucgcaauaucccuagcagaauuaguaucuacuggacuaucgugaagccaggagauauucugcuaauaaacucuaccgguaaucucaucgcgccgaggggcuacuuuaaaauucgguccggaaagagcucgaucaugcgcucugacgcacccauagggaaguguaaauccgaaugcauuacaccuaacggcucaaucccaaaugacaagcccuuccagaacgucaaucgaaucaccuauggugccuguccuagauacgugaaacagaguacgcugaagcuggcuacugggaugaggaacgugccagagaaacaaacacggggaauuuuuggcgccaucgcaggcuucauugaaaaugggugggagggaauggucgaugguugguauggcuuccgucaccagaacuuugaggggcgcggacaggcugccgaccuuaagagcacccaagcggccauagaucagaucaauggcaaauugaacagacucauugguaagacuaaugaaaaguuccaccagaucgagaaagaauuuuccgagguugaagggaggauccaggaccuggagaaguacguggaggauacaaaaauugacuuauggucuuauaacgcagaacugcucguagcucuugagaaccaacauaccauagaucugacggacagcgaaaugaauaaguuguucgagaaaaccaagaagcagcuacgggaaaacgccgaggauaugggcaauggaugcuuuaaaaucuaccacaagugugacaacgcuugcauuggcucaauccgaaaugggacauaugaucaugacguguaccgcgacgaggcccugaacaauagauuccagauuaaaggagucgaacucaagagugguuacaaagauuggauccuguggauauccuuugcaaucagcugcuuccuucuguguguggccuugcucggcuuuauuaugugggcuugccagaaggggaacaucagguguaauauuugcaucuga

SEQ ID NO: 141977 - RNA, 1701 nt, Artificial Sequence
  derived and/or modified CDS sequence (opt3) from hemagglutinin__InfluenzaA__EPI461953
augaagaccaucauugcccugagcuacauacucugccuuguguucgcucagaaacugcccggcaacgacaauuccacagcaacuuuguguuuagggcaccaugccgucccuaacggaacgaucguuaagaccauuacaaaugauagaaucgaggugacuaacgcgaccgaacugguacaaaauucuucaauuggugagaucugcgacaguccacaccagauacuagauggcgaaaacuguacacucaucgacgcucugcuuggggauccgcagugcgacggauuucagaauaaaaagugggaucuguucguggagaggagcaaagccuauuccaacuguuaccccuaugacgucccugauuacgcaucuuugcggucgcucguggccucaagcggcacccuggaauuuaauaacgagaguuucaauugggcugguguuacucaaaacgggacauccucugcaugcauucgcggaagcaauuccucauuuuucagucgacugaacuggcucacccauuuaaauuuuaaguauccagcccugaacgugacgaugcccaacaaugagcaguucgacaaguuguacaucuggggcguccaccauccuggcacugauaaagaccagauuuuucuuuaugcucagagcucugggcguaucaccguguccacaaagagaucacaacaggccguaauaccaaacauuggaagcaggccccggauccgcaauauuccuaguagaaucucuaucuacuggacuauuguuaaaccaggugauauacugcuaaucaacuccaccggcaaucucauugcgccgaggggguacuucaagauccggagcggaaaaucgucuauaaugcgcuccgacgcacccauuggcaaguguaagucagaaugcaucacaccuaacgguaguaucccaaaugacaaacccuuucagaacgugaaucgaauuaccuauggggccuguccuagauacgucaagcagagcacgcugaaacuugcuacuggaaugaggaacgugccagagaagcaaacacggggcaucuucggcgccauugcaggguuuauagaaaauggaugggaggguaugguggauggcugguauggguuccgucaccagaacuucgagggacgcggccaggcugccgaccugaaauccacccaagcggccaucgaucagauuaaugguaaguugaacagacucaucgggaaaacuaaugaaaaguuucaccagaucgagaaggaguucucugaagucgaaggcaggauucaggaccuggagaaauacguugaggauacaaagauagacuuauggagcuauaacgcagaacugcucguggcucuugagaaccaacauaccaucgaucugacggacucagaaaugaauaaauuguuugagaagaccaaaaagcagcuacgggaaaacgccgaggauaugggaaauggcugcuucaagauuuaccacaaaugugacaacgcuugcaucgggaguauucgaaauggaacauaugaucaugacguauaccgcgacgaggcccugaacaauagauuucagaucaaggguguggaacucaaauccggcuacaaggauuggauacuguggaucagcuucgcaauuucuugcuuucuucugugugucgccuugcucggguucaucaugugggcuugccagaaaggaaacauuagguguaauaucugcauauga

SEQ ID NO: 141978 - RNA, 1701 nt, Artificial Sequence
  derived and/or modified CDS sequence (opt3) from hemagglutinin__InfluenzaA__EPI461953/m1
augaagaccaucauugcccugagcuacauacucugccuuguguucgcucagaaacugcccggcaacgacaauuccacagcaacuuuguguuuagggcaccaugccgucccuaacggaacgaucguuaagaccauuacaaaugauagaaucgaggugacuaacgcgaccgaacugguacaaaauucuucaauuggugagaucugcgacaguccacaccagauacuagauggcgaaaacuguacacucaucgacgcucugcuuggggauccgcagugcgacggauuucagaauaaaaagugggaucuguucguggagaggagcaaagccuauuccaacuguuaccccuaugacgucccugauuacgcaucuuugcggucgcucguggccucaagcggcacccuggaauuuaauaacgagaguuucaauugggcugguguuacucaaaacgggacauccucugcaugcaagcgcggaagcaauuccucauuuuucagucgacugaacuggcucacccauuuaaauuuuaaguauccagcccugaacgugacgaugcccaacaaugagcaguucgacaaacuuuacauuuggggcguccaccauccugugacugauaaggaccagaucuuuuuguaugcucagagcucuggccguauuaccguauccacaaaaagaucacaacaggccguuaucccaaacauaggguacaggccccggauucgcaauaucccuagcagaauuaguaucuacuggacuaucgugaagccaggagauauucugcuaauaaacucuaccgguaaucucaucgcgccgaggggcuauuucaaaauucgguccggaaagagcucgaucaugcgcucugacgcacccauagggaaguguaaauccgaaugcauuacaccuaacggcucaaucccaaaugacaagcccuuucagaacgucaaucgaaucaccuacggugccuguccuagauaugugaaacagaguacgcugaagcuggcuacugggaugaggaacgugccagagaaacaaacacggggaauuuucggcgccaucgcaggcuuuauugaaaaugggugggagggaauggucgaugguugguacggcuuccgucaccagaacuucgaggggcgcggacaggcugccgaccuuaagagcacccaagcggccauagaucagaucaauggcaaauugaacagacucauugguaagacuaaugaaaaguuucaccagaucgagaaagaguucuccgaaguugaagggaggauccaggaccuggagaaguauguggaggauacaaaaauugacuuauggucuuacaacgcagaacugcucguagcucuugagaaccaacauaccauagaucugacggacagcgaaaugaauaaguuguuugagaaaaccaagaagcagcuacgggaaaacgccgaggauaugggcaauggaugcuucaaaaucuaucacaagugugacaacgcuugcauuggcucaauccgaaaugggacauacgaucaugacguguaccgcgacgaggcccugaacaauagauuucagauuaaaggagucgaacucaagagugguuauaaagauuggauccuguggauauccuucgcaaucagcugcuuucuucuguguguggccuugcucggcuucauuaugugggcuugccagaaggggaacaucagguguaauauuugcaucuga

SEQ ID NO: 141979 - RNA, 1701 nt, Artificial Sequence
  derived and/or modified CDS sequence (opt3) from hemagglutinin__InfluenzaA__EPI668105
augaagaccaucauugcccugagcuacauacucugccuuguguucgcucagaaaauccccggcaacgacaauuccacagcaacucuguguuuggggcaccaugccgucccuaacggaacgauuguuaagaccaucacaaaugauagaauugaggugacuaacgcgaccgaauuaguacaaaauucuucaaucggugagauaugcgacaguccacaccagauccuggauggcgaaaacuguacacuaauugacgcucuccugggggauccgcagugcgacggauuucagaauaaaaagugggaucuuuucguggagaggagcaaagccuauuccaacuguuaccccuaugacgucccugauuacgcaucucugcggucguugguggccucaagcggcacccucgaauuuaauaacgagaguuucaauuggacugguguuacacaaaacgggaccuccucugcuugcauccgcggaagcuccucaaguuucuucagccgacugaauuggcugacgcaucucaacuauaaguacccagcauuaaaugugacuaugcccaacaacgagcaguuugacaagcuguauauuuggggcguccaccauccuggcaccgauaaagaccagaucuucccauacgcccagucuuccgggcguauaacagugucaacuaagagaagccaacaggcuguaauucccaauaucggaaguaggccucggauucgcgguaucccaucuagaaucuccauuuacuggaccauaguuaaaccgggcgauauccuuuugauuaacagcacagggaaucugaucgcccccaggggauauuuuaagauacggucgggcaaaucuuccauuaugcgcucagacgcgccuaucgguaaguguaagagugaaugcaucaccccaaacgggagcauucccaaugacaaaccuuuccagaacgugaaucgaaucacguacggagcauguccaagauaugucaagcacuccacucuaaaacucgccacaggcaugaggaacgugcccgagaagcagacccggggcauuuuuggggcuauagccggauucaucgaaaaugguugggagggcaugguggaugggugguacggauuucgucaccaaaacucugagggccgcggucaggcagcugaccugaaaagcacucaggccgcgauugaucaaaucaaugggaaacuuaacagacugaucggcaaaacaaaugaaaaguuccaucagauugagaaggaauuuucagaggucgaaggaaggauacaggacuuggagaaauauguugaggauaccaagaucgaccucuggaguuacaacgccgaacuguuaguggcacuggagaaucagcacacgauugaucucaccgacuccgaaaugaacaaacuuuuugagaagacaaagaagcaacugcgggaaaacgcugaggauaugggcaaugggugcuucaagaucuaucauaaaugugacaacgccugcauuggaagcauccgaaaugguacuuacgaucacaacguauaccgcgacgaggcuuugaauaacagauuucagauaaagggcguggaacuaaaaucuggguauaaggacuggauccuguggauuucauucgccaucaguugcuuucuccugugugucgcacuucugggauucauuaugugggccugccagaaaggcaauaucagguguaacauaugcauuuga

SEQ ID NO: 141980 - RNA, 1701 nt, Artificial Sequence
  derived and/or modified CDS sequence (opt3) from hemagglutinin__InfluenzaA__EPI578446
augaagaccaucauugcccugagcuacauacucugccuuguguucgcucagaaaauccccggcaacgacaauuccacagcaacucuguguuuggggcaccaugccgucccuaacggaacgauuguuaagaccaucacaaaugauagaauugaggugacuaacgcgaccgaauuaguacaaaauucuucaaucggugagauaugcgacaguccacaccagauccuggauggcgaaaacuguacacuaauugacgcucuccugggggauccgcagugcgacggauuucagaauaaaaagugggaucuuuucguggagaggagcaaagccuauuccaacuguuaccccuaugacgucccugauuacgcaucucugcggucguugguggccucaagcggcacccucgaauuuaauaacgagaguuucaauuggacugguguuacacaaaacgggaccuccucugcuugcauccgccgaagcuccucaaguuucuucagccgucugaauuggcugacgcaucucaacuauaaguacccagcauuaaaugugacuaugcccaacaacgagcaguuugacaagcuguauauuuggggaguccaccauccuggcaccgauaaagaccagaucuucccauacgcccagucuuccggcagaauaacagugucaacuaagaggagccaacaggcuguaauucccaauaucgggagucggccucgcauuagaggaaucccaucuaggaucuccauuuacuggaccauaguuaaaccgggugauauccuuuugauuaacagcacaggcaaucugaucgcgccccggggguauuuuaagauacgcucgggaaaaucuuccauuaugcgaucagacgccccuaucggcaaguguaagagugaaugcaucaccccaaacgguagcauucccaaugacaaaccuuuccagaacgugaauagaaucacguacggggcauguccaagguaugucaagcacuccacucuaaaacucgccacaggaaugcggaacgugcccgagaagcagacccguggcauuuuuggcgcuauagccggguucaucgaaaauggaugggaggguaugguggauggcugguacggguuucgccaccaaaacucugagggaagaggccaggcagcugaccugaaaagcacucaggccgcgauugaucaaaucaaugguaaacuuaacaggcugaucgggaaaacaaaugaaaaguuccaucagauugagaaggaauuuucagaggucgaaggccggauacaggacuuggagaaauauguugaggauaccaagaucgaccucuggaguuacaacgccgaacuguuaguggcacuggagaaucagcacacgauugaucucaccgacuccgaaaugaacaaacuuuuugagaagacaaagaagcaacugcgagaaaacgcugaggauaugggaaauggcugcuucaagaucuaucauaaaugugacaacgccugcauugggagcauccgcaauggaacuuacgaucacaacguauacagagacgaggcuuugaauaacagguuucagauaaaggguguggaacuaaaaucuggcuauaaggacuggauccuguggauuucauucgccaucaguugcuuucuccugugugucgcacuucugggguucauuaugugggccugccagaaaggaaauauccgguguaacauaugcauuuga

SEQ ID NO: 141981 - RNA, 1701 nt, Artificial Sequence; identical to SEQ ID NO: 140489
  derived and/or modified CDS sequence (opt3) from hemagglutinin__InfluenzaA__EPI551882

SEQ ID NO: 141982 - RNA, 1701 nt, Artificial Sequence
  derived and/or modified CDS sequence (opt3) from hemagglutinin__InfluenzaA__EPI344389
augaagaccaucauugccuucagcugcauacugugucucaucuuugcucagaaacuucccggcuccgacaacucuauggcaacacugugcuuggggcaccaugccgugccuaauggaacuuuagucaagacgauuaccgaugaccaaaucgagguuacaaacgcgacugaacuggugcagucaaguagcaccgguagaauuuguaauuccccacaccagauccuagauggcaaaaacugcacacucauagacgcucugcuuggggauccgcauugugacgaucugcagaauaaggagugggacuuguucguagaaaggucuaccgccuacucgaacugcuaucccuacuaugugccugauuacgcaacucuccggucacuggucgccagcaguggaaaucuggaguuuacacaagaauccuucaacuggaccggcguggcucaggacgguucuagcuaugcaugucgccgaggguccguuaauucauuuuucagucgucucaacugguuauacaaucugaacuauaaauacccagagcagaaugugacgaugcccaacaaugauaaguuugacaagcuguacaucuggggaguccaccauccuggcacugauaaagaccagaccaacuuguaugugcaagccagcggcagaguaauuguuucuacaaagaggucccagcagacugugaucccaaacauugggucacggcccuggguccgcggagugagcaguaucauaucuauuuacuggaccaucgugaaaccuggugacauucugcuaaucaauuccacaggcaaccucaucgcuccaagaggguauuucaagauucagagcggaaaaucgucuauaaugagguccgaugcccacaucgacgagugcaauucagaauguauuaccccgaacggcaguauccccaaugauaagccuuuucaaaacgucaauaagauaacguacggugcgugcccacgguauguuaaacagaacacucugaaacuugcaacagggaugcgcaaugugcccgagaagcagacccgaggaauuuucggcgccaucgcuggcuuuaucgaaaacgggugggagggaaugguagacgguugguacggcuucagacaccaaaauagcgaggggacuggacaggccgcagaucugaaguccacacaggcugccauuaaccagaucaccggcaaauugaauagggugauuaagaaaacgaacgaaaaguuucaucaaauagagaaggaguucucugaagucgaaggucggauccaggaccucgagaaauauguggaggauaccaagauugaccuguggagcuacaaugcggaauuacugguugcccucgagaaccagcacacaaucgaucuuacugacucagaaaugaguaaacuguucgagcguacccgcagacaguugagggaaaacgcagaggauauggggaauggcuguuuuaagaucuaccauaaaugcgacaacgcuugcauuggauccauacggaauggcacauaugaccacgauaucuaccgaaacgaggcccuaaauaaccgcuuccaaauuaagggggugcagcuuaagagcggauauaaagacuggauccucuggauuucuuuugcuaucucauguuuccugcuuugcgucgugcuguuggguuuuauaaugugggccugucagaagggcaauaucagaugcaacauuuguaucuga

SEQ ID NO: 141983 - RNA, 1701 nt, Artificial Sequence
  derived and/or modified CDS sequence (opt3) from hemagglutinin__InfluenzaA__EPI348782
augaagaccaucauugccuucagcugcauacugugucucaucuuugcucagaaacuucccggcuccgacaacucuauggcaacacugugcuuggggcaccaugccgugccuaauggaacuuuagucaagacgauuaccgaugaccaaaucgagguuacaaacgcgacugaacuggugcagucaaguagcaccgguagaauuuguaauuccccacaccagauccuagauggcaaaaacugcacacucauagacgcucugcuuggggauccgcauugugacgaucugcagaauaaggagugggacuuguucguagaaaggucuaccgccuacucgaacugcuaucccuacuaugugccugauuacgcaacucuccggucacuggucgccagcaguggaaaucuggaguuuacacaagaauccuucaacuggaccggcguggcucaggacgguucuagcuaugcaugucgccgaggguccguuaauucauuuuucagucgucucaacugguuauacaaacugaauuauaaguacccagagcagaacgugacgaugcccaauaacgauaaguuugacaaacuuuacaucuggggaguccaccauccuggcacugauaaggaccagaccaauauuuaugugcaagccagcggcagaguaaucguuucuacaaaaaggucccagcagacugugauuccaaacaucgggucacggcccuggguccgcggagugagcaguauaauuucuaucuacuggaccauugugaagccuggugacaucuugcugaucaacuccacaggcaaucuaauugcuccaagaggguauuucaaaauacagagcggaaagucgucuaucaugagguccgaugcccacauugacgagugcaacucagaauguaucaccccgaauggcaguauacccaacgauaagccuuuucaaaaugucaacaaaauuacguacggugcgugcccacgguauguuaagcagaauacucucaaacuggcaacagggaugcgcaacgugcccgagaagcagacccgaggaaucuucggcgccaucgcuggcuuuauugaaaaugggugggagggaaugguagacgguugguacggcuucagacaccaaaacagcgaggggacuggacaggccgcagaucuuaaauccacacaggcugccaucaaucagauuaccggcaagcugaacagggugauaaagaagacgaaugaaaaguuucaucaaaucgagaaagaguucucugaagucgaaggucggauucaggacuuggagaaguauguggaggauaccaaaaucgaccucuggagcuacaacgcggaacuguuaguugcccuggagaaucagcacacaaucgaucucacugacucagaaaugaguaaacuuuucgagcguacccgcagacagcugagggaaaacgcagaggauauggggaacggcuguuuuaaaauuuaccauaagugcgacaaugcuugcauaggauccauccggaacggcacauaugaccacgauauuuaccgaaaugaggccuugaacaaucgcuuccaaaucaagggggugcagcuaaaaagcggauauaaggacuggauucuguggaucucuuuugcuauaucauguuuccuccugugcgucgugcuucuggguuuuaucaugugggccugucagaaaggcaacauuagaugcaauaucuguauuuga

SEQ ID NO: 141984 - RNA, 1701 nt, Artificial Sequence
  derived and/or modified CDS sequence (opt3) from hemagglutinin__InfluenzaA__EPI642513
augaagaccaucauugccuucagcugcauacugugucucaucuuugcucagaaacuucccggcuccgacaagucuauggcaacacugugcuuggggcaccaugccgugccuaacggaacuuuagucaaaacgauuaccgaugaccaaaucgagguuacaaaugcgacugaacuggugcagucaaguagcaccuccagaauuuguaacucuccacaccagauccuagaugguaagaauugcacacucauagacgcucugcuuggcgauccgcauugugacgauuuccagaacaaaaagugggaccuguuuguagagaggucgaccgccuacucaaauugcuaucccuacuaugugccugauuacgcaacuuugcggagccucaucgccaguuccgggaaccuggaguucacacaagaaucuuuuaauuggaccggagucgcucaggacggcagcuccuaugcaugucgccgagguucagugaacaguuucuuuagccgucugaauuggcucuacaacuuaaauuauaaguacccagaacagaacguuacgaugcccaauaacgauaaauucgacaagcuguacauuuggggagugcaccauccugggacugauaaagaccagaccaaucuuuauguccaagccucuggcagagugaucguauccacaaagaggucacagcagacuguuauuccaaacaucggcagccggcccugggugcgcggggucaguucuauaauuuccaucuacuggaccauugugaaaccuggagacaucuugcugaucaacagcacagguaaucuaauugcuccaagaggcuauuuuaagauacagucggggaagucuuccaucaugaggucagaugcccacauugacgagugcaacagugaguguaucaccccgaauggaagcauacccaacgauaaaccuuuccaaaaugugaacaagauuacguacggcgcgugcccacgguaugucaaacagaauacucucaagcuggcaacagguaugcgcaacguucccgaaaaacagacccgagggaucuuuggagccaucgcuggcuucauugagaauggcugggaagggaugguggacggaugguacgguuuuagacaccaaaacuccgagggcacugggcaggccgcagaucuuaagucuacacaggcugccaucaaucagauuaccggaaaacugaacaggguaauaaagaagacgaaugagaaauuccaucaaaucgaaaaggaguucagcgaaguggagggccggauucaggacuuggaaaaauaugucgaggauaccaagaucgaccucuggucauacaacgcggagcuguuaguggcccuggaaaaucagcacacaaucgaucucacugacagugagauguccaaacuuuuugaacguacccgcagacagcugagggagaacgcagaagauauggguaacggguguuucaagauuuaccauaagugcgacaaugcuugcauaggcagcauccggaacggaacauaugaccacgauauuuaccgaaaugaggccuugaacaaucgcuuucaaaucaaaggcguucagcuaaagucuggguauaaagacuggauucuguggaucucauucgcuauaaguuguuuucuccugugcgugguccuucugggauucaucaugugggccugucagaaggguaacauuagaugcaauaucuguauuuga

SEQ ID NO: 141985 - RNA, 1701 nt, Artificial Sequence
  derived and/or modified CDS sequence (opt3) from hemagglutinin__InfluenzaA__EPI293965
augaagaccaucauugccuucagcugcauacugugucucaucuuugcucagaaacuucccggcuccgacaacucuauggcaacacugugcuuggggcaccaugccgugccuaauggaacuuuagucaagacgauuaccgaugaccaaaucgagguuacaaacgcgacugaacuggugcagucaaguagcaccgguagaauuuguaauuccccacaccagauccuagauggcaaaaacugcacacucauagacgcucugcuuggggauccgcauugugacgauuuccagaauaaggagugggaccuguuuguagaaaggucuaccgccuacucgaacugcuaucccuacuaugugccugauuacgcaacuuugcggucacucgucgccagcaguggaaaucuggaguucacacaagaauccuuuaacuggaccggcguggcucaggacgguucuagcuaugcaugucgccgaggguccguuaauucauucuuuagucgucugaacuggcucuacaauuuaaacuauaaauacccagagcagaaugugacgaugcccaacaaugauaaguucgacaagcuguacaucuggggaguccaccauccuggcacugauaaagaccagaccaaccuuuaugugcaagccagcggcagaguaauuguuucuacaaagaggucccagcagacugugaucccaaacauugggucacggcccuggguccgcggagugagcaguaucauaucuauuuacuggaccaucgugaaaccuggugacauuuugcugaucaauuccacaggcaaccuaaucgcuccaagaggguauuuuaagauucagagcggaaaaucgucuauaaugagguccgaugcccacaucgacgagugcaauucagaauguauuaccccgaacggcaguauccccaaugauaagccuuuccaaaacgucaauaagauaacguacggugcgugcccacgguauguuaaacagaacacucucaagcuggcaacagggaugcgcaaugugcccgagaaacagacccgaggaauuuuuggcgccaucgcuggcuucaucgaaaacgggugggagggaaugguagacgguugguacggcuuuagacaccaaaauagcgaggggacuggacaggccgcagaucuuaaguccacacaggcugccauuaaccagaucaccggcaaacugaauagggugauuaagaaaacgaacgaaaaguuccaucaaauagagaaggaguucucugaagucgaaggucggauccaggacuuggagaaauauguggaggauaccaagauugaccucuggagcuacaaugcggaacuguuaguugcccuggagaaccagcacacaaucgaucucacugacucagaaaugaguaaacuuuuugagcguacccgcagacagcugagggaaaacgcagaggauauggggaauggcuguuucaagaucuaccauaaaugcgacaacgcuugcauuggauccauacggaauggcacauaugaccacgauaucuaccgaaacgaggccuugaauaaccgcuuucaaauuaagggggugcagcuaaagagcggauauaaagacuggauccuguggauuucuuucgcuaucucauguuuucuccugugcgucgugcuucuggguuucauaaugugggccugucagaagggcaauaucagaugcaacauuuguaucuga

SEQ ID NO: 141986 - RNA, 1701 nt, Artificial Sequence
  derived and/or modified CDS sequence (opt3) from hemagglutinin__InfluenzaA__EPI465400
augaagaccaucauugccuucagcugcauacugugucucaucuuugcucagaaacuucccggcuccgacaacucuauggcaacacugugcuuggggcaccaugccgugccuaauggaacuuuagucaagacgauuaccgaugaccaaaucgagguuacaaacgcgacugaacuggugcagucaaguagcaccgguagaauuuguaauuccccacaccagauccuagauggcaaaaacugcacacucauagacgcucugcuuggggauccgcauugugacgauuuccagaauaaggagugggaccuguuuguagaaaggucuaccgccuacucgaacugcuaucccuacuaugugccugauuacgcaacuuugcggucacucgucgccagcaguggaaaucuggaguucacacaagaauccuuuaacuggaccggcguggcucaggacgguucuagcuaugcaugucgccgaggguccguuaauucauucuuuagucgucugaacuggcucuacaauuuaaacuauaaauacccagagcagaaugugacgaugcccaacaaugauaaguucgacaagcuguacaucuggggaguccaccauccuggcacugauaaagaccagaccaaacuuuaugugcaagccagcggcagaguaauuguuucuacaaagaggucccagcagacugugaucccaaacauugggucacggcccuggguccgcggagugagcaguaucauaucuauuuacuggaccaucgugaagccuggugacauuuugcugaucaacuccacaggcaaucuaaucgcuccaagaggguauuuuaaaauucagagcggaaagucgucuauaaugagguccgaugcccacaucgacgagugcaacucagaauguauuaccccgaauggcaguauccccaacgauaagccuuuccaaaaugucaacaaaauaacguacggugcgugcccacgguauguuaagcagaauacucucaaacuggcaacagggaugcgcaacgugcccgagaagcagacccgaggaauuuuuggcgccaucgcuggcuucaucgaaaaugggugggagggaaugguagacgguugguacggcuuuagacaccaaaacagcgaggggacuggacaggccgcagaucuuaaauccacacaggcugccauuaaucagaucaccggcaagcugaacagggugauuaaaaagacgaaugaaaaguuccaucaaauagagaaagaguucucugaagucgaaggucggauccaggacuuggagaaguauguggaggauaccaaaauugaccucuggagcuacaacgcggaacuguuaguugcccuggagaaucagcacacaaucgaucucacugacucagaaaugaguaaacuuuuugagcguacccgcagacagcugagggaaaacgcagaggauauggggaacggcuguuucaagaucuaccauaagugcgacaaugcuugcauuggauccauacggaacggcacauaugaccacgauaucuaccgaaaugaggccuugaacaaucgcuuucaaauuaagggggugcagcuaaaaagcggauauaaggacuggauccuguggauuucuuucgcuaucucauguuuucuccugugcgucgugcuucuggguuucauaaugugggccugucagaaaggcaacaucagaugcaauauuuguaucuga

SEQ ID NO: 141987 - RNA, 1701 nt, Artificial Sequence
  derived and/or modified CDS sequence (opt3) from hemagglutinin__InfluenzaA__EPI328898
augaagaccaucauugccuucagcugcauacugugucucaucuuugcucagaaacuucccggcuccgacaacucuauggcaacacugugcuuggggcaccaugccgugccuaauggaacuuuagucaagacgauuaccgaugaccaaaucgagguuacaaacgcgacugaacuggugcagucaaguagcaccgguagaauuuguaauuccccacaccagauccuagauggcaaaaacugcacacucauagacgcucugcuuggggauccgcauugugacgauuuccagaauaaggagugggaccuguuuguagaaaggucuaccgccuacucgaacugcuaucccuacuaugugccugauuacgcaacuuugcggucacucgucgccagcaguggaaaucuggaguucacacaagaauccuuuaacuggaccggcguggcucaggacgguucuagcuaugcaugucgccgaggguccguuaauucauucuuuagucgucugaacuggcucuacaauuuaaacuauaaauacccagagcagaaugugacgaugcccaacaaugauaaguucgacaagcuguacaucuggggaguccaccauccuggcacugauaaagaccagaccaagauuuaugugcaagccagcggcagaguaaucguuucuacaaaaaggucccagcagacugugauuccaaacaucgggucacggcccuggguccgcggagugagcaguauaauuucuaucuacuggaccauugugaagccuggugacauccuuuugaucaacuccacaggcaaucugauugcuccaagaggguauuuuaaaauacagagcggaaagucgucuaucaugagguccgaugcccacauugacgagugcaacucagaauguaucaccccgaauggcaguauacccaacgauaagccuuuccaaaaugucaacaaaauuacguacggugcgugcccacgguauguuaagcagaauacucuaaaacucgcaacagggaugcgcaacgugcccgagaagcagacccgaggaaucuuuggcgccaucgcuggcuucauugaaaaugggugggagggaaugguagacgguugguacggcuuuagacaccaaaacagcgaggggacuggacaggccgcagaucugaaauccacacaggcugccaucaaucagauuaccggcaaacuuaacagggugauaaagaagacgaaugaaaaguuccaucaaaucgagaaagaguucucugaagucgaaggucggauucaggaccuggagaaguauguggaggauaccaaaaucgacuuguggagcuacaacgcggaacuccugguugccuuagagaaucagcacacaaucgaucugacugacucagaaaugaguaagcucuuugagcguacccgcagacagcuuagggaaaacgcagaggauauggggaacggcuguuucaaaauuuaccauaagugcgacaaugcuugcauaggauccauccggaacggcacauaugaccacgauauuuaccgaaaugaggcccugaacaaucgcuuucaaaucaagggggugcaguugaaaagcggauauaaggacuggauucuauggaucucuuucgcuauaucauguuuucugcucugcgucgugcugcuugguuucaucaugugggccugucagaaaggcaacauuagaugcaauaucuguauuuga

SEQ ID NO: 141988 - RNA, 1701 nt, Artificial Sequence; identical to SEQ ID NO: 141987
  derived and/or modified CDS sequence (opt3) from hemagglutinin__InfluenzaA__EPI328900

SEQ ID NO: 141989 - RNA, 1701 nt, Artificial Sequence
  derived and/or modified CDS sequence (opt3) from hemagglutinin__InfluenzaA__EPI574644
augaagaccaucauugcccugagcuacauacucugccuuguguucgcucagaaacugcccggcaacgacaauuccacagcaacuuuguguuuagggcaccaugccgucccuaacggaacgaucguuaagaccauuacaaaugauagaaucgaggugacuaacgcgaccgaacugguacaaaauucuucaauuggugagaucugcgacaguccacaccagauacuagauggcaaaaacuguacacucaucgacgcucugcuuggggauccgcagugcgacggauuucagaauaagaggugggaucuguucguggaacggagcaaagccuauuccaacuguuaccccuaugacgucccugauuacgcaucuuugcgcucgcucguggccucaagcggcacccuggaguuuaaugacgaaaguuucaacugggcugguguuacucaaaaugggacauccucugcaugcauucgaggaagcaacuccucauuuuucagucgucugaauuggcucacccauagcaacuuuaaguauccagccuuaaaugugacgaugcccaacaacgagcaguucgauaagcuguacaucuggggcguccaccauccuggcacugacaaagaucagauuuuucuuuaugcucacucuuccgggagaaucaccgugucaacaaagaggagccagcaagccguaauaccaaauauuggaagucggccccgcaucagaaacauuccuucuaggaucuccaucuacuggacuauuguuaaaccaggugacauauugcugaucaauagcaccggcaaccuaauugcgccgcggggguacuucaagauccagucgggaaaaucuuccauaaugcgcucagacgcacccauuggcaaguguaagagugagugcaucacaccuaaugguagcaucccaaacgauaaacccuuucagaaugugaaccgaauuaccuauggggccuguccuagauacgucaagcaguccacgcucaaacuggcuacuggaaugaggaaugugccagaaaagcaaacacggggcaucuucggcgccauugcaggguuuauagagaacggaugggaagguaugaaagacggcugguauggguuccgucaccaaaauucugagggacgcggccaggcugccgaucuuaagagcacccaggcggccaucgaccagauuaacgguaaacugaauagauugaucgggaagacuaacgagaaguuccaucagaucgaaaaagaguuuucagaaguggagggcaggauucaggaucucgaaaaguacgucgaggacacaaaaauagaucuguggaguuauaaugcagaguuacugguugcucucgaaaaccaacacaccaucgaccuuacggauuccgagaugaacaagcuguucgagaaaaccaagaagcaguugcgggaaaaugccgaagacaugggaaacggcugcuuuaaaauuuaccauaagugugauaaugcuugcaucgggagcauucgaaacggaacauaugaccacgacguguaccgcgaugaggcccuaaauaacagauuccagaucaaagguguagagcugaagucuggcuacaaagacuggauacucuggaucucauuugcaauuaguugcuuccugcuuuguguggcccuguugggguuuaucaugugggcuugccagaagggaaauauuagguguaacaucugcauauga

SEQ ID NO: 141990 - RNA, 1701 nt, Artificial Sequence
  derived and/or modified CDS sequence (opt3) from hemagglutinin__InfluenzaA__EPI563212
augaagaccaucauugcccugagcuacauacucugccuuguguucgcucagaaaauccccggcaacgacaauaacacagcaacucuguguuuggggcaccaugccgucccuaauggaacgauuguuaagaccaucacaaacgauagaauugaggugacuaaugcgaccgaauuaguacaaaacuccucuaucggugagauaugcgacucaccacaccagauccuggauggcgaaaauuguacacuaauugacgcucuccugggggauccgcagugcgacggauuucagaacaaaaagugggaucuuuucguggagaggaguaaagccuauagcaauuguuaccccuaugacgucccugauuacgcaucccugcggucuuugguggccucgucaggcacccucgaauuuaacaaugagagcuucaacuggacugguguuacacaaaaugggaccaguuccgcuugcauccgccgaucuagcuccucauuuuucagucgucugaacuggcugacgcaucucaauuauaaguacccagcauuaaacgugacuaugcccaacaaugagcaguuugacaagcuguauauuuggggaguccaccauccuggcaccgauaaagaccagaucuucccauacgcccagagcucuggcagaauaacaguguccacuaagaggucacaacaggcuguaauucccaacaucgggagccggccucgcauuagaggaaucccaaguaggaucucuauuuacuggaccauaguuaaaccgggugauauccuuuugauuaauuccacaggcaaccugaucgcgccccggggguauuuuaagauacgcagcggaaaaucgucuauuaugcgauccgacgccccuaucggcaaguguaagucagaaugcaucaccccaaaugguaguauucccaacgacaaaccuuuccagaaugugaacagaaucacguacggggcauguccaagguaugucaagcacagcacucuaaaacucgccacaggaaugcggaaugugcccgagaagcagacccguggcauuuuuggcgcuauagccggguucaucgaaaacggaugggaggguaugguggauggcugguacggguuucgccaccaaaauuccgagggaagaggccaggcagcugaccugaaaucuacucaggccgcgauugaucaaaucaacgguaaacuuaauaggcugaucgggaaaacaaacgaaaaguuccaucagauugagaaggaguucagcgaagucgaaggccggauacaggacuuggagaaauauguugaggauaccaagaucgaccucuggucauacaaugccgaacuguuaguggcacuggagaaccagcacacgauugaucucaccgacagugaaaugaacaaacuuuuugagaagacaaagaagcaacugcgagaaaaugcugaggauaugggaaacggcugcuucaagaucuaucauaaaugugacaaugccugcauuggguccauccgcaacggaacuuacgaucacaauguauacagagacgaggcuuugaacaauagguuucagauaaaggguguggaacuaaaaagcggcuauaaggacuggauccuguggauuucuuucgccaucucaugcuuucuccugugugucgcacuucugggguucauuaugugggccugccagaaaggaaacauccgguguaauauaugcauuuga

SEQ ID NO: 141991 - RNA, 1701 nt, Artificial Sequence; identical to SEQ ID NO: 141990
  derived and/or modified CDS sequence (opt3) from hemagglutinin__InfluenzaA__EPI553999

SEQ ID NO: 141992 - RNA, 1701 nt, Artificial Sequence
  derived and/or modified CDS sequence (opt3) from hemagglutinin__InfluenzaA__EPI551570
augaagaccaucauugcccugagcuacauacucugccuuguguucgcucagaaaauccccggcaacgacaauaacacagcaacucuguguuuggggcaccaugccgucccuaauggaacgauuguuaagaccaucacaaacgauagaauugaggugacuaaugcgaccgaauuaguacaaaacuccucuaucggugagauaugcgacucaccacaccagauccuggauggcgaaaauuguacacuaauugacgcucuccugggggauccgcagugcgacggauuucagaacaaaaagugggaucuuuucguggagaggaguaaagccuauagcaauuguuaccccuaugacgucccugauuacgcaucccugcggucuuugguggccucgucaggcacccucgaauuuaacaaugagagcuucaacuggacugguguuacacaaaaugggaccaguuccgcuugcauccgccgaucuagcuccucauuuuucagucgucugaacuggcugacgcaucucaauuauacuuacccagcauuaaacgugaccaugcccaacaaugagcaguuugacaagcuguauauuuggggaguccaccauccuggcacagauaaggaccagaucuuccuuuacgcccagagcucuggcagaauaacuguguccaccaaaaggucacaacaggcuguaauuccaaacaucgggagccggccccgcauuagagauaucccuaguaggaucucuauuuacuggacaauaguuaagccaggagacaucuugcugauuaauuccaccgguaaccuaaucgccccgcggggcuauuuuaaaauacgcagcgggaagucgucuauuaugcgauccgacgcgcccaucggaaaauguaagucagaaugcaucacgccuaauggcaguauuccaaacgauaagcccuuccagaaugugaacagaaucacuuacggugcauguccuagguaugucaaacacagcacacucaagcuggccaccgggaugcggaaugugccagagaaacagacucguggaauuuuuggcgcuauagccggcuucaucgaaaacgggugggagggaaugguggacgguugguacggcuuucgccaccaaaauuccgaggggagaggacaggcagcugaucuuaagucuacacaggccgcgauugaccaaaucaacggcaaacugaauagguugaucgguaagaccaacgaaaaauuccaucagauugagaaggaguucagcgaagucgaagggcggauacaggaucucgagaaguauguugaggacacgaaaaucgaucuguggucauacaaugccgaauuacugguggcacucgagaaccagcacaccauugaccuuacagauagugaaaugaacaagcuguuugagaaaacuaagaaacaauugcgagaaaaugcugaggacaugggcaacggaugcuucaagaucuaucauaagugugauaaugccugcauuggcuccauccgcaacgggaccuacgaccacaauguauacagagacgaggcucuaaacaauagguuucagauaaaaggaguggaacucaagagcgguuauaaagauuggauccuguggauuucuuucgccaucucaugcuuucugcuuugugucgcacuguugggcuucauuaugugggccugccagaaggggaacauccgguguaauauaugcauuuga

SEQ ID NO: 141993 - RNA, 1701 nt, Artificial Sequence
  derived and/or modified CDS sequence (opt3) from hemagglutinin__InfluenzaA__EPI629738
augaagaccaucauugcccugagcuacauacucugccuuguguucgcucagaaaauccccggcaacgacaauaacacagcaacucuguguuuggggcaccaugccgucccuaauggaacgauuguuaagaccaucacaaacgauagaauugaggugacuaaugcgaccgaauuaguacaaaacuccucuaucggugagauaugcgacucaccacaccagauccuggauggcgaaaauuguacacuaauugacgcucuccugggggauccgcagugcgacggauuucagaacaaaaagugggaucuuuucguggagaggaguaaagccuauagcaauuguuaccccuaugacgucccugauuacgcaucccugcggucuuugguggccucgucaggcacccucgaauuuaacaaugagagcuucaacuggacugguguuacacaaaaugggaccaguuccgcuugcauccgccgaucuagcuccucauuuuucagucgucugaacuggcugacgcaucucaauuauaaguacccagcauuaaacgugacuaugcccaacaaugagcaguuugacaagcuguauauuuggggaguccaccauccuggcaccgauaaagaccagaucuucccauacgcccagagcucuggcagaauaauuguguccacaaagaggucacaacaggcuguaauccccaacauugggagccggccucgcaucagagauaucccaaguaggauuucuauauacuggacuaucguuaaaccgggagacauucuuuugaucaauuccaccgguaaccugauagcgccccggggcuauuuuaagauucgcagcgggaaaucgucuaucaugcgauccgacgccccuaucggaaaguguaagucagaaugcauuacaccaaauggcaguauccccaacgauaaaccuuuccagaaugugaacagaauuaccuacggugcauguccaagguaugucaagcacagcacgcuaaaacucgccacugggaugcggaaugugcccgagaagcagacacguggaauauuuggcgcuaucgccggcuucauugaaaacgggugggagggaaugguggacgguugguacggcuuucgccaccaaaauuccgaggggagaggacaggcagcugaucugaaaucuacccaggccgcgaucgaccaaaucaacggcaaacuuaauaggcugauugguaagacuaacgaaaaguuccaucagauagagaaggaguucagcgaagucgaagggcggauccaggauuuggagaaauauguugaggacacaaagauugaucucuggucauacaaugccgaacuguuaguggcacuggagaaccagcacaccaucgaccucacggauagugaaaugaacaaacuuuuugagaagaccaaaaagcaacugcgagaaaaugcugaggacaugggcaacggaugcuucaagauuuaucauaaaugugauaaugccugcaucggcuccauacgcaacgggacauacgaccacaauguauacagagacgaggcuuugaacaauagguuucagaucaagggaguggaacuaaaaagcgguuauaaggauuggauucuguggaucucuuucgccauuucaugcuuucuccugugugucgcacuucugggcuucaucaugugggccugccagaaagggaacauacgguguaauauuugcaucuga

SEQ ID NO: 141994 - RNA, 1701 nt, Artificial Sequence
  derived and/or modified CDS sequence (opt3) from hemagglutinin__InfluenzaA__EPI631887
augaagaccaucauugcccugagcuacauacucugccuuguguucgcucagaaaauccccggcaacgacaauaacacagcaacucuguguuuggggcaccaugccgucccuaauggaacgauuguuaagaccaucacaaacgauagaauugaggugacuaaugcgaccgaauuaguacaaaacuccucuaucggugagauaugcgacucaccacaccagauccuggauggcgaaaauuguacacuaauugacgcucuccugggggauccgcagugcgacggauuucagaacaaaaagugggaucuuuucguggagaggaguaaagccuauagcaauuguuaccccuaugacgucccugauuacgcaucccugcggucuuugguggccucgucaggcacccucgaauuuaacaaugagagcuucaacuggacugguguuacacaaaaugggaccaguuccgcuugcauccgccgaucuagcuccucauuuuucagucgucugaacuggcugacgcaucucaauuauaaguacccagcauuaaacgugacuaugcccaacaaugagcaguuugacaagcuguauauuuggggaguccaccauccuggcaccgauaaagaccagaucuucccauacgcccagagcucuggcagaauaauuguguccacaaagaggucacaacaggcuguaauccccaacauugggagccggccucgcaucagagauaguccaucuaggaucuccauuuacuggacuauaguuaaaccgggagacauccuuuugauuaauagcaccgguaaccugaucgcgccccggggcuauuuuaagauacgcucggggaaaucuuccauuaugcgaucagacgccccuaucggaaaguguaagagugaaugcaucacaccaaauggcagcauucccaacgauaaaccuuuccagaaugugaacagaaucaccuacggugcauguccaagguaugucaagcacuccacgcuaaaacucgccacugggaugcggaaugugcccgagaagcagacacguggaauuuuuggcgcuauagccggcuucaucgaaaacgggugggagggaaugguggacgguugguacggcuuucgccaccaaaauucugaggggagaggacaggcagcugaucugaaaagcacccaggccgcgauugaccaaaucaacggcaaacuuaauaggcugaucgguaagacuaacgaaaaguuccaucagauugagaaggaguucucagaagucgaagggcggauacaggauuuggagaaauauguugaggacacaaagaucgaucucuggaguuacaaugccgaacuguuaguggcacuggagaaccagcacaccauugaccucacggauuccgaaaugaacaaacuuuuugagaagaccaaaaagcaacugcgagaaaaugcugaggacaugggcaacggaugcuucaagaucuaucauaaaugugauaaugccugcauuggcagcauccgcaacgggacauacgaccacaauguauacagagacgaggcuuugaacaauagguuucagauaaagggaguggaacuaaaaucugguuauaaggauuggauccuguggauuucauucgccaucaguugcuuucuccugugugucgcacuucugggcuucauuaugugggccugccagaaagggaacauccgguguaauauaugcauuuga

SEQ ID NO: 141995 - RNA, 1701 nt, Artificial Sequence
  derived and/or modified CDS sequence (opt3) from hemagglutinin__InfluenzaA__EPI577026
augaagaccaucauugcccugagcuacauacucugccuuguguucgcucagaaaauccccggcaacgacaauaacacagcaacucuguguuuggggcaccaugccgucccuaauggaacgauuguuaagaccaucacaaacgauagaauugaggugacuaaugcgaccgaauuaguacaaaacuccucuaucggugagauaugcgacucaccacaccagauccuggauggcgaaaauuguacacuaauugacgcucuccugggggauccgcagugcgacggauuucagaacaaaaagugggaucuuuucguggagaggaguaaagccuauagcaauuguuaccccuaugacgucccugauuacgcaucccugcggucuuugguggccucgucaggcacccucgaauuuaacaaugagagcuucaacuggacugguguuacacaaaaugggaccaguuccgcuugcauccgccgaucuagcuccucauuuuucagucgucugaacuggcugacgcaucucaauuauaaguacccagcauuaaacgugacuaugcccaacaaugagcaguuugacaagcuguauauuuggggaguccaccauccuggcaccgauaaagaccagaucuucccauacgcccagagcucuggcagaauaacaguguccacuaagaggucacaacaggcuguaauucccaacaucgggagccggccucgcauuagaggaaucccaaguaggaucucuauuuacuggaccauaguuaaaccgggugauauccuuuugauuaauuccacaggcaaccugaucgcuccccggggguauuuuaagauacgcagcggaaaaucgucuauuaugcgauccgacgcgccuaucggcaaguguaagucagaaugcaucaccccaaaugguaguauucccaacgacaaaccuuuccagaaugugaacagaaucacguacggggcauguccaagguaugucaagcacagcacucuaaaacucgccacaggaaugcggaaugugcccgagaagcagacccguggcauuuuuggcgcuauagccggguucaucgaaaacggaugggaggguaugguggauggcugguacggguuucgccaccaaaauuccgagggaagaggccaggcagcugaccugaaaucuacucaggccgcgauugaucaaaucaacgguaaacuuaauaggcugaucgggaaaacaaacgaaaaguuccaucagauugagaaggaguucagcgaagucgaaggccggauacaggacuuggagaaauauguugaggauaccaagaucgaccucuggucauacaaugccgaacuguuaguggcacuggagaaccagcacacgauugaucucaccgacagugaaaugaacaaacuuuuugagaagacaaagaagcaacugcgagaaaaugcugaggauaugggaaacggcugcuucaagaucuaucauaaaugugacaaugccugcauugaguccauccgcaacgggacuuacgaucacaauguauacagagacgaagccuugaacaauagguuucagauaaagggaguggagcuaaaaagcgguuauaaggacuggauccuguggauuucuuucgccaucucaugcuuucuccugugugucgcacuucugggcuucauuaugugggccugccagaaagggaacauccgguguaauauaugcauuuga

SEQ ID NO: 141996 - RNA, 1701 nt, Artificial Sequence; identical to SEQ ID NO: 138042
  derived and/or modified CDS sequence (opt3) from hemagglutinin__InfluenzaA__EPI404927

SEQ ID NO: 141997 - RNA, 1701 nt, Artificial Sequence
  derived and/or modified CDS sequence (opt3) from hemagglutinin__InfluenzaA__EPI489319
augaagaccaucauugcccugagcuacauacucugccuuguguucgcucagaaacugcccggcaacgacaauuccacagcaacuuuguguuuagggcaccaugccgucccuaacggaacgaucguuaagaccauuacaaaugauagaaucgaggugacuaacgcgaccgaacugguacaaaauucuucaauuggugagaucugcgacaguccacaccagauacuagauggcgaaaacuguacacucaucgacgcucugcuuggggauccgcagugcgacggauuucagaauaaaaagugggaucuguucguggagaggagcaaagccuauuccaacuguuaccccuaugacgucccugauuacgcaucuuugcggucgcucguggccucaagcggcacccuggaauuuaauaacgagaguuucaauugggcugguguuacucaaaacgggacauccucugcaugcaagcgcggaagcaauuccucauuuuucagucgacugaacuggcucacccauuuaaauuuuaaguauccagcccugaacgugacgaugcccaacaaugagcaguucgacaaacuuuacauuuggggcguccaccauccuggcacugauaaggaccagaucuuuccauaugcucagagcucugggcguauuaccguguccacaaaaagaucacaacaggccguaauccccaacauaggaagcaggccucggauucgcaauaucccaaguagaauuucuaucuacuggacuaucguuaagccgggugauauuuugcugauaaacuccaccggcaaucuaaucgcgcccaggggguacuucaaaauucggagcggaaagucgucuaucaugcgcuccgacgcaccuauaggcaaguguaaaucagaaugcauuacaccaaacgguaguauccccaaugacaagccuuuucagaacgugaaucgaaucaccuauggggccuguccaagauacgucaaacagagcacgcucaagcuggcuacuggaaugaggaacgugcccgagaaacaaacacggggcauuuucggcgccaucgcaggguuuauugaaaauggaugggaggguaugguggauggcugguauggguuccgucaccagaacuccgagggacgcggccaggcugccgaccuuaagucuacccaagcggccauagaucagaucaaugguaaacugaacagauugauugggaagacuaaugaaaaguuccaccagaucgagaaagaauuuagcgaggucgaaggcaggauccaggaccucgagaaguacguugaggauacaaaaauugaccuguggucauauaacgcagaauuacugguggcucucgagaaccaacauaccauagaucuuacggacagugaaaugaauaagcuguucgagaaaaccaagaagcaguugcgggaaaacgccgaggauaugggaaauggcugcuuuaaaaucuaccacaagugugacaacgcuugcauuggguccauccgaaauggaacauaugaucaugacguauaccgcgacgaggcccuaaacaauagauuccagauuaaagguguggaacucaagagcggcuacaaagauuggauccuguggauaucuuuugcaaucucaugcuuccugcuuugugucgcccuguugggguuuauuaugugggcuugccagaagggaaacaucagguguaauauuugcaucuga

SEQ ID NO: 141998 - RNA, 1701 nt, Artificial Sequence; identical to SEQ ID NO: 140475
  derived and/or modified CDS sequence (opt3) from hemagglutinin__InfluenzaA__EPI530647

SEQ ID NO: 141999 - RNA, 1701 nt, Artificial Sequence; identical to SEQ ID NO: 140489
  derived and/or modified CDS sequence (opt3) from hemagglutinin__InfluenzaA__EPI541083

SEQ ID NO: 142000 - RNA, 1701 nt, Artificial Sequence
  derived and/or modified CDS sequence (opt3) from hemagglutinin__InfluenzaA__EPI684315
augaagaccaucauugcccugagcuacauacucugccuuguguucgcucagaaaauccccggcaacgacaauuccacagcaacucuguguuuggggcaccaugccgucccuaacggaacgauuguuaagaccaucacaaaugauagaauugaggugacuaacgcgaccgaauuaguacaaaauucuucaaucggugagauaugcgacaguccacaccagauccuggauggcgaaaacuguacacuaauugacgcucuccugggggauccgcagugcgacggauuucagaauaaaaagugggaucuuuucguggagaggagcaaagccuauuccaacuguuaccccuaugacgucccugauuacgcaucucugcggucguugguggccucaagcggcacccucgaauuuaauaacgagaguuucaauuggacugguguuacacaaaacgggaccuccucugcuugcauccgccgaagcuccucaaguuucuucagccgucugaauuggcugacgcaucucaacuauaaguacccagcauuaaaugugacuaugcccaacaacgagcaguuugacaagcuguauauuuggggaguccaccauccuggcaccgauaaagaccagaucuucccauacgcccagucuuccggcagaauaauugugucaacaaagaggagccaacaggcuguaauccccaauauugggagucggccucgcaucagagauaucccaucuaggauuuccauauacuggacuaucguuaaaccgggagacauucuuuugaucaacagcaccgguaaucugauagcgccccggggcuauuuuaagauucgcucggggaaaucuuccaucaugcgaucagacgccccuaucggaaaguguaagagugaaugcauuacaccaaacggcagcauccccaaugauaaaccuuuccagaacgugaauagaauuaccuacggugcauguccaagguaugucaagcacuccacgcuaaaacucgccacugggaugcggaacgugcccgagaagcagacacguggaauauuuggcgcuaucgccggcuucauugaaaaugggugggagggaaugguggacgguugguacggcuuucgccaccaaaacucugaggggagaggacaggcagcugaucugaaaagcacccaggccgcgaucgaccaaaucaauggcaaacuuaacaggcugauugguaagacuaaugaaaaguuccaucagauagagaaggaauuuucagaggucgaagggcggauccaggauuuggagaaauauguugaggacacaaagauugaucucuggaguuacaacgccgaacuguuaguggcacuggagaaucagcacaccaucgaccucacggauuccgaaaugaacaaacuuuuugagaagaccaaaaagcaacugcgagaaaacgcugaggacaugggcaauggaugcuucaagauuuaucauaaaugugauaacgccugcaucggcagcauacgcaaugggacauacgaccacaacguauacagagacgaggcuuugaauaacagguuucagaucaagggaguggaacuaaaaucugguuauaaggauuggauucuguggaucucauucgccauuaguugcuuucuccugugugucgcacuucugggcuucaucaugugggccugccagaaagggaauauacgguguaacauuugcaucuga

SEQ ID NO: 142001 - RNA, 1701 nt, Artificial Sequence
  derived and/or modified CDS sequence (opt3) from hemagglutinin__InfluenzaA__EPI614462
augaagaccaucauugcccugagcuacauacucugccuuguguucgcucagaaacugcccggcaacgacaauuccacagcaacuuuguguuuagggcaccaugccgucccuaacggaacgaucguuaagaccauuacaaaugauagaaucgaggugacuaacgcgaccgaacugguacaaaauucuucaauuggugagaucugcgacaguccacaccagauacuagauggcgaaaacuguacacucaucgacgcucugcuuggggauccgcagugcgacggauuucagaauaaaaagugggaucuguucguggagaggagcaaagccuauuccaacuguuaccccuaugacgucccugauuacgcaucuuugcggucgcucguggccucaagcggcacccuggaauuuaauaacgagaguuucaauugggcugguguuacucaaaacgggacauccucuagcugcauucgcggauccaauucaaguuucuucagccgacugaacuggcucacccauuuaaauucuaaguauccagcacugaacgugacgaugcccaacaaugagcaguuugacaaacuuuacaucuggggcguccaccauccuggcacugauaaggaccagauuuucuuguaugcccaguccucagggcguaucaccgugagcacaagaaggagucaacaggcuguaauaccaaacauuggaucucggccccgcaucagagauauuccuuccaggaucagcaucuacuggacuauuguuaagccaggugacauacugcuaaucaauucgaccggcaaccucauugccccgcggggguacuuuaaaauccgcucuggaaaguccucaauaaugcgaagugacgcgcccauuggcaaauguaagagcgaaugcaucacaccuaaugguuccaucccaaacgauaagcccuuccagaaugugaacagaauuaccuauggggcauguccuagguacgucaaacagucuacgcugaaacuugccacuggaaugcggaaugugccagagcgucaaacacgcggcaucuuuggcgcuauugccggguucauagaaaacggaugggaggguaugguggacggcugguauggguuuagacaccagaauagcgagggaaggggccaggcagcugaucugaagucaacccaagccgcgaucgaccagauuaacgguaaguugaaucggcucaucgggaaaacuaacgaaaaguuccaccagaucgagaaagaauuuagugaggucgaaggccgcauucaggaucuggagaaguacguugaggacacaaagauagauuuaugguccuauaaugccgaacugcucguggcacuugagaaccaacauaccaucgaccugacggauagcgaaaugaacaaauuguuugagaagaccaaaaagcagcuacgagaaaaugcugaggacaugggaaacggcugcuucaaaauuuaccacaagugugauaaugccugcaucgggucuauuagaaacggaacauaugaccaugacguauacagggaugaggcucugaauaaccgguuucagaucaaggguguggaacucaaaucaggcuacaaggacuggauacuguggaucaguuucgccauuagcugcuuucuucugugugucgcauugcucggguucaucaugugggccugccagaaaggaaauauucgcuguaacaucugcauauga

SEQ ID NO: 142002 - RNA, 1701 nt, Artificial Sequence
  derived and/or modified CDS sequence (opt3) from hemagglutinin__InfluenzaA__EPI541465
augaagaccaucauugcccugagcuacauacucugccuuguguucgcucagaaacugcccggcaacgacaauuccacagcaacuuuguguuuagggcaccaugccgucccuaacggaacgaucguuaagaccauuacaaaugauagaaucgaggugacuaacgcgaccgaacugguacaaaauucuucaauuggugagaucugcgacaguccacaccagauacuagauggcgaaaacuguacacucaucgacgcucugcuuggggauccgcagugcgacggauuucagaauaaaaagugggaucuguucguggagaggagcaaagccuauuccaacuguuaccccuaugacgucccugauuacgcaucuuugcggucgcucguggccucaagcggcacccuggaauuuaauaacgagaguuucaauugggcugguguuacucaaaacgggacauccucuagcugcauucgcggauccaauaacucauuuuucagucgacugaauuggcucacccauuuaaacagcaaguauccagcacugaacgugacgaugcccaauaacgagcaguuugacaaacuuuacaucuggggcguccaccauccuggcacugauaaggaccagauuuucuuguaugcccagucuuccgggcguaucaccgugucaacaagaaggagccaacaggcuguaauaccaaauauuggaagucggccccgcaucagagguauuccuucuaggaucuccaucuacuggacuauuguuaagccaggcgauauacugcuaaucaacagcaccgggaaucucauugccccgcggggauacuuuaaaauccgcucgggcaagucuuccauaaugcgaucagacgcgcccauugguaaauguaagagugaaugcaucacaccuaacgggagcaucccaaaugacaagcccuuccagaacgugaauagaauuaccuauggagcauguccuagguacgucaaacaguccacgcugaagcuggccacuggcaugcggaacgugccagagcgucaaacacgcggcaucuuuggggcuauugccggauucauagaaaaugguugggagggcaugguggaugggugguauggauuuagacaccagaacucugagggcaggggucaggcagcugaccuuaaaagcacccaagccgcgaucgaucagauuaaugggaaguugaaccggcucaucggcaaaacuaaugaaaaguuccaccagaucgagaaagaguucucagaagucgaaggacgcauucaggaccuggagaaguacguugaggauacaaagauagacuuauggaguuauaacgccgaacugcucguggcacuugagaaccaacauaccaucgaucugacggacuccgaaaugaauaaauuguuugagaagaccaaaaagcagcuacgagaaaacgcugaggauaugggcaaugggugcuucaaaauuuaccacaagugugacaacgccugcaucggaagcauuagaaaugguacauaugaucaugacguauacagggacgaggcucugaacaaucgguuucagaucaagggcguggaacucaaaucuggguacaaggauuggauacuguggaucucauucgccauuaguugcuuucuucugugugucgcauugcucggauucaucaugugggccugccagaaaggcaacauucgcuguaauaucugcauauga

SEQ ID NO: 142003 - RNA, 1701 nt, Artificial Sequence
  derived and/or modified CDS sequence (opt3) from hemagglutinin__InfluenzaA__EPI696967
augaagaccaucauugcccugagcuacauacucugccuuguguucgcucagaaacugcccggcaacgacaauuccacagcaacuuuguguuuagggcaccaugccgucccuaacggaacgaucguuaagaccauuacaaaugauagaaucgaggugacuaacgcgaccgaacugguacaaaauucuucaauuggugagaucugcgacaguccacaccagauacuagauggcgaaaacuguacacucaucgacgcucugcuuggggauccgcagugcgacggauuucagaauaaaaagugggaucuguucguggagaggagcaaagccuauuccaacuguuaccccuaugacgucccugauuacgcaucuuugcggucgcucguggccucaagcggcacccuggaauuuaauaacgagaguuucaauugggcugguguuacucaaaacgggacauccucuagcugcauucgcggauccaauucaaguuucuuuagccgacugaacuggcucacccguuuaaauucuaaguauccagcacugaacgugacgaugcccaacaaugagcaguuugacaaacuuuacaucuggggcguccaucacccugaaacugauaaggaccagauuuucuuguaugcccaguccucaggcagaaucaccgugagcacaaggcggagucaacaggcuguaauaccaaacauugggucucgccccagaaucagggguauuccuucccggaucagcaucuacuggacuauuguuaagccaggagauauacugcuaaucaauucgaccggcaaccucauugccccgcgcggguacuuuaaaauccgaucuggaaaguccucaauaaugagaagugacgcgcccauuggcaaauguaagagcgagugcaucacaccuaaugguuccaucccaaacgacaagcccuuccagaaugugaacaggauuaccuauggggcauguccucgguacgucaaacagucuacgcugaaacuugccacuggaaugcguaaugugccagaacgccaaacaagaggcaucuuuggcgcuauugccggguucauagagaacggaugggaggguaugguggauggcugguauggguuuaggcaucagaauagcgaaggacggggccaggcagcugaccugaagucaacccaagccgcgaucgaucagauuaacgguaaguugaaucgacucaucgggaaaacuaacgagaaguuccaccagaucgaaaaagaguucagugaagucgagggccgcauucaggaccuggagaaguacguugaagauacaaagauagacuuaugguccuauaaugccgagcugcucguggcacuugaaaaccaacacaccaucgaucugacggacagcgagaugaacaaauuguuugaaaagaccaaaaagcagcuaagagagaaugcugaggauaugggaaacggcugcuucaaaauuuaccauaagugugacaaugccugcaucgggucuauuaggaacggaacauaugaucacgacguauaccgggacgaagcucugaauaaccgcuuucagaucaaggguguggagcucaaaucaggcuacaaggauuggauacuguggaucaguuucgccauuagcugcuuucuucugugugucgcauugcucggguucaucaugugggccugccagaaaggaaauauuagauguaacaucugcauauga

SEQ ID NO: 142004 - RNA, 1701 nt, Artificial Sequence
  derived and/or modified CDS sequence (opt3) from hemagglutinin__InfluenzaA__EPI674597
augaagaccaucauugcccugagcuacauacucugccuuguguucgcucagaaacugcccggcaacgacaauuccacagcaacuuuguguuuagggcaccaugccgucccuaacggaacgaucguuaagaccauuacaaaugauagaaucgaggugacuaacgcgaccgaacugguacaaaauucuucaauuggugagaucugcgacaguccacaccagauacuagauggcgaaaacuguacacucaucgacgcucugcuuggggauccgcagugcgacggauuucagaauaaaaagugggaucuguucguggagaggagcaaagccuauuccaacuguuaccccuaugacgucccugauuacgcaucuuugcggucgcucguggccucaagcggcacccuggaauuuaauaacgagaguuucaauugggcugguguuacucaaaacgggacauccucuagcugcauucgcggauccaauaacucauuuuucagucgacugaauuggcucacccauuuaaacagcaaguauccagcacugaacgugacgaugcccaauaacgagcaguuugacaaacuuuacaucuggggcguccaccauccugugacugauaaggaccagauuuucuuguaugcccagucuuccggccguaucaccguaucaacaagaaggagccaacaggcuguuauaccaaauauugggagucggccccgcaucagagguauuccuucuaggaucuccaucuacuggacuauugugaagccaggagauauacugcuaaucaacagcaccggcaaucucauugccccgcggggguacuuuaaaauccgcucgggaaagucuuccauaaugcgaucagacgcgcccauuggcaaauguaagagugaaugcaucacaccuaacgguagcaucccaaaugacaagcccuuccagaacgucaauagaauuaccuauggggcauguccuagguacgugaaacaguccacgcugaagcuggccacuggaaugcggaacgugccagagcgucaaacacgcggcaucuuuggcgcuauugccggguucauagaaaauggaugggaggguauggucgauggcugguauggguuuagacaccagaacucugagggaaggggccaggcagcugaccuuaaaagcacccaagccgcgaucgaucagauuaaugguaaguugaaccggcucaucgggaaaacuaaugaaaaguuccaccagaucgagaaagaguucucagaaguugaaggccgcauucaggaccuggagaaguacguggaggauacaaagauagacuuauggaguuauaacgccgaacugcucguagcacuugagaaccaacauaccaucgaucugacggacuccgaaaugaauaaauuguuugagaagaccaaaaagcagcuacgagaaaacgcugaggauaugggaaauggcugcuucaaaauuuaccacaagugugacaacgccugcaucgggagcauuagaaauggaacauaugaucaugacguguacagggacgaggcucugaacaaucgguuucagaucaagggugucgaacucaaaucuggcuacaaggauuggauacuguggaucucauucgccauuaguugcuuucuucuguguguggcauugcucggguucaucaugugggccugccagaaaggaaacauucgcuguaauaucugcauauga

SEQ ID NO: 142005 - RNA, 1701 nt, Artificial Sequence
  derived and/or modified CDS sequence (opt3) from hemagglutinin__InfluenzaA__EPI530677
augaagaccaucauugcccugagcuacauacucugccuuguguucgcucagaaacugcccggcaacgacaauuccacagcaacuuuguguuuagggcaccaugccgucccuaacggaacgaucguuaagaccauuacaaaugauagaaucgaggugacuaacgcgaccgaacugguacaaaauucuucaauuggugagaucugcgacaguccacaccagauacuagauggcgaaaacuguacacucaucgacgcucugcuuggggauccgcagugcgacggauuucagaauaaaaagugggaucuguucguggagaggagcaaagccuauuccaacuguuaccccuaugacgucccugauuacgcaucuuugcggucgcucguggccucaagcggcacccuggaauuuaauaacgagaguuucaauugggcugguguuacucaaaacgggacauccucuagcugcauucgcggauccaauucaaguuucuucagccgacugaacuggcucacccauuuaaauucuaaguauccagcacugaacgugacgaugcccaacaaugagcaguuugacaaacuuuacaucuggggcguccaccauccuggcacugauaaggaccagauuuucuuguaugcccaguccucagggcguaucaccgugagcacaaagagaagucaacaggcuguaauaccaaacauuggaucuaggccccggauccgcgauauuccuuccagaaucagcaucuacuggacuauuguuaaaccaggugacauacugcuaaucaauucgaccggcaaccucauugccccgaggggguacuuuaagauccggucuggaaaauccucaauaaugcgcagugacgcgcccauuggcaaguguaagagcgaaugcaucacaccuaaugguuccaucccaaacgauaaacccuuccagaaugugaaccgaauuaccuauggggcauguccuagauacgucaagcagucuacgcugaaacuugccacuggaaugaggaaugugccagagaagcaaacacggggcaucuuuggcgcuauugccggguucauagaaaacggaugggaggguaugguggacggcugguauggguuucgucaccagaauagcgagggacgcggccaggcagcugaucugaaaucaacccaagccgcgaucgaccagauuaacgguaaguugaauagacucaucgggaaaacuaacgaaaaguuccaccagaucgagaaggaauuuagugaggucgaaggcaggauucaggaucuggagaaauacguugaggacacaaagauagauuuaugguccuauaaugccgaacugcucguggcacuugagaaccaacauaccaucgaccugacggauagcgaaaugaacaaauuguuugagaagaccaaaaagcagcuacgggaaaaugcugaggacaugggaaacggcugcuucaagauuuaccacaaaugugauaaugccugcaucgggucuauucgaaacggaacauaugaccaugacguauaccgcgaugaggcucugaauaacagauuucagaucaaggguguggaacucaaaucaggcuacaaggacuggauacuguggaucaguuucgccauuagcugcuuucuucugugugucgcauugcucggguucaucaugugggccugccagaaaggaaauauuagguguaacaucugcauauga

SEQ ID NO: 142006 - RNA, 1701 nt, Artificial Sequence
  derived and/or modified CDS sequence (opt3) from hemagglutinin__InfluenzaA__EPI530679
augaagaccaucauugcccugagcuacauacucugccuuguguucgcucagaaacugcccggcaacgacaauuccacagcaacuuuguguuuagggcaccaugccgucccuaacggaacgaucguuaagaccauuacaaaugauagaaucgaggugacuaacgcgaccgaacugguacaaaauucuucaauuggugagaucugcgacaguccacaccagauacuagauggcgaaaacuguacacucaucgacgcucugcuuggggauccgcagugcgacggauuucagaauaaaaagugggaucuguucguggagaggagcaaagccuauuccaacuguuaccccuaugacgucccugauuacgcaucuuugcggucgcucguggccucaagcggcacccuggaauuuaauaacgagaguuucaauugggcugguguuacucaaaacgggacauccucuagcugcauucgcggauccaauucaaguuucuuuagccgacugaacuggcucacccauuuaaauuuuaaguauccagcacugaacgugacgaugcccaacaaugagcaguucgacaaguuguacaucuggggcguccaccauccuggcacugauaaagaccagauuuuucuuuaugcccagucuuccgggcguaucaccgugucaacaaagagaagccaacaggcuguaauaccaaacauuggaaguaggccccggauccgcgauauuccuucuagaaucuccaucuacuggacuauuguuaaaccaggugacauacugcuaaucaauagcaccggcaaccucauugccccgaggggguacuucaagauccggucgggaaaaucuuccauaaugcgcucagacgcgcccauuggcaaguguaagagugaaugcaucacaccuaaugguagcaucccaaacgauaaacccuuucagaaugugaaccgaauuaccuauggggcauguccuagauacgucaagcaguccacgcugaaacuugccacuggaaugaggaaugugccagagaagcaaacacggggcaucuucggcgcuauugccggguuuauagaaaacggaugggaggguaugguggacggcugguauggguuccgucaccaaaauucugagggacgcggccaggcagcugaucugaaaagcacccaggccgcgaucgaccagauuaacgguaaguugaauagacucaucgggaaaacuaacgaaaaguuccaccagaucgagaaggaauuuucagaggucgaaggcaggauucaggaucuggagaaauacguugaggacacaaagauagauuuauggaguuauaaugccgaacugcucguggcacuugagaaccaacauaccaucgaccugacggauuccgaaaugaacaaauuguucgagaagaccaaaaagcagcuacgggaaaaugcugaggacaugggaaacggcugcuuuaagauuuaccacaaaugugauaaugccugcaucgggagcauucgaaacggaacauaugaccaugacguauaccgcgaugaggcucugaauaacagauuccagaucaaggguguggaacucaaaucuggcuacaaggacuggauacuguggaucucauuugccauuaguugcuuccuucugugugucgcauugcucggguuuaucaugugggccugccagaaaggaaauauuagguguaacaucugcauauga

SEQ ID NO: 142007 - RNA, 1701 nt, Artificial Sequence; identical to SEQ ID NO: 128070
  derived and/or modified CDS sequence (opt3) from hemagglutinin__InfluenzaA__AAG01785

SEQ ID NO: 142008 - RNA, 1701 nt, Artificial Sequence; identical to SEQ ID NO: 140475
  derived and/or modified CDS sequence (opt3) from hemagglutinin__InfluenzaA__EPI814528

SEQ ID NO: 142009 - RNA, 1701 nt, Artificial Sequence
  derived and/or modified CDS sequence (opt3) from hemagglutinin__InfluenzaA__EPI674736
augaagaccaucauugcccugagcuacauacucugccuuguguucgcucagaaacugcccggcaacgacaauuccacagcaacuuuguguuuagggcaccaugccgucccuaacggaacgaucguuaagaccauuacaaaugauagaaucgaggugacuaacgcgaccgaacugguacaaaauucuucaauuggugagaucugcgacaguccacaccagauacuagauggcgaaaacuguacacucaucgacgcucugcuuggggauccgcagugcgacggauuucagaauaaaaagugggaucuguucguggagaggagcaaagccuauuccaacuguuaccccuaugacgucccugauuacgcaucuuugcggucgcucguggccucaagcggcacccuggaauuuaauaacgagaguuucaauugggcugguguuacucaaaacgggacauccucuagcugccgccgaggauccaauucaaguuucuucagccgucugaacuggcucacccauuuaaauucuaaguauccagcacugaacgugacgaugcccaacaaugagcaguuugacaaacuuuacauuuggggcguccaccauccugugacugauaaggaccagaucuucuuguaugcccaguccucaggcagaauuaccguaagcacaaagaggagucaacaggcuguuaucccaaacauagggucucggccccgcauuagagauaucccuuccaggauuagcaucuacuggacuaucgugaaaccaggagacauucugcuaauaaauucgaccgguaaccucaucgccccgcggggcuacuuuaagauucgcucugggaaauccucaaucaugcgaagugacgcgcccauaggaaaguguaagagcgaaugcauuacaccuaauggcuccaucccaaacgauaaacccuuccagaaugucaacagaaucaccuauggugcauguccuagguacgugaagcagucuacgcugaaacuugccacugggaugcggaaugugccagagcgucaaacacgcggaauuuuuggcgcuaucgccggcuucauugaaaacgggugggagggaauggucgacgguugguauggcuuuagacaccagaauagcgaggggaggggacaggcagcugaucugaagucaacccaagccgcgauagaccagaucaacggcaaauugaaucggcucauugguaagacuaacgaaaaauuccaccagaucgagaaggaauuuagugagguugaagggcgaauccaggaucuggagaaguacguggaggacacaaaaauugauuuaugguccuauaaugccgaacugcucguagcacuugagaaccaacauaccauagaccugacggauagcgaaaugaacaaguuguuugagaaaaccaagaaacagcuacgcgaaaaugcugaggacaugggcaacggaugcuucaagaucuaccacaagugugauaaugccugcauuggcucuaucagaaacgggacauaugaccaugacguguacagggaugaggcucugaauaaccgguuucagauuaaaggagucgaacucaagucagguuacaaagacuggauccuguggauaaguuucgccaucagcugcuuucuucuguguguggcauugcucggcuucauuaugugggccugccagaaggggaauauccgcuguaacauuugcaucuga

SEQ ID NO: 142010 - RNA, 1701 nt, Artificial Sequence; identical to SEQ ID NO: 140475
  derived and/or modified CDS sequence (opt3) from hemagglutinin__InfluenzaA__EPI614444

SEQ ID NO: 142011 - RNA, 1701 nt, Artificial Sequence
  derived and/or modified CDS sequence (opt3) from hemagglutinin__InfluenzaA__EPI551814
augaagaccaucauugcccugagcuacauacucugccuuguguucgcucagaaacugcccggcaacgacaauuccacagcaacuuuguguuuagggcaccaugccgucccuaacggaacgaucguuaagaccauuacaaaugauagaaucgaggugacuaacgcgaccgaacugguacaaaauucuucaauuggugagaucugcgacaguccacaccagauacuagauggcgaaaacuguacacucaucgacgcucugcuuggggauccgcagugcgacggauuucagaauaaaaagugggaucuguucguggagaggagcaaagccuauuccaacuguuaccccuaugacgucccugauuacgcaucuuugcggucgcucguggccucaagcggcacccuggaauuuaauaacgagaguuucaauugggcugguguuacucaaaacgggacauccucuagcugccgccgaggauccaauucaaguuucuucagccgucugaacuggcucaccagauuaaauucuaaguauccagcacugaacgugacgaugcccaacaaugagcaguuugacaaacuuuacauuuggggcguccaucacccugugacugauaaggaccagaucuucuuguaugcccaguccucaggcaggauuaccguaagcacaaagcggagucaacaggcuguuaucccaaacauagggucucgccccagaauuagggauaucccuucccggauuagcaucuacuggacuaucgugaaaccaggagacauucugcuaauaaauucgaccgguaaccucaucgccccgcgcggcuacuuuaagauucgaucugggaaauccucaaucaugagaagugacgcgcccauaggaaaguguaagagcgaaugcauuacaccuaauggcuccaucccaaacgauaaacccuuccagaaugucaacaggaucaccuauggugcauguccucgguacgugaagcagucuacgcugaaacuugccacugggaugcguaaugugccagagcgccaaacaagaggaauuuuuggcgcuaucgccggcuucauugaaaacgggugggagggaauggucgacgguugguauggcuuuaggcaucagaauagcgaggggcggggacaggcagcugaucugaagucaacccaagccgcgauagaccagaucaacggcaaauugaaucgacucauugguaagacuaacgaaaaauuccaccagaucgagaaggaauuuagugagguugaagggcgcauccaggaucuggagaaguacguggaggacacaaaaauugauuuaugguccuauaaugccgaacugcucguagcacuugagaaccaacacaccauagaccugacggauagcgaaaugaacaaguuguuugagaaaaccaagaaacagcuaagagaaaaugcugaggacaugggcaacggaugcuucaagaucuaccauaagugugauaaugccugcauuggcucuaucaggaacgggacauaugaccacgacguguaccgggaugaggcucugaauaaccgcuuucagauuaaaggagucgaacucaagucagguuacaaagacuggauccuguggauaaguuucgccaucagcugcuuucuucuguguguggcauugcucggcuucauuaugugggccugccagaaggggaauaucagauguaacauuugcaucuga

SEQ ID NO: 142012 - RNA, 1701 nt, Artificial Sequence
  derived and/or modified CDS sequence (opt3) from hemagglutinin__InfluenzaA__EPI696955
augaagaccaucauugcccugagcuacauacucugccuuguguucgcucagaaacugcccggcaacgacaauuccacagcaacuuuguguuuagggcaccaugccgucccuaacggaacgaucguuaagaccauuacaaaugauagaaucgaggugacuaacgcgaccgaacugguacaaaauucuucaauuggugagaucugcgacaguccacaccagauacuagauggcgaaaacuguacacucaucgacgcucugcuuggggauccgcagugcgacggauuucagaauaaaaagugggaucuguucguggagaggagcaaagccuauuccaacuguuaccccuaugacgucccugauuacgcaucuuugcggucgcucguggccucaagcggcacccuggaauuuaauaacgagaguuucaauugggcugguguuacucaaaacgggacauccucuagcugccgccgaggauccaauucaaguuucuucagccgucugaacuggcucacccauuuaaauucuaaguauccagcacugaacgugacgaugcccaacaaugagcaguuugacaagcuguacauuuggggcguccaccauccugugacugauaaagaccagaucuucuuguaugcccaguccucaggcagaauuaccguaagcacaaagaggagucaacaggcuguuaucccaaacauaggguaccggccccgcauuagagauaucccuucuaggauuuccaucuacuggacuaucgugaaaccaggagacauucugcuaauaaauagcaccgguaaccucaucgccccgcggggcuauuuuaagauucgcucggggaaaucuuccaucaugcgaucagacgcgcccauaggaaaguguaagagugaaugcauuacaccuaauggcagcaucccaaacgauaaacccuuccagaaugucaacagaaucaccuacggugcauguccuagguaugugaagcaguccacgcugaaacuugccacugggaugcggaaugugccagagcgucaaacacgcggaauuuuuggcgcuaucgccggcuucauugaaaacgggugggagggaauggucgacgguugguacggcuuuagacaccaaaauucugaggggaggggacaggcagcugaucuuaagagcacccaggccgcgauagaccagaucaacggcaaauugaaucggcucauugguaagacuaacgaaaaauuccaccagaucgagaaggaauuuucagagguugaagggcgaauccaggaucuggagaaguauguggaggacacaaaaauugauuuauggaguuacaaugccgaacugcucguagcacuugagaaccaacauaccauagaccugacggauuccgaaaugaacaaguuguuugagaaaaccaagaaacagcuacgcgaaaaugcugaggacaugggcaacggaugcuucaagaucuaucacaagugugauaaugccugcauuggcagcaucagaaacgggacauacgaccaugacguguacagggaugaggcucugaauaaccgguuucagauuaaaggagucgaacucaagucugguuauaaagacuggauccuguggauaucauucgccaucaguugcuuucuucuguguguggcauugcucggcuucauuaugugggccugccagaaggggaauauccgcuguaacauuugcaucuga

SEQ ID NO: 142013 - RNA, 1701 nt, Artificial Sequence
  derived and/or modified CDS sequence (opt3) from hemagglutinin__InfluenzaA__EPI740790
augaagaccaucauugcccugagcuacauacucugccuuguguucgcucagaaacugcccggcaacgacaauuccacagcaacuuuguguuuagggcaccaugccgucccuaacggaacgaucguuaagaccauuacaaaugauagaaucgaggugacuaacgcgaccgaacugguacaaaauucuucaauuggugagaucugcgacaguccacaccagauacuagauggcgaaaacuguacacucaucgacgcucugcuuggggauccgcagugcgacggauuucagaauaaaaagugggaucuguucguggagaggagcaaagccuauuccaacuguuaccccuaugacgucccugauuacgcaucuuugcggucgcucguggccucaagcggcacccuggaauuuaauaacgagaguuucaauugggcugguguuacucaaaacgggacauccucuagcugccgccgaggauccaauucaaguuucuuuagccgucugaacuggcucacccauuuaaauucuaaguauccagcacugaacgugacgaugcccaacaaugagcaguuugacaagcuguacauuuggggcguccaccauccugugacugauaaagaccagaucuucuuguaugcccaguccucaggcagaauuaccguaagcacaaagaggagucaacaggcuguuaucccaaacauaggguuucggccccgcauuagagauaucccuucuaggauuuccaucuacuggacuaucgugaaaccaggagacauucugcuaauaaauagcaccgguaaccucaucgccccgcggggcuacuucaagauucgcucggggaaaucuuccaucaugcgaucagacgcgcccauaggaaaguguaagagugaaugcauuacaccuaauggcagcaucccaaacgauaaacccuuucagaaugucaacagaaucaccuauggugcauguccuagguacgugaagcaguccacgcugaaacuugccacugggaugcggaaugugccagagcgucaaacacgcggaauuuucggcgcuaucgccggcuuuauugaaaacgggugggagggaauggucgacgguugguauggcuucagacaccaaaauucugaggggaggggacaggcagcugaucuuaagagcacccaggccgcgauagaccagaucaacggcaaauugaaucggcucauugguaagacuaacgaaaaauuccaccagaucgagaaggaauuuucagagguugaagggcgaauccaggaucuggagaaguacguggaggacacaaaaauugauuuauggaguuauaaugccgaacugcucguagcacuugagaaccaacauaccauagaccugacggauuccgaaaugaacaaguuguucgagaaaaccaagaaacagcuacgcgaaaaugcugaggacaugggcaacggaugcuuuaagaucuaccacaagugugauaaugccugcauuggcagcaucagaaacgggacauaugaccaugacguguacagggaugaggcucugaauaaccgguuccagauuaaaggagucgaacucaagucugguuacaaagacuggauccuguggauaucauuugccaucaguugcuuccuucuguguguggcauugcucggcuuuauuaugugggccugccagaaggggaauauccgcuguaacauuugcaucuga

SEQ ID NO: 142014 - RNA, 1701 nt, Artificial Sequence; identical to SEQ ID NO: 136757
  derived and/or modified CDS sequence (opt3) from hemagglutinin__InfluenzaA__EPI377499

SEQ ID NO: 142015 - RNA, 1701 nt, Artificial Sequence
  derived and/or modified CDS sequence (opt3) from hemagglutinin__InfluenzaA__EPI391247
augaagaccaucauugcccugagcuacauacucugccuuguguucgcucagaaacugcccggcaacgacaauuccacagcaacuuuguguuuagggcaccaugccgucccuaacggaacgaucguuaagaccauuacaaaugauagaaucgaggugacuaacgcgaccgaacugguacaaaauucuucaauuggugagaucugcgacaguccacaccagauacuagauggcgaaaacuguacacucaucgacgcucugcuuggggauccgcagugcgacggauuucagaauaaaaagugggaucuguucguggagaggagcaaagccuauuccaacuguuaccccuaugacgucccugauuacgcaucuuugcggucgcucguggccucaagcggcacccuggaauuuaauaacgagaguuucaauuggaacgguguuacucaaaaugggacauccucugcuugcauucgccgaagcaacaauuccuuuuucucacgucugaacuggcucacccauuuaaacuuuaaguauccagcacugaaugugacgaugcccaacaaugagcaguucgacaaguuguacaucuggggaguccaccauccugugacugauaaagaccagauuuuucuuuaugcccagccaaguggcagaaucaccguaagcacaaagaggucucaacaggcuguuauacccaacauuggcuuccggccucgcaucagaaauauuccauccaggaucucaaucuacuggacuauugugaaaccgggggauauacugcuaaucaacagcaccggaaaucucauugcgccccgggguuacuuuaagauccgcaguggcaaaucuuccauaaugcgaagcgacgccccuauugggaaguguaagucggaaugcaucacaccaaacggaucuauccccaaugacaaaccuuuccagaacgucaauagaauuaccuauggcgcauguccaagguacgugaagcaguccacgcugaaacuugccacugguaugcggaacgugcccgagaagcaaacacgugggaucuuuggagcuauugccggcuucauagaaaauggcugggaggggauggucgauggaugguaugguuuccgccaccagaacucagagggcagagggcaggcagcugaccugaaaaguacccaagccgcgaucgaucagauuaauggaaaguugaacaggcucaucggcaaaacuaacgaaaaguuucaccagaucgagaaggaguucagcgaaguugaaggucggauucaggaccuggagaaauacguggaggauacaaagauagacuuaugguccuauaaugccgaacugcucguagcacuugagaaccaacauaccaucgaucugacggacucugaaaugaauaaauuguuugagaagaccaaaaagcagcuacgagaaaacgcugaggauauggggaauggcugcuucaagauuuaccacaaaugugacaacgccugcaucggaagcauucgcaauggcacauaugaucaugacguguacagagacgaggcucugaacaauagguuucagaucaagggggucgaacucaaaucaggauacaaggauuggauacuguggaucaguuucgccauuuccugcuuucuucuguguguggcauugcucgguuucaucaugugggccugccagaaaggcaacauucgguguaauaucugcauauga

SEQ ID NO: 142016 - RNA, 1701 nt, Artificial Sequence
  derived and/or modified CDS sequence (opt3) from hemagglutinin__InfluenzaA__EPI407123
augaagaccaucauugcccugagcuacauacucugccuuguguucgcucagaaacugcccggcaacgacaauuccacagcaacuuuguguuuagggcaccaugccgucccuaacggaacgaucguuaagaccauuacaaaugauagaaucgaggugacuaacgcgaccgaacugguacaaaauucuucaauuggugagaucugcgacaguccacaccagauacuagauggcgaaaacuguacacucaucgacgcucugcuuggggauccgcagugcgacggauuucagaauaaaaagugggaucuguucguggagaggagcaaagccuauuccaacuguuaccccuaugacgucccugauuacgcaucuuugcggucgcucguggccucaagcggcacccuggaauuuaauaacgagaguuucaauuggaacgguguuacucaaaaugggacauccucugcuugcauucgccgaagcaacaauuccuuuuucucacgucugaacuggcucacccauuuaaacuuuaaguauccagcacugaaugugacgaugcccaacaaugagcaguucgacaaacuuuacaucuggggaguccaccauccugugacugauaaagaccagaucuuuuuguaugcccagccaaguggcagaauuaccguaagcacaaagaggucucaacaggcuguuauacccaacauuggcuuccggccucgcaucagaaauaacccauccaggauuucaaucuacuggacuaucgugaaaccgggggauauucugcuaauaaauagcaccggaaaccucaucgcgccccgggguuacuuuaagauucgcaguggcaaaucuuccaucaugcgaagcgacgccccuauagggaaguguaagucggaaugcauuacaccaaauggaucuauccccaacgacaaaccuuuccagaaugucaacagaaucaccuauggcgcauguccaagguacgugaagcaguccacgcugaaacuugccacugguaugcggaaugugcccgagaagcaaacacgugggauuuuuggagcuaucgccggcuucauugaaaacggcugggaggggauggucgauggaugguaugguuuccgccaccaaaauucagagggcagagggcaggcagcugaccugaaaaguacccaggccgcgauagaucagaucaacggaaaguugaacaggcucauuggcgaaacuaaugagaaauuucaccagaucgaaaaggaguucagcgaaguugagggucggauccaggaccuggagaaguacguggaagauacaaaaauugacuuaugguccuauaacgccgagcugcucguagcacuugaaaaucaacauaccauagaucugacggacucugagaugaacaaguuguuugaaaagaccaagaaacagcuacgagagaaugcugaggauauggggaacggcugcuucaagaucuaccacaagugugacaaugccugcauuggaagcauccgcaacggcacauaugaucaugacguguacagagacgaagcucugaauaacagguuucagauuaaaggggucgagcucaagucaggauacaaagauuggauccuguggauaaguuucgccaucuccugcuuucuucuguguguggcauugcucgguuucauuaugugggccugccagaagggcaauauccgguguaacauuugcaucuga

SEQ ID NO: 142017 - RNA, 1701 nt, Artificial Sequence
  derived and/or modified CDS sequence (opt3) from hemagglutinin__InfluenzaA__EPI407126
augaagaccaucauugcccugagcuacauacucugccuuguguucgcucagaaacugcccggcaacgacaauuccacagcaacuuuguguuuagggcaccaugccgucccuaacggaacgaucguuaagaccauuacaaaugauagaaucgaggugacuaacgcgaccgaacugguacaaaauucuucaauuggugagaucugcgacaguccacaccagauacuagauggcgaaaacuguacacucaucgacgcucugcuuggggauccgcagugcgacggauuucagaauaaaaagugggaucuguucguggagaggagcaaagccuauuccaacuguuaccccuaugacgucccugauuacgcaucuuugcggucgcucguggccucaagcggcacccuggaauuuaauaacgagaguuucaauuggaacgguguuacucaaaaugggacauccucugcuugcauucgccgaagcaacaauuccuuuuucucacgucugaacuggcucacccauuuaaacuuuaaguauccagcacugaaugugacgaugcccaacaaugagcaguucgacaaguuguacaucuggggaguccaccauccugugacugauaaagaccagauuuuucuuuaugcccagccaaguggcagaaucaccguaagcacaaagaggucucaacaggcuguuauacccaacauuggcuuccggccucgcaucagaaauaacccauccaggauuucaaucuacuggacuaucgugaaaccgggggauauucugcuaauaaauagcaccggaaaccucaucgcgccccgggguuacuuuaagauucgcaguggcaaaucuuccaucaugcgaagcgacgccccuauagggaaguguaagucggaaugcauuacaccaaauggaucuauccccaacgacaaaccuuuccagaaugucaacagaaucaccuauggcgcauguccaagguacgugaagcaguccacgcugaaacuugccacugguaugcggaaugugcccgagaagcaaacacgugggauuuuuggagcuaucgccggcuucauugaaaacggcugggaggggauggucgauggaugguaugguuuccgccaccaaaauucagagggcagagggcaggcagcugaccugaaaaguacccaggccgcgauagaucagaucaacggaaaguugaacaggcucauuggcaaaacuaaugaaaaguuucaccagaucgagaaggaguucagcgaaguugaaggucggauccaggaccuggagaaauacguggaggauacaaagauugacuuaugguccuauaacgccgaacugcucguagcacuugagaaucaacauaccauagaucugacggacucugaaaugaacaaauuguuugagaagaccaaaaagcagcuacgagaaaaugcugaggauauggggaacggcugcuucaagaucuaccacaaaugugacaaugccugcauuggaagcauccgcaacggcacauaugaucaugacguguacagagacgaggcucugaauaacagguuucagauuaagggggucgaacucaaaucaggauacaaggauuggauccuguggauaaguuucgccaucuccugcuuucuucuguguguggcauugcucgguuucauuaugugggccugccagaaaggcaauauccgguguaacauuugcaucuga

SEQ ID NO: 142018 - RNA, 1701 nt, Artificial Sequence; identical to SEQ ID NO: 141903
  derived and/or modified CDS sequence (opt3) from hemagglutinin__InfluenzaA__EPI562037

SEQ ID NO: 142019 - RNA, 1701 nt, Artificial Sequence; identical to SEQ ID NO: 140489
  derived and/or modified CDS sequence (opt3) from hemagglutinin__InfluenzaA__EPI562034

SEQ ID NO: 142020 - RNA, 1701 nt, Artificial Sequence
  derived and/or modified CDS sequence (opt3) from hemagglutinin__InfluenzaA__EPI653140
augaagaccaucauugcccugagcuacauacucugccuuguguucgcucagaaaauccccggcaacgacaauuccacagcaacucuguguuuggggcaccaugccgucccuaacggaacgauuguuaagaccaucacaaaugauagaauugaggugacuaacgcgaccgaauuaguacaaaauucuucaaucggugagauaugcgacaguccacaccagauccuggauggcgaaaacuguacacuaauugacgcucuccugggggauccgcagugcgacggauuucagaauaaaaagugggaucuuuucguggagaggagcaaagccuauuccucuuguuaccccuaugacgucccugauuacgcaucgcugcggucauugguggccagcaguggcacccucgaauuuaacaaugaguccuucaacuggacugguguuacacaaaaugggaccucuagcgcuugcauccgccgauccucaaguagcuuuuucucucgucugaacuggcugacgcaucucaauuauaaguacccagcauuaaacgugacuaugcccaauaacgagcaguuugacaagcuguauauuuggggaguccaccauccuggcaccgauaaagaccagaucuucccauacgcccaguccucaggcagaauaacagugagcacuaagaggagucaacaggcuguaauucccaacaucgggucucggccucgcauuagaggaaucccauccaggaucagcauuuacuggaccauaguuaaaccgggugauauccuuuugauuaauucgacaggcaaccugaucgcgccccggggguauuuuaagauacgcucuggaaaauccucaauuaugcgaagugacgccccuaucggcaaguguaagagcgaaugcaucaccccaaaugguuccauucccaacgacaaaccuuuccagaaugugaacagaaucacguacggggcauguccaagguaugucaagcacucuacucuaaaacucgccacaggaaugcggaaugugcccgagaagcagacccguggcauuuuuggcgcuauagccggguucaucgaaaacggaugggaggguaugguggauggcugguacggguuucgccaccaaaauagcgagggaagaggccaggcagcugaccugaaaucaacucaggccgcgauugaucaaaucaacgguaaacuuaauaggcugaucgggaaaacaaacgaaaaguuccaucagauugagaaggaguucagugaagucgaaggccggauacaggacuuggagaaauauguugaggauaccaagaucgaccucugguccuacaaugccgaacuguuaguggcacuggagaaccagcacacgauugaucucaccgacagcgaaaugaauaaacuuuuugagaagacaaagaagcaacugcgagaaaacgcugaggauaugggaaacggcugcuucaagaucuaucauaaaugugacaaugccugcauugggucuauccgcaacggaacuuacgaucacaauguauacagagacgaggcuuugaacaauagguuucagauaaaggguguggaacuaaaaucaggcuauaaggacuggauccuguggauuaguuucgccaucagcugcuuucuccugugugucgcacuucugggguucauuaugugggccugccagaaaggaaacauccgguguaauauaugcauuuga

SEQ ID NO: 142021 - RNA, 1707 nt, Artificial Sequence
  derived and/or modified CDS sequence (opt3) from hemagglutinin__InfluenzaA__ACR48873/m
auggagaagaucgugcuucucuucgccauugucagccuuguuaaauccgaccagauaugcaucggcuaccacgcuaacaauucuaccgaacaaguggauacaauuauggagaagaacguaacugugacgcaugcacaggacauccuggagaaaacccacaaugggaaguugugugauuuagacggagucaaaccccugauucuaagagauugcucaguggccgguuggcuccugggcaacccuaugugugacgaguuuaucaauguuccagaauggaguuauauaguggagaaggcgaacccggucaaugaucuuugcuaccccggggacuucaacgauuaugaggaacugaagcauuugcucagcaggaucaaucacuuugagaaaauucagaucauuccuaaguccucuuggucgucacaugaagcuagccugggagugaguuccgccuguccauaccagggcaaaucuagcuucuuucggaacguaguuuggcugaucgagaaaaauuccacauaucccacuauaaagcgcucauacaacaauaccaaccaagaggaccucuuagugcugugggguauucaccacccuaaugaugcagccgaacagacaaagcuguaucagaacccaaccacuuacaucagugucgggacaagcaccuugaaccagcgacuggugccccguauugcuacgagaucuaaggugaauggacaauccggcaggauggaguucuuuuggacuauccuaaaaccuaacgacgcaaucaauuucgaaucaaacggcaauuuuauugccccagaguacgcuuauaagauagucaaaaagggggauagcaccaucaugaaaagugaacucgaguacggaaacugcaauacaaagugucagacuccgaugggugccauuaacucuuccaugcccuuccauaauauccacccucugaccauaggcgagugcccaaaauauguuaagagcaaccggcuugugcuggcgacaggguugcgcaauucgccccagagagaaaggcggcgcaagaaacgaggacucuuuggcgcaauugccgguuucaucgaagggggauggcagggcaugguagacggcugguacggguaucaucacucuaacgaacaaggauccgguuacgcugccgacaaggagucaacccagaaagcaaucgauggcgugacgaauaaggucaacaguauuaucgacaaaaugaauacucaguuugaagcuguggggagagaguucaacaaccuggagaggcggauugaaaauuuaaacaagaagauggaggauggauuccuggacguuuggacauauaaugccgaacuccuugugcugauggagaacgaacguaccuuggauuuucacgacagcaaugucaaaaaccuauacgauaaggugcgccugcaacucagagacaaugcgaaagagcugggcaacgguuguuucgaguuuuaccauaagugcgauaaugaauguauggaguccguaaggaacgggacuuaugacuacccucaguauucugaagaggcccggcuuaaacgagaggaaauaagcggcguuaagcuggagucaaucggaauuuaccagaucuugaguaucuauuccacaguggcaagcucucucgcucuggccauuauggucgcuggcuuaucacuguggaugugcaguaaugggagccuacagugccgcauauguaucuga

SEQ ID NO: 142022 - RNA, 1707 nt, Artificial Sequence
  derived and/or modified CDS sequence (opt3) from hemagglutinin__InfluenzaA__ACR48874/m
auggagaagaucgugcuccuguucgccauugucagccuuguuaaauccgaccagauaugcaucggcuaccacgcuaacaauucuaccgaacaaguggauacaauuauggagaagaacguaacugugacgcaugcacaggacauccuggagaaaacccacaaugggaaguugugugauuuagacggagucaaaccccugauucuaagagauugcucaguggccgguuggcuccugggcaacccuaugugugacgaauuuaucaauguuccagaauggaguuauauaguggagaaggcgaacccggucaaugaucuuugcuaccccggggacuucaacgauuaugaggaacugaagcauuugcucagcaggaucaaucacuuugagaaaauucagaucauuccuaaguccucuuggucgucacaugaagcuagccugggagugaguuccgccuguccauaccagggcaaaucuagcuucuuucggaacguaguuuggcugaucaagaaaaauuccacauaucccacuauaaagcgcucauacaacaauaccaaccaagaggaccucuuagugcugugggguauucaccacccuaaggaugcagccgagcagacaaaacuuuaucagaauccaaccacuuacaucagugucgggacaagcaccuugaaccagcgacuggugccccguauugcuacgagaucuaaggugaacggacaauccggcaggauggaguucuuuuggacuauccuaaaaccuaaugacgcaaucaacuucgaaucaaauggcaacuuuauugccccagaauacgcuuauaagauagucaaaaagggggauagcaccaucaugaaaagugagcucgaauacggaaauugcaacacaaagugucagacuccgaugggugccauuaauucuuccaugcccuuccauaacauccacccucugaccauaggcgagugcccaaaguauguuaaaagcaaucggcuugugcuggcgacaggguugcgcaacucgccccagagagagaggcggcgcaagaaacgaggacucuuuggcgcaauugccgguuucaucgaagggggauggcagggcaugguagacggcugguacggguaucaucacucuaaugagcaaggauccgguuacgcugccgacaaggaaucaacccagaaagcaaucgauggcgugacgaacaaggucaauaguauuaucgacaagaugaacacucaguuugaggcuguggggagagaguucaauaaccuggaaaggcggauugagaacuuaaauaaaaagauggaagauggauuccuggacguuuggacauauaacgccgagcuccuugugcugauggaaaaugagcguaccuuggauuuucacgacagcaacgucaaaaaucuauacgauaaggugcgccugcaacucagagacaacgcgaaagaacugggcaaugguuguuucgaguuuuaccauaagugcgauaacgaguguauggaauccguaaggaaugggacuuaugacuacccucaguauucugaggaagcccggcuuaagcgagaggagauaagcggcguuaaacuggaaucaaucggaauuuaccagaucuugaguaucuauuccacaguggcaagcucucucgcucuggccauuauggucgcuggcuuaucacuguggaugugcaguaacgggagccuacagugccgcauauguaucuga

SEQ ID NO: 142023 - RNA, 1701 nt, Artificial Sequence; identical to SEQ ID NO: 137194
  derived and/or modified CDS sequence (opt3) from hemagglutinin__InfluenzaA__ACD47234

SEQ ID NO: 142024 - RNA, 1707 nt, Artificial Sequence
  derived and/or modified CDS sequence (opt3) from hemagglutinin__InfluenzaA__ACZ36881
auggagaagaucgugcugcuccuugccauugucagccugguuaaauccgaccagauaugcaucggcuaccacgcuaacaauucuaccgaacaaguggauacaauuauggagaagaacguaacugugacgcaugcacaggacaucuuggaaaagacccacaaugggaaauuaugugaucuggacggagucaaaccccuaauucucagagauugcucaguggccgguuggcugcuuggcaacccuaugugugacgaguuccugaauguuccagaauggaguuauaucguggagaagauaaacccggcgaaugauuugugcuaccccgggaacuuuaaugacuaugaggaacucaagcaucugcugagcaggaucaaccacuucgagaaaauucagaucauuccuaaguccucuuggucggaucaugaagcuaguagcggagucaguuccgccuguccauaccagggccggucuagcuuuuuccgcaaugugguauggcucaucaaaaaggacaacgcauaucccacaauaaaacgauccuacaauaacacuaaucaagaggauuuacugguucuuugggguauucaccacccuaacgacgccgcugagcagacccguuuguaucagaacccaacaaccuacaucucaguggggacuucaacacugaaucagaggcuaguccccaagauugcaaccagaagcaaggugaacggacaaucuggccggauggaauuuuucuggacgauccucaaaccuaaugaugccaucaacuuugaguccaauggcaacuucauugcuccagaaaaugccuacaagauagugaaaaagggggacucaacuaucaugaaaagcgagcuggaauauggaaacugcaauaccaagugucagacaccgauuggugcgaucaacaguucuaugcccuuucauaauauacacccucuuacuauuggcgagugcccaaaauacgucaaguccaaccgccugguuuuggcaaccgggcucagaaauagcccccagggagagaggcggcgccgaaagagaggccuguucggugccaucgcuggguuuaucgaaggaggcuggcagggcaugguggacgggugguauggauaccaucacucgaacgagcaagguucuggcuaugccgcagauaaagaauccacacagaaggcuauugacgggguaaccaauaaagugaacucaaucauugauaagaugaacacgcaguucgaggccgucggaagggaauuuaauaacuuagagcggcguauagagaaucugaacaaaaagauggaagacggcuuccucgauguguggacuuacaaugcggagcuucugguuuugauggaaaacgagcgcacacuagacuuccacgauaguaaugugaagaaccuguaugacaaagucagacuccaacugagggauaaugccaaggaacuugguaacggguguuuugaguucuaccaucggugcgacaaugaguguauggaaagcgugcgaaacggcaccuacgauuauccucaguacuccgaggaagcacgccugaaaagagaggagaucucuggaguaaaguuggaaagcauuggcacuuaucagauccucucaaucuacaguacaguugcuuccagccuggccuuagcuauuaugguggccgggcugucucuauggaugugcucaaauggaagucuccagugcaggauauguaucuga

SEQ ID NO: 142025 - RNA, 1704 nt, Artificial Sequence
  derived and/or modified CDS sequence (opt3) from hemagglutinin__InfluenzaA__EPI500771
auggagaagaucgugcuccuguucgccaccauuagccuugucaaauccgaccacauaugcaucggcuaccaugcuaacaauucuacagaacagguugauacuauuauggagaagaacgugacgguaacccacgcacaagacauccuggagaaaacacauaaugggaaguugugugauuuaaacggagugaaaccccugauucuaaaggacugcucagucgccgguuggcuccugggcaauccucuuugugaugaauuuacuaacgugccagaauggaguuauaucguugagaaggcgaauccggcuaacgaccugugcuaccccgggaauuucaacgauuaugaggaauugaaacaccuccugagcagaauaaaucauuuugagaagauccagauuaucccuaaagacuccuggucugaucacgaagccucgcugggagugucagcagccuguagcuaccagggcaacaguuccuucuuuaggaaugucguguggcucauuaagaaagacaacgcuuauccaaccaucaagaaggguuacaauaacacaaaccgggaggauuuacugauacuuugggggauucaccaucccaaugacgaggcagaacagaccaaauuguaucaaaacccuacuacauacaucucuauuggaaccagcacgcugaaucagcgccuaguaccaaagaucgccacucgauccaaaaucaaccgucagucaggcagaauugauuucuuuuggaccauacucaagcccaaugacgcuauccacuucgagaguaacggcaauuuuauugccccugaauacgcguauaaaaucguuaagaaaggggacagcacaauaaugaggucugagguggaauacggaaacugcaauacucggugucagaccccaauuggugcaaucaacuccucaaugccguuccauaauauccacccccugacaauuggcgagugcccuaaguaugucaagagcaacaaacuugugcuggccaccggguugcgcaauaguccacaaagagagaggcggcgcaagcgaggacucuuuggcgcuaucgccgguuucauugaagggggauggcagggcaugguggauggcugguacggguaucaccauucuaacgagcagggauccgguuacgcagcugacaaagaaagcacgcagaaggccauagauggcgucacuaauaaaguuaacucgaucauugacaagaugaacacacaauuugaggcgguggggagagaguucaauaaccuggaaaggcggaucgagaauuuaaacaagaaaauggaagauggauuccuggacguauggaccuauaaugccgagcuccuugugcugauggaaaacgagcguacuuuggauuuucacgacucuaaugucaagaaccuauacgauaaagugcgccugcagcucaaggacaaugcaaaagaacugggcaacgguuguuucgaguuuuaccauaagugcaauaacgaguguauggaauccguuagaaaugggacauaugauuacccccaguauucagaggaagcuaggcuuaagcgggaggagaucaguggcgugaaacuggaaagcauuggaauauaccaaaucuuguccauuuauucuaccgucgccagcucacucgugcuggcuaucaugauggccggcuuaagucuguggaugugcuccaacgggagccuacagugccgaauuuguaucuga

SEQ ID NO: 142026 - RNA, 1695 nt, Artificial Sequence
  derived and/or modified CDS sequence (opt3) from hemagglutinin__InfluenzaA__ABF93441
auggagaagaucgugcugcuccuugccauugucagccugguuaaauccgaccagauaugcaucggcuaccacgcuaacaauucuaccgaacaaguggauacaauuauggagaagaacguaacugugacgcaugcacaggacaucuuggaaaagacccacaaugggaaauuaugugaucuggacggagucaaaccccuaauucucagagauugcucaguggccgguuggcugcuuggcaacccuaugugugacgaguuccugaauguuccagaauggaguuauaucguggagaagauaaacccggcgaaugauuugugcuaccccgggaacuuuaaugacuaugaggaacucaagcaucugcugagcaggaucaaccacuucgagaaaauucagaucauuccuaaguccucuuggucggaucaugaagcuaguagcggagucaguuccgccuguccauaccagggccggucuagcuuuuuccgcaaugugguauggcucaucaaaaagaacaaugcauaucccacaauaaaacgauccuacaacaauacuaaccaagaggacuuacugguucuuugggguauucaccacccuaacgaugccgcugagcagacccguuuguaucagaauccaacaaccuacaucucaguggggacuucaacacugaaccagaggcuaguccccaagauugcaaccagaagcaaggugaauggacaaucuggccggauggaauuuuucuggacgauccucaaaccuaacgacgccaucaauuuugaguccaacggcaauuucauugcuccagaaaacgccuacaagauagugaaaaagggggauucaacuaucaugaaaagcgagcuggaauauggaaauugcaacaccaagugucagacaccgauuggugcgaucaauaguucuaugcccuuucauaacauacacccucuuacuauuggcgagugcccaaaauacgucaaguccaaucgccugguuuuggcaaccgggcucagaaacagcccccagaucgagacaaggggacuguucggcgccaucgcugguuuuauugaagggggauggcagggcaugguggacggcugguauggguaccaucacucgaaugagcaaggaucugguuaugccgcagacaaggaauccacccagaaagcuaucgauggcguaacgaacaaggugaacucaauuauagacaaaaugaauacucaguucgaggccgucgggcgggaauuuaacaauuuagagcgccgaaucgagaaccugaauaagaaaauggaagauggauuccucgacguguggacauacaacgcggagcuucugguuuugauggaaaaugagagaacccuagauuuccacgacaguaacgugaagaaucuguaugauaaggucaggcuccaacugcgggacaacgccaaagaacuuggcaaugguuguuuugaguucuaccaucguugcgauaacgaguguauggaaagcgugcgcaaugggacuuacgacuauccucaguacuccgaggaagcaagacugaagagggaggagauuucuggcguaaaauuggaaagcaucggaacauaucagauccucucaauuuacaguaccguugcuuccagccuggccuuagcuauaaugguggccggccugucucuauggaugugcucaaacgggagucuccagugccggaucuguauuuga

SEQ ID NO: 142027 - RNA, 1707 nt, Artificial Sequence
  derived and/or modified CDS sequence (opt3) from hemagglutinin__InfluenzaA__AGG12577
auggagaagaucgugcuacucuucgccauuauaagccuugucaaauccgaccacaucugcauuggcuaccaugcuaacaauucuaccgaacagguugauacaaucauggagaagaacgugacuguaacgcacgcacaagacauucuggaaaagacccauaaugggaaguugugugauuuaaacggagugaaaccccugauccuaaaggacugcucagucgccgguuggcuccugggcaauccuaugugugaugaguuuauagacgugccagaauggaguuauaucguugagaaggcgaacccggcuaaugaucuuugcuaccccgggaacuucaaugacuaugaggaacugaaacacuugcucagcagaauuaaccauuuugagaagaucaggauuaucccuaaagauuccuggccagaccacgaagccucucugggagugucggcagccuguucauaccagggcaauagcaguuucuuucggaacgucguguggcugcucaagaaagauaaugcuuaucccauaauuaagaaguccuacaacaauacaaacaaagaggacuuacugguacuuugggguauccaccauccuaacgaugaggcagaacagacucgcuuguaucagaauccaaccacauacguuucuauugggaccagcacucugaaccaacgacuggugccccguaucgccacaagauccaaggucaauggacagucaggcaggaucgacuucuuuuggaccauucucaaaccuaacgacgcuauaaauuucgagaguaacggcaauuuuaucgccccagaauacgcguauaagauugugaaaaagggggauagcacgaucaugcggucugagguggaauacggaaacugcuccacucgcugucagaccccgaugggugcaauaaauucaagcaugcccuuccacaacauucauccucugacaaucggcgagugcccaaaauaugucaagaguaauaaacuuguucuggccacuggguugagaaacucuccccagaucgagaggcggcgccgaaaaagaggacucuuuggcgcuauugccgguuucaucgaagggggauggcaaggcaugguggacggcugguacggguaucaccacuccaaugagcagggaagcgguuacgcagcugauaaggaaucgacccagaaagccauugacggcguaacaaacaaggucaauucuauaaucgauaaaaugaacacccaguuugaggcgguggggagggaguucaacaaucuggaacggcguauugagaacuuaaauaagaagauggaagacggauuccuggauguguggacguauaacgccgagcuccuuguucugauggaaaaugagcgcacuuuggacuuucaugauuccaacgugaaaaaucuauacgacaaggucagacugcaacucagggauaacgcaaaagaacugggcaaugguuguuucgaguuuuaccacaagugcgacaacgaguguauggaaucagugcggaaugggacauaugacuacccucaguauagugaggaagcucgacuuaaacgcgaggagaucagcggcguaaagcuggaauccaucggaaccuaccagauuuugucuauauauagcacuguugccucaagucucgugcuggcuaucauggucgccggcuuaucccuguggaugugcagcaacgggucucuacaaugcagaauuuguaucuga

SEQ ID NO: 142028 - RNA, 1707 nt, Artificial Sequence; identical to SEQ ID NO: 142027
  derived and/or modified CDS sequence (opt3) from hemagglutinin__InfluenzaA__AGC13463

SEQ ID NO: 142029 - RNA, 1707 nt, Artificial Sequence; identical to SEQ ID NO: 133891
  derived and/or modified CDS sequence (opt3) from hemagglutinin__InfluenzaA__ACI06178/m1

SEQ ID NO: 142030 - RNA, 1707 nt, Artificial Sequence
  derived and/or modified CDS sequence (opt3) from hemagglutinin__InfluenzaA__AHF20402
auggagaagaucgugcuccuguucgccauugucagccuuguuaaauccgaccagauaugcaucggcuaccacgcuaacaauucuaccgaacaaguggauacaauuauggagaagaacguaacugugacgcaugcacaggacauccuggagaaaacccacaaugggaaguugugugauuuagacggagucagaccccugauucuaagggauugcucaguggccgguuggcuccugggcaacccuaugugugacgaguuuaucaauguuccagaauggaguuauauaguggagaaagcgaacccggucaaugaucuuugcuaccccgggguguucaacgacuaugaggaacugaagcauuugcucagccggaucaaucacuuugagaagauucagaucauuccuaaaaacuccuggccaucucaugaggcuucgcugggaguaucagccgcaugucccuaccagggccaaagcaguuucuuucgcaauguuguguggcugaucaagaaaaacaauacauauccuacuauaaagcgauccuacaacaauaccaaccaggaagaucucuuagucaugugggguauucaccacccaaacgacgccguggagcagacaaaacuguaucagaaucccaccacuuacaucucuguggggacaagcacccuuaaccaacguuugacgccuagaauugcuacuagguccaaggucaagggacugucaggccggauggaguucuuuuggaccauccuaaaaccaaaugaugcaaucaacuucgaaaguaauggcaacuuuauugccccggaauacgcuuauaagauaguuaaaaagggggacagcacaaucaugcgcucugagcucgaauacggaaauugcaacacuaaaugucagacccccaugggugccauuaauuccucaaugccuuuccauaacauccacccacugacaauaggcgagugccccaaguaugugaaaagcaccagacuuguacuggcgacgggguugaggaauaguccucagcgggaggaacgccgaaagaagagaggacucuuuggcgcaauugccgguuucaucgaagggggauggcagggcaugguggauggcugguacggguaucaucacucuaacgaacaaggauccgguuacgcugccgacaaagagagcacucagaaggcaaucgacggcgucacaaauaaagugaacucgauuaucgauaagaugaauacccaguuugaagcuguugggagggaguucaacaaccuggagcggcguauugaaaauuuaaacaaaaagauggaggacggauuccuggauguguggacuuauaaugccgaacuccuuguccugauggagaacgaacgcacauuggacuuucacgauucuaaugugaagaaccuauacgacaaaguaagacugcaacucagggauaaugcgaaggagcugggcaacgguuguuucgaguuuuaccauaaaugcgacaauaaguguauggaauccguucggaacgggaccuaugauuacccacaguauucagaggaagcccgacuuaaacgcgaggagauaaguggcgugaagcuggaaagcaucggagucuaccagauuuuguccaucuauucuacgguggcaagcucacucgcucuggccaucauggucgcuggcuuaagucuguggaugugcuccaaugggagccuacagugcagaauuuguauauga

SEQ ID NO: 142031 - RNA, 1707 nt, Artificial Sequence
  derived and/or modified CDS sequence (opt3) from hemagglutinin__InfluenzaA__ABQ45850
auggagaagaucgugcugcuccuugccauugucagccugguuaaauccgaccagauaugcaucggcuaccacgcuaacaauucuaccgaacaaguggauacaauuauggagaagaacguaacugugacgcaugcacaggacaucuuggaaaagacccacaaugggaaauuaugugaucuggacggagucaaaccccuaauucucagagauugcucaguggccgguuggcugcuuggcaacccuaugugugacgaguuccugaauguuccagaauggaguuauaucguggagaagauaaacccggcgaaugauuugugcuaccccgggaacuuuaaugacuaugaggaacucaagcaucugcugagcaggaucaaccacuucgagaaaauucagaucauuccuaaguccucuuggucggaucaugaagcuaguagcggagucaguuccgccuguccauaccagggccggucuagcuuuuuccgcaaugugguauggcucaucaaaaagaacgacgcauaucccacaauaaaacgauccuacaauaacacuaaucaagaggauuuacugguucuuugggguauucaccacccuaacgacgccgcugagcagacccguuuguaucagaacccaacaaccuacaucucaguggggacuucaacacugaaucagaggcuaguccccaagauugcaaccagaagcaaggugaacggacaaucuggccggauggaauuuuucuggacgauccucaaaccuaaugaugccaucaacuuugaguccaauggcaacuucauugcuccagaaaaugccuacaagauagugaaaaagggggacucaacuaucaugaaaagcgagcuggaauauggaaacugcaauaccaagugucagacaccgauuggugcgaucaacaguucuaugcccuuucauaauauacacccucuuacuauuggcgagugcccaaaauacgucaaguccaaccgccugguuuuggcaaccgggcucagaaauagcccccagggagagaggcggcgcaagaaacgaggccuguucggugccaucgcuggguuuaucgaaggaggcuggcagggcaugguggacgggugguauggauaccaucacucgaacgagcaagguucuggcuaugccgcagauaaggaauccacacagaaagcuauugacgggguaaccaauaaggugaacucaaucauugauaaaaugaacacgcaguucgaggccgucggaagagaauuuaauaacuuagagaggcggauagagaaucugaacaagaagauggaagacggcuuccucgauguguggacuuacaaugcggagcuucugguuuugauggaaaacgagcguacacuagacuuccacgauaguaaugugaaaaaccuguaugacaagguccgccuccaacugagagauaaugccaaagaacuugguaacggguguuuugaguucuaccauaggugcgacaaugaguguauggaaagcgugcggaacggcaccuacgauuauccucaguacuccgaggaagcacgacugaagcgcgaggagaucucuggaguaaaauuggaaagcauuggcacuuaucagauccucucaaucuacaguacaguugcuuccagccuggccuuagcuauuaugguggccgggcugucucuauggaugugcucaaauggaagucuccagugcagaauauguaucuga

SEQ ID NO: 142032 - RNA, 1713 nt, Artificial Sequence
  derived and/or modified CDS sequence (opt3) from hemagglutinin__InfluenzaA__AKI82373
auggagaagaucgugccccugcucgccauuauaggccuugucaaaagcgaccagaucugcauuggguaccacgcuaacaauuccaccgaacaaguugauacaaucauggagaagaacgugacuguaacgcaugcacaggacauucuggagaaaacccacaauggaaaguuguguaacuuagauggugugaaaccucugauccuaaaggacugcucugucgccggcuggcuccuggggaauccaaugugugaugaguuccuuaacgugucagaauggaguuauauaguugagaaggcgagcccggcuaauggacugugcuaccccggcgacuuuaacgauuaugaggaauugaaacaucuccugaauagaaucacacaccugaagaaaauuaagaucauuccuaaauccuacuggucuaaccaugaggccucgucaggugugagcgcagccuguaguuauaugggggaaccauccuucuuuaggaaugucguguggcucaucaagaagaacaauacuuaucccccuauaaaaguaaacuacaccaauacaaaccaggaggacuuacugguucuuuggggcauucaccacccaaacaaugaggcugaacagauccaaauuuaccagaacuugaucacccauaucucugugggaacuagcacacugaaucagcggcuaauucccaagauagcaacccgcuccaaagucaacggccagucagggcgaauggaguucuuuuggacgauccucaagccuaaugauaguauuaacuucgacagcaauggaaacuuuaucgccccagaauacgcuuauauagugaaaaagggugauucugccauuaugaaauccgagcuggaauacggcaauugcaacacuaagugucaaaccccgaugggggcgaucaauucaagcaugcccuuccacaacauccauccucuuacaauuggagagugcccaaaguaugugaaaaguaaucgucuggucuuggcaacuggccucagaaacgcuccccagagggagcgggaaggugggcgcagaaggaagcggggacuguuuggcgccaucgccggcuucauugaagggggauggcaggguaugguugacggcugguacggguaucaccacucuaaugaacagggauccggcuacgcagcugauaaagagagcacccaaaaggccauagacgguaucacaaacaaagugaacucgauuaucgacaagaugaauacccaguuugaagcgguagggcgcgaguucaacaauuuagagcgaagaaucgaaaaccugaauaagaaaauggaggauggcuuucucgacguguggacguauaacgccgaacuucuggucuugauggagaaugaaaggacucuagauuuccaugacucuaacgugaagaaucuguacgagaaaguucggcuccagcugcgugauaacgcaaaggagcuuggaaauggcuguuucgaauuuuaccacaaaugcgacaacgaguguauggaauccgugcgcaaugggacauaugauuacucacaauauagugaggaggcuagacugagcagggaagagauuaacggagucaaguuggaauccauggugaccuaccagauacucucuaucuauagcacuguagccucaagucuggcuuuagccauuaugguugcaggucugucccuauggaugugcagcaauggcucucuccagugccggaucuguauuuga

SEQ ID NO: 142033 - RNA, 1713 nt, Artificial Sequence
  derived and/or modified CDS sequence (opt3) from hemagglutinin__InfluenzaA__EPI284473
auggagaagaucgugcugcuccuugccauuauaagccuggucaaauccgaccagaucugcauuggcuaccacgcuaacaauucuaccgaacaaguugauacaaucauggagaagaacgugacuguaacgcaugcacaggacauuuuggaaaagacccacaaugggaaauuauguaaccuggauggagugaaaccccuaauccucaaggacugcucagucgccgguuggcugcuuggcaauccuaugugugaugaguuccugaacgugagugaauggagcuauauaguugagaaggcguccccagcuaauggguugugcuacccgggagacuuuaacgauuaugaggaacucaaacaucugcugaauagaaucacacaccucaagaaaauuaagaucauucccaaaucuuacuggucgaaccaugaggccucaagcggcgugagugcagccuguuccuauaugggugaaccuucuuucuuuaggaaugucgugugguuaaucaagaagaacaauacuuacccacccauaaaaguaaacuauaccaauacaaaccaggaggaccugcuuguuuugugggggauucaccacccuaacaaugaggcugaacagauccaaauuuaccagaaccugaucacccauaucagcgugggaacuuccacacuaaaucagcggcucauuccaaagauagcaacccgcucaaaagucaacggccagaguggccgaauggaguucuuuuggacgauccugaagcccaaugauagcauuaacuucgacucuaaugggaacuuuaucgccccugaauacgcuuauauagugaaaaagggagauuccgccauuaugaaaucagagcuugaauacgguaauugcaacacuaagugucaaaccccaaugggcgcgaucaauagcaguaugccguuccacaacauccauccccugacaauuggggagugcccuaaguaugugaaaucuaaucguuugguccucgcaacuggacugagaaacgccccacagagggagcgggaaggcggucgcagaaggaagcggggguuauuuggagcuaucgccggcuucauugagggcggguggcagggaaugguugacgguugguacggcuaucaccacuccaaugaacaggggagcggauacgcagcugauaaagagucgacccaaaaggccauagacggcaucacaaacaaagugaacucuauuaucgacaagaugaauacccaguuugaagcgguaggucgcgaguucaacaaucuggagcgaagaaucgaaaaccucaauaagaaaauggaggauggguuucuugacguguggacguauaacgccgaacuguugguccuaauggagaaugaaaggacucuggauuuccaugacuccaacgugaagaaucucuacgagaaaguucggcugcagcuucgugauaacgcaaaggagcugggcaauggauguuucgaauuuuaccacaaaugcgacaacgaguguauggaaucagugcgcaauggcacauaugauuacagucaauauagcgaggaggcuagauuguccagggaagagauuaacggggucaagcucgaaucuauggugaccuaccagauacugagcaucuauucaacuguagccaguuccuuagcucuggccauuaugguugcaggacuaagccucuggaugugcucuaaugguucacugcagugccggaucuguauuuga

SEQ ID NO: 142034 - RNA, 1710 nt, Artificial Sequence
  derived and/or modified CDS sequence (opt3) from hemagglutinin__InfluenzaA__ACO07033
auggagaagaucgugcugcuccuugccaugauuggccuggucaaaagcgaccagauaugcaucggguaccacgcuaacaauuccaccgaacaaguugauacaauuauggagaagaacgugacuguaacgcaugcacaggacaucuuggaaaagacccacaauggaaaauuauguaaccuggauggugugaaaccccuaauucucaaggacugcucugucgccggcuggcugcuugggaauccuaugugugaugaguuccugaacgugucagaauggaguuauaucguugagaaggcgagcccagcuaauggauugugcuacccgggcgacuuuaacgauuaugaggaacucaaacaucugcuguccagaauaaaucaccucaagaaaaucaagauuauccccaaaucuuacuggucgaaccaugaggccucaagcggugugagugcagccuguuccuauuuaggggaaccuucuuucuuuaggaaugucguguggcugauuaagaagaacaauacauacccacccaucaaaguaaacuauacuaauaccaaccaggaggaccuuuugguucuguggggaauacaccacccuaacgaugagaaggaacagauucggaucuaccaaaauccaaacacaagcauuuccgugggcaccucaacucuaaaucagcgccucguccccaaaaucgcuacacgaccuaaggugaacggccagagugggcguauggaguucuuuuggaccauccugaaaccaaaugacagcauuaacuucgauucuaauggaaacuuuauagcaccggaauacgccuauaagaucgcuaaaaagggugacuccgugauuaugaagucagagcuugaauacggcaauugcaacacgaaaugucagacucccaugggggccaucaauagcaguaugccuuuccauaacauacacccacugaccauuggagagugccccaaguaugucaaaucuaauagauugguucucgcgacaggccugaggaacgcaccucaacgggagggugggcgcagaaggaagcggggauuauuuggcgccaucgcuggcuucaucgaagggggauggcaggguaugguggauggcugguacggguaucaucacuccaaugagcagggaagcggcuacgccgcagacaaagaaucgacucagaaggcuauugacgguaucaccaacaagguaaacucuauuauagauaaaaugaauacacaauuugagaucguggggcgcgaguucaacaaucuggaacgaagaauugagaaccucaauaagaaaauggaagacggcuuucuugaugucuggaccuauaacgccgagcuguuggugcuaauggaaaaugagaggacgcuggacuuccacgauuccaacguuaagaaucucuacgaaaaagugcggcugcagcuucgugacaacgcgaaggagcugggaaauggcuguuucgaguuuuaccauaagugcgauaacgaauguauggagucaguccgcaaugggacuuaugacuacccacaguauagugaagaggccagauugagcagggaggaaaucuccggagugaaaauggagucuaugguaacauaccaaauccucagcauuuauucaaccguugcaaguucccuggcuuuagccauaaugguggcuggucugagccuauggaugugcucuaacggcucacuccagugccggaucuguauuuga

SEQ ID NO: 142035 - RNA, 1695 nt, Artificial Sequence
  derived and/or modified CDS sequence (opt3) from hemagglutinin__InfluenzaA__EPI174803
auggagaagaucgugcugcuccuugccaugauuggccuggucaaaagcgaccagauaugcaucggguaccacgcuaacaauuccaccgaacaaguugauacaauuauggagaagaacgugacuguaacgcaugcacaggacaucuuggaaaagacccacaauggaaaauuauguaaccuggauggugugaaaccccuaauucucaaggacugcucugucgccggcuggcugcuugggaauccuaugugugaugaguuccugaacgugucagaauggaguuauaucguugagaaggcgagcccagcuaauggauugugcuacccgggcgacuuuaacgauuaugaggaacucaaacaucugcuguccagaauaaaucaccucaagaaaaucaagauuauccccaaaucuuacuggucgaaccaugaggccucaagcggugugagugcagccuguuccuauuuaggggaaccuucuuucuuuaggaaugucguguggcugauuaagaagaacaauacauacccacccaucaaaguaaacuauacuaauaccaaccaggaggaccuuuugguucuguggggaauacaccacccuaacgaugagaaggaacagauucggaucuaccaaaauccaaacacaagcauuuccgugggcaccucaacucuaaaucagcgccucguccccaaaaucgcuacacgaccuaaggugaacggccagagugggcguauggaguucuuuuggaccauccugaaaccaaaugacagcauuaacuucgauucuaauggaaacuuuauagcaccggaauacgccuauaagaucgcuaaaaagggugacuccgugauuaugaagucagagcuugaauacggcaauugcaacacgaaaugucagacucccaugggggccaucaauagcaguaugccuuuccauaacauacacccacugaccauuggagagugccccaaguaugucaaaucuaauagauugguucucgcgacaggccugaggaacgcaccucaaacugagacccgggguuuauuuggggccaucgcuggauucaucgaaggcggcuggcaggggaugguggauggaugguacgguuaucaucacuccaaugagcagggcagcggguacgccgcagacaaggaaucgacacagaaagcuauugacggaaucaccaacaagguaaacucuauuauagauaagaugaauacgcaauuugagaucgugggccgcgaguucaacaaucuggaaagaaggauugagaaccucaauaaaaagauggaagacgguuuucuugaugucuggacuuauaacgccgagcuguuggugcuaauggaaaaugagcggacacuggacuuccacgauuccaacguuaaaaaucucuacgaaaaggugcgccugcagcuucgagacaacgcgaaagagcuggggaauggcuguuucgaguuuuaccauaagugcgauaacgaauguauggagucagucagaaauggaaccuaugacuacccacaguauagugaagaggccagguugagccgggaggaaaucuccggcgugaagauggagucuaugguaacuuaccaaauccucagcauuuauucaacaguugcaaguucccuggcuuuagccauaaugguggcugggcugagccuauggaugugcucuaacggaucacuccagugccguaucuguauuuga

SEQ ID NO: 142036 - RNA, 1704 nt, Artificial Sequence
  derived and/or modified CDS sequence (opt3) from hemagglutinin__InfluenzaA__AGZ62382
auggagaagaucgugcuccuguucgccgcuauuagccuugucaaauccgaccacauaugcaucggcuaccaugcaaacaauucuaccaagcagguugauacaauuauggaaaagaacgugacuguaacgcacgcccaagacauccuggagaagacccauaaugggaaauugugugauuuaaacggagugaagccccugauucuaaaggacugcucagucgcggguuggcuccugggcaauccuaugugugaugaauuuaucaacgugccagaguggaguuauauaguugaaaaagcuaauccggccaacgggcuuugcuaccccggaaauuucaacgacuaugaggagcugaagcacuugcucagcagaaucaaucauuuugagaaaauuaggaucauuccuaaggauuccuggucugaccacgaagcaucgcugggcgugucagccgcuuguccauaccaggguaacagcaguuucuuucggaaugucguguggcugaucaaaaaggauaacacauaucccacuauaaagaaauccuacaauaacaccaaccaggaagaccucuuaauucugugggggauccaccauccuaaugaugaggcagagcagacacgccuuuaucaaaacccaaccacuuacauuucuaucggaacaagcaccuugaaucagcgacugguacccaagaucgccacgcguuccaaaauuaacggccagucaggcagaauagacuucuuuuggacuauccuaaagccuaaugaugcuauucacuucgaaaguaacgggaauuuuaucgccccagaguacgcguauaaaauaguuaagaaaggagacagcaccauuaugaagucugaaguggaguacgguaacugcaauacaaggugucagacuccgaucggcgcaaucaacuccucaaugcccuuccauaauauucacccucucaccaucggggaaugcccaaaguaugucaaaagcaacaagcuggugcuugccacaggacugcggaauaguccccaacgcgagagaaggcggaaacgcggcuuguuuggugcuauugccggguucauagagggaggcuggcagggcaugguggacgggugguacggauaucaccauucuaacgaacaggguuccggcuacgcagcugauaaggagagcacccagaaagccaucgacggggucacgaauaagguuaacucgauuaucgauaagaugaacacucaauuugaagcggugggacgagaguucaauaaccucgaaagaaggaucgagaaucugaacaaaaagauggaggacggcuucuuagauguauggacauauaaugccgaacugcucgugcuuauggagaacgaacggacccuggacuuucacgauucuaauguccguaacuuguacgacaaagugcgccuacagcugaaggauaaugcaaaagagcucgguaacggguguuucgaauuuuaccauaagugcaauaacgaguguauggaguccguuagaaauggcacuuaugacuacccucaguauucagaagaggcuaggcugcggcgagaagagauuaguggagugaaacuugagagcauaggcaucuaccaaauucuguccaucuauucuacagucgccagcucauuggugcucgcuauuaugauggccgggcugaguuuauggaugugcuccaacggaagccugcagugccgcaucuguauauga

SEQ ID NO: 142037 - RNA, 1704 nt, Artificial Sequence
  derived and/or modified CDS sequence (opt3) from hemagglutinin__InfluenzaA__ABG67978/m
auggagaagaucgugcugcuccuugccauugucagccugguuaaauccgaccagauaugcaucggcuaccacgcuaacaauucuaccgaacaaguggauacaauuauggagaagaacguaacugugacgcaugcacaggacaucuuggaaaagacccacaaugggaaguuaugugaucuggacggagucaaaccccuaauucucagagauugcucaguggccgguuggcugcuuggcaacccuaugugugacgaguucaucaauguuccagaauggaguuauauaguggagaaggcgaacccggcuaaugaucugugcuaccccgggaacuuuaaugacuaugaggaauugaagcaucuccugagcaggaucaaccacuucgagaaaauucagaucauuccuaaguccucuuggucggaucaugaagccucaagcggagucaguuccgcauguccauaccagggcacacccagcuuuuuccggaaugugguauggcugaucaaaaagaacaauacuuauccuaccauaaaacgcucuuacaacaauacaaaccaagaggaccucuuaauucugugggguauccaccacuccaacgaugccgcugagcagaccaaacuuuaucagaauccaacuacauacauuucaguugggaccaguacguugaaccagcgacuggugcccaagaucgcaacucguagcaaagucaauggacaaucuggcagaauggacuuuuucuggaccauccuaaagccuaacgaugccauuaauuuugaauccaacggcaauuucauagcuccagaguacgccuauaaaaucgugaagaaaggggacucagcgauuaucaagagcgaaguggaguacggaaacugcaauacaaaaugucagacuccgauaggugcaauuaacaguucuaugcccuuucauaauauccacccucucaccaucggcgaaugcccaaaguaugucaaguccaacaaacugguucuugccacagggcugaggaauagccccuugcgggagcgcagaaggaagcggggacucuucggcgcuauugccgguuuuaucgaagggggauggcagggcaugguggacggcugguacggguaucaucacucgaacgaacagggaucugguuacgcagcugauaaagaguccacccaaaaggccauugacggcguaacgaauaaagugaacucaauaaucgauaagaugaacacucaguucgaagcggucgggcgcgaguuuaauaaccuggaacgaagaauugagaauuuaaacaagaaaauggaggacggauuccuggauguguggacauauaaugccgaacuccuuguucugauggagaacgaaaggaccuuggacuuccacgauaguaaugugaagaaccuauacgacaaaguccggcugcagcuccgugauaaugcaaaggagcugggcaacgguuguuuugaguucuaccauaaaugcgacaaugaguguauggagagcgugcgcaacgggacuuaugauuacccucaauauuccgaagaggcuagacuuaagagggaagagaucucuggcguaaagcuggagagcaucggaacauaccagauuuugucaauauauaguaccguugccuccagccucgcucuggccaucaugguggcaggcuuaucucuguggaugugcucaaaugggagucuacagugccggauuuguaucuga

SEQ ID NO: 142038 - RNA, 1695 nt, Artificial Sequence
  derived and/or modified CDS sequence (opt3) from hemagglutinin__InfluenzaA__EPI827075
auggagaagaucgugcuacucuucgccaccauuagccuugucaaauccgaccacauaugcaucggcuaccaugcuaacaauucuacagaacagguugauacuauuauggagaagaacgugacgguaacccacgcacaagacauccuggaaaagacacauaaugggaaguugugugauuuaaacggagugaaaccccugauucuaaaggacugcucagucgccgguuggcuccugggcaauccucuuugugaugaguuuacuaacgugccagaauggaguuauaucguugagaaggcgaauccggcuaacgaccugugcuaccccgggaauuucaacgauuaugaggaauugaaacaccuccugagcagaauaaaucauuuugagaagauccagauuaucccuaaagacuccuggucugaucacgaagccucgcugggagugucagcagccuguagcuaccagggcaacaguuccuucuuuaggaaugucguguggcucauuaagaaagacaacgcuuauccaaccaucaagaaggguuacaauaacacaaaccgggaggauuuacugauacuuugggggauucaccaucccaaugacgaggcagaacagacccgcuuguaucaaaacccuacuacauacaucucuauuggaaccagcacgcugaaucagcgacugguaccaaaaaucgccacucguuccaagaucaacggccagucaggcagaauugauuucuuuuggaccauacucaaacccaaugacgcuauccacuucgagaguaacgggaauuuuauugccccugaauacgcguauaagaucguuaaaaagggagacagcacaauaaugaggucugagguggaauacgguaacugcaauacucggugucagaccccaauuggcgcaaucaacuccucaaugccguuccauaauauccacccccugacaauuggggagugcccuaaauaugucaagagcaacaaacuugugcuggccaccggauugcgcaauaguccacaaagagagacgaggggccucuuuggugcuaucgccggguucauugaaggaggcuggcagggcaugguggaugggugguacggauaucaccauucuaacgagcaggguuccggcuacgcagcugacaaagaaagcacucagaaggccauagauggggucacaaauaaaguuaacucgaucauugacaagaugaacacccaauuugaggcggugggacgggaguucaauaaccuggaacgccgaaucgagaauuuaaacaaaaagauggaagauggcuuccuggacguauggacuuauaaugccgagcuccuugugcugauggaaaacgagagaacauuggauuuucacgacucuaaugucaagaaccuauacgauaaagugaggcugcagcucaaggacaaugcaaaagaacuggguaacggguguuucgaguuuuaccauaagugcaauaacgaguguauggaauccguucggaauggcaccuaugauuacccccaguauucagaggaagcucgucuuaaacgcgaggagaucaguggagugaagcuggaaagcauuggcauauaccaaaucuuguccauuuauucuacggucgccagcucacucgugcuggcuaucaugauggccggguuaagucuguggaugugcuccaacggaagccuacagugcagaauuuguaucuga

SEQ ID NO: 142039 - RNA, 1707 nt, Artificial Sequence
  derived and/or modified CDS sequence (opt3) from hemagglutinin__InfluenzaA__ABP96850
auggagaagaucgugcugcuccuugccauugucagccugguuaaauccgaccagauaugcaucggcuaccacgcuaacaauucuaccgaacaaguggauacaauuauggagaagaacguaacugugacgcaugcacaggacaucuuggaaaagacccacaaugggaaauuaugugaucuggacggagucaaaccccuaauucucagagauugcucaguggccgguuggcugcuuggcaacccuaugugugacgaguuccugaauguuccagaauggaguuauaucguggagaagauaaacccggcgaaugauuugugcuaccccggggacuuuaacgauuaugaggaacucaagcaucugcugagcaggaucaaucacuucgagaaaauucagaucauuccuaaguccucuuggucggacuacgaggcuucaagcggagucaguuccgccuguccauaucagggccggucuagcuuuuuccgcaacgugguauggcucaucaaaaagaauaacgcauaccccacaauaaaacgauccuauaauaacacuaaucaagaagauuuacugguucuuugggguauucaucacccuaacgacgccgcugagcagauccguuuguaccagaacccaaccacauacauuucaguggggaccaguacucugaaucagaggcuaguccccaagaucgcaacaagaagcaaggugaacggacaaucuggccggauggaauuuuucuggaccauccucaaauccaaugaugccauuaacuuugagucaaauggcaacuucauagcuccugaauaugccuacaagaucgugaaaaagggggacagcacgauuaugaaaagugagcuggaauauggaaauugcaacacuaagugucagaccccaaucggugcgauaaauucuuccaugccguuucacaacauucauccccuuacaaucggcgagugcccuaaauacgucaagagcaaucgccugguuuuggcaacugggcucagaaacucgccacagggagagaggcggcgccgaaagagaggccuguucggugccaucgcuggguuuauugaaggaggcuggcagggcaugguggacgggugguauggauaccaccauucuaaugagcaagguuccggcuaugccgcagauaaagaaucaacccagaaggcuaucgacgggguaacaaacaaagugaauaguauuauaaacaagaugaacacccaguucgaggccgucggaagggaauuuaauaacuuagagcggcguaucgagaaucugaacaaaaagauggaagauggcuuccucgacguguggacguacaaugcggagcuucugguuuugauggaaaacgagcgcacucuagauuuccacgacagcaaugugaagaaccuguacgauaaagucagacuccaacugagggacaaugccaaggaacuugguaacggguguuuugaguucuaucaccggugcgauaaugaguguauggaauccgugcgaaacggcacauacgacuauccccaguacucugaggaagcacgccugaaaagagaggagauuagcggaguaaaguuggaaucaaucggcaucuaucagauucucaguauauacuccaccguugcuagcucucuggccuuagcuaucaugguggccgggcuguuucuauggaugugcucaaauggaagucuccagugcaggauuuguaucuga

SEQ ID NO: 142040 - RNA, 1692 nt, Artificial Sequence
  derived and/or modified CDS sequence (opt3) from hemagglutinin__InfluenzaA__EPI827077
auggagaagaucgugcugcuccuugccauugucagcauaguuaaauccgaccagaucugcauuggcuaccacgcuaacaauucuaccgaacaaguggauacaaucauggagaagaacguaacugugacgcaugcacaggacauucuggaaaagacccacaaugggaaauuguguaacuuagauggagucaaaccccugauccuaagagacugcucaguggccgguuggcuccugggcaauccuaugugugaugaguuccuuaacguuccagaauggaguuauauaguggagaagaucaauccggcgaacgaccugugcuaccccgggaauuuuaacgauuaugaggaauugaagcaucuccugagcaggauuaaucacuucgagaaaauccagauuaucccuaaggacuccuggucugaucaugaggcuucgggagucucaagcgccuguccauaccagggccggaguuccuuuuuccgcaacgugguauggcugacuaaaaagaaugacgcauaucccacaauuaaaaagucuuacaacaauaccaaccaagaagaucucuuaguucugugggguauacaccacccuaacgacgccgcugagcagacacgacuuuaucagaauccaaccacuuacaucagcguggggacauccaccuugaaccagcgucugguccccaagauugcaacgagaucaaaagugaauggacaaaguggcaggauggaauuuuucuggacuauccuaaagagcaacgaugccaucaauuuugagucuaacggcaauuucauugcuccugaaaacgccuacaaaauagugaagaaaggggacuccaccaucaugaagucagagcucgaauauagcaauugcaacacaaaaugucagacuccaauuggagcgaucaauaguucuaugccguuucauaacauacacccccugaccauuggugagugcccuaaguacgucaaguccaaucggcuuguucuggcaacaggcuugcgcaacagcccacagagagagaccaggggacucuucggggccaucgcuggcuuuaucgaagguggguggcagggaaugguggacggcugguauggcuaccaucacucgaaugagcaagggucuggauaugccgcagauaaagaauccacgcagcgggcuauugacgguguaacuaacaaggugaacucaaucauugauaaaaugaauacacaguucgaggccgucggccgcgaauuuaacaaucuggagcgaagaauagagaacuuaaauaagaaaauggaagacggguuccuggauguguggaccuacaacgcggagcuccuuguucugauggaaaaugagaggacuuuggacuuccacgauaguaacgugaagaaucuauaugacaagguccggcugcaacuccgugauaacgccaaagaacugggaaauggcuguuuugaguucuaccaucgcugcgacaacgaguguauggaaagcgugagaaaugguacauacgauuauccccaguacuccgaggaagcaaggcuuaagcgggaggagaucucugggguaaaacuggaaagcauuggcaccuaucagaucuugucaaucuacaguacgguugcuuccagccucgcccuggcuauuaugguggccggauuaucucuguggaugugcucaaacggcagucuacagugccgaauauguaucuga

SEQ ID NO: 142041 - RNA, 1704 nt, Artificial Sequence
  derived and/or modified CDS sequence (opt3) from hemagglutinin__InfluenzaA__EPI594523
auggagaagaucauucugcuccuugccauaaucggccuggugaaaagcgaccagauuugcgucggguaccacgcuaacaauuccaccgaaagaguugauacaaucauggagaagaacgugacuguaacgcaugcacaagacauuuuggagaaaacccacaauggaaaguuauguaaccugaauggugugaaaccccuaauccucgaagauugcucugucgccggcuggcugcuugggaacccuaugugugacaaguuccugaaugugucagaauggaguuauauaguugagaaggcgggaccagcuaacggcuugugcuacccgggugauuuuaaugacuaugaggaacucaaacaucugcugagcaggaucaaccacuucgagaagauugaaaucauucccaaaaaucauugguccaaccacaauacaucuggggugucgucagccuguagcuaccucgagaacccuuccuuuuuccggaaugucgugugguuaacuaagaaaaacaacaccuauccaacaaucaagguaaauuacaccaacgcaaaucagaaggaucugcuuguuuuguggggaauacaccaucccaacaaugaggccgaacagaaaaugauuuaucagaacaguaauacuuacgugucugucggcacaagcacccugaaccaacgccuagugccuaagaucgcuacgcgauccaaagugaauggccagucagggcguauugacuuuuucuggacuauccucaagccaaacgauaccaucaauuuugacaguaacggaaauuucauugcacccaaauacgccuauaagauagucaaaaagggugauagcgcuaucaugaagucugagcugaaauacgacaacugcaauacaaagugucagacuccuauuggcgccaucaacuccucaaugccauuucacaacauacauccgcuuaccauuggggaaugccccaaauauguuaagagcaauagacugguguuggcgacaggacucaggaacgcaccucagaucgagggccggcgcagaaaaaggggucuguucggggccaucgcuggauuuauugaaggcggcuggcaagggaugguagauggaugguacgguuaucaccacaguaaugagcagggcucuggguacgccgcagacaaggaguccacccagaaggcuguggacggaaucacgaacaaaauuaauagcauaaucgauaagaugaacaaucaguucgaagccgucggccgggaguuuaacaauuuagaacgccgaauugagaaccugaauaaaaagauggaagacgguuuccucgauguguggacuuauaacgcggagcuucugguuuugauggagaaugaaagaacacuagacuuccaugauucgaacgugaaaaaucuguacgagaaggucaggcuccaacugcgggacaacgccaaggaacuugggaacggcuguuuugaguucuaccacaaaugcgauaaugaauguauggagucugugaagaacggaaccuaugacuacccacaguauuccgaggaagcacgucugaaucgcgaggaaaucucaggcguaaaauuggagaguacuguuacauaccagauccucagcauuuauuccaccguggcuucuagccuggucuuagccauaaugguggcugggcugucacuauggaugugcaguaacggaucccuccaaugcagaaucuguauuuga

SEQ ID NO: 142042 - RNA, 1707 nt, Artificial Sequence
  derived and/or modified CDS sequence (opt3) from hemagglutinin__InfluenzaA__AAD37782
auggagagaaucgugcugcuccuugccauugucagccugguuaaguccgaccagauaugcaucggcuaccacgcuaacaauucuaccgaacaaguggauacaauuauggagaaaaacguaacugugacgcaugcacaggacaucuuggaaaagacccacaaugggaaauuaugugaucugaacggagucaagccccuaauucucagggacugcucaguggccgguuggcugcuuggcaauccuaugugugaugaguucaucaacguuccagaauggaguuauauaguggagaaagcgagcccggcuaaugaccugugcuaccccggggauuuuaacgacuaugaggaauugaagcaucuccugucccggacaaaucacuucgagaagauccagauuaucccuccaucuucguggucaaaccaugaugccagcaguggagucuccucugcaugucccuaccacggccgcagcuccuuuuuccgaaaugugguauggcugauuaaaaagaacucagccuauccuacuaucaaacguaguuacaauaacaccaaucaggaagaccucuuaguucugugggguauacaccauccaaacgaugcugcagagcaaacaaaacuuuaucagaaccccaccacuuacauuagcguggggacaucuaccuugaaucagagacuggucccugagaucgccacgaggccaaaagugaacggacaguccggccggauggaauuuuucuggacuauucuaaagccgaaugacgcuaucaacuuugagucaaauggcaacuucaucgcccccgaauacgcguauaagauugugaaaaagggggauagcgcaauaaugaaaagugagcucgaauacggaaauugcaacaccaagugucaaacaccuaugggugccaucaauucuuccaugccauuucacaacauucauccccugacuaucggcgagugcccuaaauaugucaagagcaaucgccuuguucuggcuaccggguugagaaacacaccacagagggagcggcgccgaaagaagagaggacucuucggcgccauagcagguuuuauugaagggggauggcagggcauggugaauggcugguacggguaucaccacucgaacgagcagggaucugguuacgcugccgacaaggaauccacccaaaaagcgaucgacggcguaacgaauaaggugaacucaaucauugauaaaaugaacacucaguucgaggccgucgggagggaauuuaauaaccuggagcggcguaucgagaauuuaaacaagcagauggaagacggauuccuggauguguggacauauaaugcagagcuccuuguucugauggaaaacgagcgcaccuuggacuuccaugauaguaaugugaaacaccuauacgacaaggucagacugcaacucagggauaacgcuaaggaacugggcaaugguuguuuugaguucuaccauaaaugcgacaacgaguguauggaaagcgugaagaaugggacuuaugauuacccccaguauuccgaggaagcccggcuuaaccgagaggagauuucuggcguaaaacuggaaagcaugggaacauaccagauauugucaaucuauaguaccguugcuuccagccucgcccuggcaauuaugguggccggcuuaucucuguggaugugcucaaaugggagucuacagugccgcaucuguaucuga

SEQ ID NO: 142043 - RNA, 1707 nt, Artificial Sequence
  derived and/or modified CDS sequence (opt3) from hemagglutinin__InfluenzaA__AAD51927
auggagaagaucgugcugcuccuugccauugucagccugguuaaauccgaccagauaugcaucggcuaccacgcuaacaauucuaccgaacaaguggauacaauuauggagaagaacguaacugugacgcaugcacaggacaucuuggaaaagacccacaaugggaaguuaugugaucugaacggagucaaaccccuaauucucagagacugcucaguggccgguuggcugcuuggcaauccuaugugugaugaguucaucaacguuccagaauggaguuauauaguggagaaggcgagcccggcuaaugaccugugcuaccccggggauuuuaacgacuaugaggaauugaagcaucuccuguccaggacaaaucacuucgagaaaauccagauuaucccuaagucuucguggucaaaccaugaugccagcaguggagucuccucugcauguccauaccacggccggagcuccuuuuuccgcaaugugguauggcugauuaaaaagaacucagccuaucccacuaucaaacgaaguuacaauaacaccaaucaggaagaccucuuaguucugugggguauacaccauccuaacgaugcugcagagcaaacaaaacuuuaucagaacccaaccacuuacauuagcguggggacaucuaccuugaaucagcgucugguccccgagaucgccacgagaccuaaggugaacggacaguccggcaggauggaauuuuucuggacuauucuaaaaccaaaugacgcuaucaacuuugagucaaauggcaacuucaucgccccggaauacgcguauaagauugugaaaaagggggauagcgcaauaaugaaaagugagcucgaauacggaaauugcaacaccaagugucaaacacccaugggugccaucaauucuuccaugccuuuucacaacauucauccacugacuaucggcgagugccccaaauaugucaagagcaaucggcuuguucuggcuaccggguugcgcaacacaccucagagagagaggcggcgcaagaaacgaggacucuucggcgccauagcagguuuuauugaagggggauggcagggcaugguggacggcugguacggguaucaccacucgaaugagcagggaucugguuacgcugccgacaaggaauccacccaaaaagcgaucgauggcguaacgaacaaggucaauucaaucauugacaaaaugaacacucaguucgaggccguggggagagaauuuaacaaucuggagaggcggaucgagaacuuaaauaagcagauggaagauggauuccuggacguguggacauauaacgcagagcuccuuguucugauggaaaaugagcguaccuuggauuuccaugacaguaacgugaagaaucuauacgauaaaguccgccugcaacucagagacaacgcuaaggaacugggcaaugguuguuuugaguucuaccacaaaugcgauaacgaguguauggaaagcgugaagaaugggacuuaugacuacccacaguauuccgaggaagccaggcuuaaccgggaggagauuucuggcguaaaacuggaaagcaugggaacauaccagauauugucaaucuauaguaccguugcuuccagccucgcccuggcaauuaugguggccggcuuaucucuguggaugugcucaaaugggagucuacagugccgaaucuguaucuga

SEQ ID NO: 142044 - RNA, 1704 nt, Artificial Sequence; identical to SEQ ID NO: 135765
  derived and/or modified CDS sequence (opt3) from hemagglutinin__InfluenzaA__AEO89181

SEQ ID NO: 142045 - RNA, 1707 nt, Artificial Sequence; identical to SEQ ID NO: 137219
  derived and/or modified CDS sequence (opt3) from hemagglutinin__InfluenzaA__AFM78567

SEQ ID NO: 142046 - RNA, 1707 nt, Artificial Sequence
  derived and/or modified CDS sequence (opt3) from hemagglutinin__InfluenzaA__ACR48872
auggagaagaucgugcugcuccuugccauugucagccugguuaaauccgaccagauaugcaucggcuaccacgcuaacaauucuaccgaacaaguggauacaauuauggagaagaacguaacugugacgcaugcacaggacaucuuggaaaagacccacaaugggaaauuaugugaucuggacggagucaaaccccuaauucucagagauugcucaguggccgguuggcugcuuggcaacccuaugugugacgaguucaucaauguuccagaauggaguuauauaguggagaaggcgaacccgacaaaugaucugugcuaccccgggagcuuuaacgacuaugaggaauugaagcaucuccuguccaggaucaaucacuucgagaaaauucagaucauuccuaagucuucguggucagaucaugaagcuagcaguggagucuccucugccuguccauaccugggcagccccuccuuuuuccggaacgugguauggcucaucaaaaagaacucaacuuauccuaccauuaaaaagaguuacaauaauacaaaccaggaggacuuacugguucuuugggguauacaccacccaaaugaugcagccgagcaaaccauguuguaucagaaccccacuacauacaucagcauugggaccucuacgcugaaccagcgccuagugccuaagaucgcuacucgauccaaagucaauggacagucaggccguauggaauuuuucuggaccauccucaagccaaacgacgcaauuaauuuugagagcaacggcaauuucauagccccggaauacgcuuauaaaaucgugaagaaaggggauagugccauuaugaagucugagcuggaauacggaaacugcaauacaaaaugucaaacucccaugggugcgaucaacuccagcaugccuuuucauaauauacacccacuuaccauuggcgagugccccaaguaugugaagucgaacagacuggucuuggcaacagggcucagaaauucuccucagcgggagucccgcaggaaaaagaggggacuguucggcgccaucgcugguuuuaucgaagggggauggcagggcaugguugacggcugguacggguaucaucacucaaacgagcagggaagugguuacgccgcagacaaagaaagcacccaaaaggcuauugauggcgugacgaauaaaguaaacuccaucauugacaagaugaauacucaguucgaggccguggggcgggaauuuaacaacuuagagcgccgaauagagaaucugaacaagaaaauggaagauggauuccucgacgucuggacauauaaugcggagcuucugguguugauggaaaacgagagaacccuagauuuccacgacucuaauguuaagaaccuguacgauaaagugaggcuccagcugcgggacaaugccaaggaacuuggcaacgguuguuuugaguucuaccauaaaugcgauaaugaguguauggaaagcauccguaacgggacuuauaauuacccacaauauucagaggaagcacgccugaagagagaggagauuaguggcgucaaguuggaauccaucggaacauaccagauccucagcauuuauucuaccguggcuucaagucuggccuuagcuauaaugauggccggccugagccuauggaugugcuccaacgggucucuccagugcaggaucuguauuuga

SEQ ID NO: 142047 - RNA, 1707 nt, Artificial Sequence; identical to SEQ ID NO: 137219
  derived and/or modified CDS sequence (opt3) from hemagglutinin__InfluenzaA__ABW06108

SEQ ID NO: 142048 - RNA, 1707 nt, Artificial Sequence
  derived and/or modified CDS sequence (opt3) from hemagglutinin__InfluenzaA__EPI341633
auggagaagaucacccugcuccuuagcauugugucccuggucaaaucugaccagauaugcaucggcuaccacgccaacaauucaacagaacaaguugauacuauuauggagaagaacgugacgguaacccaugcucaggacaucuuggaaaagacacacaaugggaaauuaugugaucuggacggagugaaaccccuaauucucaaggauugcagugucgcagguuggcugcuuggcaacccuaugugugacgaguucaucaaugugccagaauggagcuauauaguugagaaggccaacccgacuaaugaucugugcuaccccggguccuuuaacgacuaugaggaauugaaacaucuccugucuagaaucaaucacuucgagaagauucagaucauuccuaaaucgucauggagcgaucaugaagcgaguuccggagugucuagcgcuuguccauaccugggcucccccucauuuuucaggaacgucguguggcucaucaagaaaaauaguaccuauccuacaauaaagaagaccuacaacaauacuaaccaggaggacuuacugauucuuugggguauccaccacccaaauaacggggccgagcaaacaauguuguaucagaaccccaccacguacauuagcaucggaacuucuacccugaaucagcggcuaguaccuaaaaucgcaacacgcuccaagguuaacggccagucaggccgaauggaauuuuucuggacuauucucaaaccaaaugaugccauaaacuuugagagcaaugggaacuucaucgcuccggaauacgcauauaagauugugaaaaagggagacagugccaucaugaaaucugagcuggaauacgguaauugcaacaccaagugucaaacacccaugggcgcuauaaauuccagcaugccuuuucauaacauucacccaaucaccaucggggagugccccaaguaugucaaaucgaaucgucuugugcuggccacgggauugagaaacucuccucagagggagucccggcgcaagaaaagaggccucuucggugcgauugcaggguuuaucgaaggaggcuggcagggcaugguggaugggugguacggauaucaucacucaaaugagcaggguaguggcuacgccgcugacaaggaaagcacucaaaaagccauugacggggucacaaacaagguuaauuccauaaucgauaagaugaacacccaguucgaggcagugggaagggaauuuucuaaccuggagcggcgcauugagaauuuaaacaaaaagauggaagacggcuuccuggauguauggacuuauaaugcugagcuccuugugcugauggaaaacgagcgaacauuggacuuccacgauagcaaugucaaaaaccuauacgacaaggugagacugcagcucagggauaaugccaaagaacuggguaacggguguuuugaguucuaccauaagugcgacaaugaguguauggaaucaauccggaacggcaccuauaauuacccacaauauagugaggaagcgcgucuuaagcgcgaggagaucuccggaguuaaacuggaaagcauuggcacguaccagauauugucuaucuauucaaccguggccaguagccucgcacuggcuauuaugaucgccggguuaucccuguggaugugcucuaacggaucgcuacagugcagaauuuguaucuga

SEQ ID NO: 142049 - RNA, 1707 nt, Artificial Sequence
  derived and/or modified CDS sequence (opt3) from hemagglutinin__InfluenzaA__ABD95991
auggagaagaucaugcugcuccuugccauugugagccuggucaaauccgaccagauaugcaucggcuaccacgcuaacaauucuaccgaacaaguugauacaauuauggagaagaacgugacuguaacgcaugcacaggacaucuuggaaaagacccacaaugggaaauuaugugaucuggacggagugaaaccccuaauucucagagauugcucagucgccgguuggcugcuuggcaacccuaugugugacgaguuccugaaugugccagaauggaguuauaucguugagaagauaaacccggcgaaugauuugugcuaccccgggaacuuuaaugacuaugaggaacucaagcaucugcugagcaggaucaaccacuucgagaaaauucagaucauuccuaaguccucuuggucggaucaugaagcuaguagcggagugaguuccgccuguccauaccagggccggucuagcuuuuuccgcaaugucguguggcucaucaaaaaggacaacgcauaucccacaauaaaacgauccuacaauaacacuaaucaagaggauuuacugguacuuugggguauucaccacccuaacgacgccgcugagcagacccguuuguaucagaacccaacaaccuacaucucaguugggacuucaacacugaaucagaggcuagugcccaagauugcaaccagaagcaaggucaacggacaaucuggccggauggaauuuuucuggacgauccucaaaccuaaugaugccaucaacuuugaguccaauggcaacuucauugcuccagaaaaugccuacaagauagugaaaaagggggacucaacuaucaugaaaagcgagcuggaauauggaaacugcaauaccaagugucagacaccgauuggugcgaucaacaguucuaugcccuuucauaauauacacccucuuacuauuggcgagugcccaaaauacgugaaguccaaccgccuggucuuggcaaccgggcucagaaauagcccccagggagagaggcggcgcaagaaacgaggccuguucggugccaucgcuggguuuaucgaaggaggcuggcagggcaugguugacgggugguauggauaccaucacucgaacgagcaagguucuggcuaugccgcagauaaggaauccacacagaaagcuauugacggggugaccaauaagguaaacucaaucauugauaaaaugaacacgcaguucgaggccgugggaagagaauuuaauaacuuagagaggcggauagagaaucugaacaagaagauggaagacggcuuccucgaugucuggacuuacaaugcggagcuucugguguugauggaaaacgagcguacacuagacuuccacgauaguaauguuaaaaaccuguaugacaaggugcgccuccaacugagagauaaugccaaagaacuugguaacggguguuuugaguucuaccauaggugcgacaaugaguguauggaaagcguccggaacggcaccuacgauuauccucaguacuccgaggaagcacgacugaagcgcgaggagaucucuggagugaaauuggaaagcauuggcacuuaucagauccucucaaucuacaguacaguagcuuccagccuggccuuagcuauuaugguugccgggcugucucuauggaugugcucaaauggaagucuccagugcagaauauguaucuga

SEQ ID NO: 142050 - RNA, 1707 nt, Artificial Sequence
  derived and/or modified CDS sequence (opt3) from hemagglutinin__InfluenzaA__AGN69453
auggagaagaucgugcugcuccuugccauugucagccugguuaaauccgaccagauaugcaucggcuaccacgcuaacaauucuaccgaacaaguggauacaauuauggagaagaacguaacugugacgcaugcacaggacaucuuggaaaagacccacaaugggaaguuaugugaucuggacggagucaaaccccuaauucucagagauugcucaguggccgguuggcugcuuggcaacccuaugugugacgaguuccugaauguuccagaauggaguuauaucguggagaagauaaacccggcgaaugauuugugcuaccccgggaacuuuaaugacuaugaggaacucaagcaucugcugagcaggaucaaccacuucgagaaaauucagaucauuccuaaguccucuuggucggaucaugaagcuagugccggagucagcagugcauguccauaccagggcauguccagcuuuuuccggaaugugguauggcucaucaaaaaggacaacgccuaucccacaauaaaacgcucuuacaauaacacuaaucaagaggauuuacugguucuuugggguauucaccacccuaacgacgcugcagagcagaccaaguuguaucagaacuccacaaccuacaucucaguggggacuucaacacugaaucagcgucuagucccaaagauugccacccgaagcaaagugaacggacaaucuggcagaaucgaauuuuucuggacgauccucaagcccaaugauacuauuaacuuugaguccaauggcaacuucauagcuccugaaaaugccuacaaaaucgugaagaaaggggacucaaccauuaugaaaagcgagcuggaauauggaaacugcaauacaaaaugucagacuccaaucggugcgauaaacaguucuaugccguuucauaauauucacccccuuaccaucggcgagugcccuaaguacgucaaguccagcaggcugguuuuggcaacagggcuccggaacucgccacagggagagcgcagaaggaaaaagcggggccuguucggugccaucgcuggguuuauugaaggaggcuggcagggcaugguggacgggugguauggauaccaucacucuaaugagcaagguuccggcuaugccgcagauaaagaaucaacccagaaggcuaucgacgggguaacgaacaaagugaauaguauuauagauaagaugaacacucaguucgaggccgucggacgcgaauuuaacaauuuagagcgaagaaucgagaaccugaauaagaaaauggaagacggcuuccucgauguguggacauacaacgcggagcuucugguuuugauggaaaaugagaggacccuagacuuccacgauagcaacgugaagaaucuguaugacaaaguccggcuccaacugcgugauaacgccaaggaacuugguaauggguguuuugaguucuaccaucgcugcgacaacgaguguauggaauccgugagaaauggcacuuacgauuauccccaguacucugaggaagcaaggcugaaacgggaggagauuagcggaguaaaguuggaaucaaucggcacauaucagauccucaguauuuacuccaccguugcuagcucucuggccuuagcuauaaugguggccgggcugucacuauggaugugcaguaacggaagccuccagugccgaaucuguauuuga

SEQ ID NO: 142051 - RNA, 1707 nt, Artificial Sequence
  derived and/or modified CDS sequence (opt3) from hemagglutinin__InfluenzaA__AGN69452
auggagaagaucgugcugcuccuugccauugucagccugguuaaauccgaccagauaugcaucggcuaccacgcuaacaauucuaccgaacaaguggauacaauuauggagaagaacguaacugugacgcaugcacaggacaucuuggaaaagacccacaaugggaaauuaugugaucuggacggagucaaaccccuaauucucagagauugcucaguggccgguuggcugcuuggcaacccuaugugugacgaguuccugaauguuccagaauggaguuauaucguggagaagauaaacccggcgaaugauuugugcuaccccgggaacuuuaaugacuaugaggaacucaagcaucugcugagcaggaucaaccacuucgagaaaauucagaucauuccuaaguccucuuggucggaucaugaagcuagugccggagucagcagugcauguccauaccagggccgguccagcuuuuuccgcaaugugguauggcucaucaaaaaggacaacgccuaucccacaauaaaacgaucuuacaauaacacuaaucaagaggauuuacugguucuuugggguauucaccacccuaacgacgcugcagagcagacccguuuguaucagaacuccacaaccuacaucucaguggggacuucaacacugaaucagaggcuagucccaaagauugccaccagaagcaaggugaacggacaaucuggccggaucgaauuuuucuggacgauccucaaacccaaugauacuauuaacuuugaguccaauggcaacuucauagcuccugaaaaugccuacaagaucgugaaaaagggggacucaaccauuaugaaaagcgagcuggaauauggaaacugcaauacaaagugucagacuccaaucggugcgauaaacaguucuaugccguuucauaauauucacccccuuaccaucggcgagugcccuaaauacgucaaguccagccgccugguuuuggcaacagggcucagaaacucgccacagggagagaggcggcgcaagaaacgaggccuguucggugccaucgcuggguuuauugaaggaggcuggcagggcaugguggacgggugguauggauaccaucacucuaaugagcaagguuccggcuaugccgcagauaaggaaucaacccagaaagcuaucgacgggguaacgaacaaggugaauaguauuauagauaaaaugaacacucaguucgaggccgucggaagagaauuuaacaauuuagagaggcggaucgagaaccugaauaagaagauggaagacggcuuccucgauguguggacauacaacgcggagcuucugguuuugauggaaaaugagcguacccuagacuuccacgauagcaacgugaaaaaucuguaugacaagguccgccuccaacugagagauaacgccaaagaacuugguaauggguguuuugaguucuaccauaggugcgacaacgaguguauggaauccgugcggaauggcacuuacgauuauccccaguacucugaggaagcacgacugaagcgcgaggagauuagcggaguaaaauuggaaucaaucggcacauaucagauccucaguauuuacuccaccguugcuagcucucuggccuuagcuauaaugguggccgggcugucacuauggaugugcaguaacggaagccuccagugcagaaucuguauuuga

SEQ ID NO: 142052 - RNA, 1707 nt, Artificial Sequence
  derived and/or modified CDS sequence (opt3) from hemagglutinin__InfluenzaA__ABD73284
auggagaagaucgugcugcuccuugccauugucagccugguuaaauccgaccagauaugcaucggcuaccacgcuaacaauucuaccgaacaaguggauacaauuauggagaagaacguaacugugacgcaugcacaggacaucuuggaaaagacccacaaugggaaauuaugugaucuggacggagucaaaccccuaauucucagagauugcucaguggccgguuggcugcuuggcaacccuaugugugacgaguuccugaauguuccagaauggaguuauaucguggagaagauaaacccggcgaaugauuugugcuaccccgggaacuuuaaugacuaugaggaacucaagcaucugcugagcaggaucaaccacuucgagaaaauucagaucauuccuaaguccucuuggucggaucaugaggcuucagccggagucagcagugcauguccauaccagggccgguccagcuuuuuccgcaaugugguauggcucaucaaaaaggacaacgccuaucccacaauaaaacgaucuuacaauaacacuaaucaagaagauuuacugguucuuugggguauucaccacccuaacgacgcugcagagcagacccguuuguaucagaacccaacaaccuacaucuccguggggacuucaacacugaaucagaggcuaguccccaagauugccaccagaaguaaggugaacggacaaagcggccggauggaauuuuucuggacgauccucaaaccuaaugaugcuaucaacuuugagucuaauggcaacuucauugccccagaaaaugcguacaagauagugaaaaagggggacuccacuaucaugaaaucagagcuggaauauggaaacugcaauaccaagugucagacaccgauuggugcaaucaacagcaguaugcccuuucauaauauacacccucuuacuauuggcgagugcccaaaauacgucaagucuucccgccugguuuuggccaccgggcucagaaacagcccccagggagagaggcggcgcaagaaacgaggccuguucggugcuaucgccggguuuaucgaaggaggcuggcagggcaugguggacgggugguauggauaccaucacucgaaugagcaagguucuggcuaugcagcugauaaggaauccacacagaaagccauugacgggguaaccaacaaggucaauucaaucauugauaaaaugaacacgcaguucgaggcggugggaagagaauuuaacaauuuagagaggcggauagagaaccugaauaagaagauggaagacggcuuccucgauguguggacuuacaacgccgagcuucugguuuugauggaaaaugagcguacacuagacuuccacgauaguaacgugaaaaaucuguaugacaagguccgccuccaacugagagauaacgcaaaagaacuugguaauggguguuuugaguucuaccauaggugcgacaacgaguguauggaaagcgugcggaauggcaccuacgauuauccucaguacuccgaggaagcucgacugaagcgcgaggagaucucuggaguaaaauuggaaagcauuggcacuuaucagauccucucaaucuacaguacaguugccuccagccuggcuuuagccauuaugguggcagggcugucucuauggaugugcucaaacggaagucuccagugcagaauauguaucuga

SEQ ID NO: 142053 - RNA, 1695 nt, Artificial Sequence
  derived and/or modified CDS sequence (opt3) from hemagglutinin__InfluenzaA__ABF93440
auggagaagaucgugcugcuccuugccauugucagccugguuaaauccgaccagauaugcaucggcuaccacgcuaacaauucuaccgaacaaguggauacaauuauggagaagaacguaacugugacgcaugcacaggacaucuuggaaaagacccacaaugggaaauuaugugaucuggacggagucaaaccccuaauucucagagauugcucaguggccgguuggcugcuuggcaacccuaugugugacgaguuccugaauguuccagaauggaguuauaucguggagaagauaaacccggcgaaugauuugugcuaccccgggaacuuuaaugacuaugaggaacucaagcaucugcugagcaggaucaaccacuucgagaaaauucagaucauuccuaaguccucuuggucggaucaugaagcuaguagcggagucaguuccgccuguccauaccagggccggucuagcuuuuuccgcaaugugguauggcucaucaaaaaggacaacgcauaucccacaauaaaacgauccuacaauaacacuaaucaagaggauuuacugguucuuugggguauucaccacccuaacgacgccgcugagcagacccguuuguaucagaacccaacaaccuacaucucaguggggacuucaacacugaaucagaggcuaguccccaagauugcaaccagaagcaaggugaacggacaaucuggccggauggaauuuuucuggacgauccucaaaccuaaugaugccaucaacuuugaguccaauggcaacuucauugcuccagaaaaugccuacaagauagugaaaaagggggacucaacuaucaugaaaagcgagcuggaauauggaaacugcaauaccaagugucagacaccgauuggugcgaucaacaguucuaugcccuuucauaauauacacccucuuacuauuggcgagugcccaaaauacgucaaguccaaccgccugguuuuggcaaccgggcucagaaauagcccccagaucgagacaaggggacuguucggcgccaucgcugguuuuauugaagggggauggcagggcaugguggacggcugguauggguaccaucacucgaacgagcaaggaucugguuaugccgcagauaaggaauccacccagaaagcuaucgacggcguaacgaauaaggugaacucaauuauagauaaaaugaacacucaguucgaggccgucgggcgggaauuuaauaacuuagagcgccgaaucgagaaucugaacaagaaaauggaagacggauuccucgauguguggacauacaaugcggagcuucugguuuugauggaaaacgagagaacccuagacuuccacgauaguaaugugaagaaccuguaugacaaggucaggcuccaacugcgggauaaugccaaagaacuuggcaacgguuguuuugaguucuaccaucguugcgacaaugaguguauggaaagcgugcgcaacgggacuuacgauuauccucaguacuccgaggaagcaagacugaagagggaggagauuucuggcguaaaauuggaaagcaucggaacauaucagauccucucaauuuacaguaccguugcuuccagccuggccuuagcuauaaugguggccggccugucucuauggaugugcucaaaugggagucuccagugccggaucuguauuuga

SEQ ID NO: 142054 - RNA, 1701 nt, Artificial Sequence
  derived and/or modified CDS sequence (opt3) from hemagglutinin__InfluenzaA__AKC45369
auggagaagaucgugcugcuccuugccgucguuagccuggugaaauccgaccagauuugcauaggcuaccacgcuaacaauucuaccgaacaaguagauacaaucauggagaagaacgugacugucacgcaugcacaggacauuuuggagaaaacccacaaugggagauuaugugaucugaacggagugaagccccuaauccucaaagacugcucaguugccgguuggcugcuuggcaauccuaugugugaugaguucauuagggugccagaauggaguuauaucgucgagcgggcgaacccggcuaaugaccugugcuaccccgggaacuugaaugauuaugaggaacucaagcaucugcugagccgcauaaaccacuuugagaagacacucaucauuccuaaauccucuuggccaaaucauacuucgucaggagugagcgccgcaugucccuaccagggcaccccuaguuucuuucgaaacguaguuugguuaacaaagaaaaaugacgccuauccaaccaucaagauguccuacaacaauacuaaccgugaagaucugcuuauuuugugggguauccaccacucuaacaaugcugcagagcagacaaaccuguauaaaaaucccaccacguacgugagcgucgggacuuccacccuaaaccaaagacucgugccuaagauagccacaaggucacaggugaauggacagcggggccgcauggacuucuuuuggacuauucugaagccaaacgaugcuauccauuucgagaguaauggcaacuuuauugccccggaauacgcguauaaaaucgucaagaaaggggacagcaccaucaugaagucugagauggaauacggacacugcaauacaaaaugucagacccccauuggugcaauaaacuccucaaugccuuuccauaauauccacccacuuacgauuggcgagugccccaaguauguuaaaagcaacaagcugguguuggccacugggcucagaaauaguccucugagggaacggcgccgaaagagaggauuauuuggcgcuaucgccgguuucauagaagggggauggcaaggcaugguagauggcugguacggguaucaccauucuaacgagcagggauccgguuacgcagcugacagggaaagcacacagaaagccauugacggcgugaccaauaaggucaacucgaucaucgauaaaaugaacacucaguuugaggcgguggggcgggaguucaauaaccuggaacgucgcauugaaaaucucaacaagaaaauggaggacggauuucuugauguuuggacauauaaugccgagcuguuggugcuaauggaaaacgagagaacccuggacuuccacgauucuaaugucaagaaccucuacgacaaggugaggcugcaacuucgggauaaugcaaaagaacugggcaacgguuguuucgaguuuuaccauaagugcgacaaugaauguauggaguccguacgaaacgggacguaugauuacccacaguauucagaggaagcucgcuugaaaagagaggaaaucaguggcguuaagcucgagagcauuggaaccuaccagauacuguccaucuauucuacaguggccagcucauuagcucuggccauuaucgucgcaggccuaagucucuggaugugcuccaaugggagccugcaaugcaggaucuguauuuga

SEQ ID NO: 142055 - RNA, 1704 nt, Artificial Sequence; identical to SEQ ID NO: 141006
  derived and/or modified CDS sequence (opt3) from hemagglutinin__InfluenzaA__AJS18479

SEQ ID NO: 142056 - RNA, 1704 nt, Artificial Sequence
  derived and/or modified CDS sequence (opt3) from hemagglutinin__InfluenzaA__EPI691378
auggagaagaucgugcugcuccuugccgucguuagccuggugaaauccgaccagauuugcauaggcuaccacgcuaacaauucuaccgaacaaguagauacaaucauggagaagaacgugacugucacgcaugcacaggacauuuuggagaaaacccacaaugggagauuaugugaucugaacggagugaagccccuaauccucaaagacugcucaguugccgguuggcugcuuggcaauccuaugugugaugaguucauuagggugccagaauggaguuauaucgucgagcgggcgaacccggcuaaugaccugugcuaccccgggaacuugaaugauuaugaggaacucaagcaucugcugagccgcauaaaccacuuugagaagacacucaucauuccuaaauccucuuggccaaaucaugaaacuucguuaggagugucagccgcaugucccuaccagggcguaccuagcuucuuucgaaacguuguguggcugaccaagaaaaaugacgccuauccaacaaucaagaugaguuacaacaauaccaaccgugaggaucuuuugauucugugggguauccaccacuccaacaaugcugcagagcagacuaaccuauauaaaaaucccacaaccuacgucucuguggggacgagcacucucaaccaaagacuggugccuaagauagccaccaggucccaggucaauggacagcggggccgcauggacuucuuuuggacaauucuuaagccaaacgaugcuauccauuucgaaucaaauggcaacuuuauugccccggaguacgcguauaaaaucguuaagaaaggggacaguacuaucaugaaaagcgaaauggaguacggacacugcaauaccaagugucagacacccauuggugcaauaaacucuuccaugccuuuccauaauauccacccacugaccauuggcgaaugccccaaguaugugaaaucaaacaaguugguacucgccacggggcugagaaauagcccuuuaagggagcggcgccgaaagagaggacuguuuggcgcuaucgccgguuucauagaagggggauggcaaggcaugguggauggcugguacggguaucaccauaguaacgaacagggaucugguuacgcagcugacagggaguccacucagaaagccauugacggcgucacaaauaaggugaacagcaucaucgauaaaaugaacacccaguuugaagcgguugggcgggaguucaauaaccucgaacgucgcauugagaaucuuaacaagaaaauggaggacggauuucuggauguguggacuuauaaugccgaauugcuaguccugauggagaacgaaagaacacucgacuuccacgauucgaaugugaagaaccuguacgacaagguaaggcuucaacugcgggauaaugcaaaagaguugggcaacgguuguuucgaauuuuaccauaagugcgacaaugaguguauggagucuguucgaaacgggaccuaugauuacccacaguauuccgaagaggcucgccucaaaagagaagagaucucaggcgugaagcuggagaguauuggaacguaccagauauuaagcaucuauuccaccgucgccucuagccuggcucuagccauuaucguggcaggccucucacuguggaugugcaguaaugggucccuucaaugcaggaucuguauuuga

SEQ ID NO: 142057 - RNA, 1704 nt, Artificial Sequence
  derived and/or modified CDS sequence (opt3) from hemagglutinin__InfluenzaA__EPI533583
auggagaagaucgugcugcuccuugccauugucagccugguuaaaggcgaccagauaugcaucggguaccacgcuaacaauuccaccgaacaaguggauacaauuauggagaagaacguaacugugacgcaugcacaggacaucuuggaaaagacccacaauggaaaauuaugugaucugaacggugucaaaccccuaauucucaaggacugcucuguggccggcuggcugcuugggaauccuaugugugaugaguucaucagaguuccagaauggucauauauaguggagagggcgaacccggcuaaugaccugugcuaccccggaaacuugaaugauuaugaggaacucaagcaucugcugagucggaucaaccacuuugagaaaauucucaucauuccuaagagcuccuggacaaaucaugaaacuucuuuaggcgucucggccgcauguccauaccaggguacccccucauucuuucgcaacgugguauggcugaucaaaaagaaugacgccuauccuacaauaaaaauuagcuacaacaauaccaaccaggaggaucuuuugauccuguggggaguucaccacaguaacaaugcugcagagcaaacuaaccuauauaagaauccaacaaccuacauuuccguggggacgucuacucucaaccagcgacugguccccaagaucgccacccguagccaggugaauggccagagaggcaggauggacuucuuuuggacaauccuuaaaccuaacgaugcuauucauuucgaauccaaugggaacuuuauagccccagaguacgcguauaagaucgugaaaaagggagacucaacuauuaugaaaagugaaauggaguacggucacugcaauaccaagugucaaacaccgaucggcgcaauaaacagcucuaugcccuuccauaauauucacccucugaccaucggggaaugcccaaaauaugucaaguccaacaaguugguucucgccacgggacugcgcaauucacccuuacgggagaaaagaaggaagcggggccuguuuggugcuaucgccggguucauugagggaggcuggcagggcaugguggaugggugguacggauaucaccauagcaacgaacaggguaguggcuacgcagcugacaaagagucuacucagaaggccaucgacgggguaacaaauaaagugaacuccauuauagauaagaugaacacccaauuugaagcggucggacgcgaguucaauaaccucgaacgaagaaucgagaaucuuaacaagaaaauggaggacggcuuucuggauguguggacuuauaaugccgaauugcuaguucugauggagaacgaaaggacacucgacuuccacgauagcaaugugaagaaccuguacgacaaaguccggcuucagcugcgugauaaugcaaaggaguuggguaacggguguuucgaauuuuaccauaaaugcgacaauaaguguauggagucggugcgcaacggcaccuaugauuacccucaguauucugaggaagcuagacucaagagggaggaaauuuccggaguaaaacuggagucaaucggcacguaccaaaucuuaaguauuuauagcaccguugccuccucucuggcucuagccauaaucguggcagggcucagccuguggaugugcucaaauggaagucuucagugccggauuuguaucuga

SEQ ID NO: 142058 - RNA, 1701 nt, Artificial Sequence; identical to SEQ ID NO: 141019
  derived and/or modified CDS sequence (opt3) from hemagglutinin__InfluenzaA__AKS48023

SEQ ID NO: 142059 - RNA, 1701 nt, Artificial Sequence
  derived and/or modified CDS sequence (opt3) from hemagglutinin__InfluenzaA__EPI587621
auggagaagauggugcugcuccuugccgcugucagccugguuaaauccgaccagaucugcauuggcuaccacgcaaacaauucuaccgaacaaguggauacaauaauggagaagaacguaacugugacgcaugcccaggacaucuuggagaaaacccacaaugggagauuaugugaucugaacggagucaagccccuaauucucaaagacugcucaguggcggguuggcugcuuggcaauccuaugugugaugaguucaucaggguuccagaauggaguuauauuguggagcgggcuaacccggccaaugaccugugcuaccccgggaacuugaaugauuaugaggaacucaagcaucugcugagccgcaucaaccacuuugagaagacacucauaaucccuaaauccucuuggccaaaucauacuucgucaggagucagcgcagccugucccuaccagggcaugccuaguuucuuucgaaacgugguaugguuaaccaagaaaaaugacgcuuauccaacaauuaagauguccuacaacaauaccuaucgugaagaucugcuuaucuugugggguauucaccacucuaacaacgcagccgagcagacuaaucuguacaaaaaccccacaaccuacguuagcguggggacguccacucuaaaucaaagacucgagccuaagaucgcuaccaggucacaggucaacggacagcggggccgcauggacuucuuuuggacaauacugaagccaaaugaugccauucauuucgaaaguaacggcaauuuuaucgcgccggaguaugcauacaaaauugugaagaaaggggacagcacuaucaugaagucugaaauggaguauggacacugcaacaccaaaugucagacacccaucggugccauuaauuccucaaugccuuuccauaacauacacccacuuaccaucggcgaaugccccaaguacgugaaaagcaauaagcuggucuuggcuacggggcucagaaacaguccucugagggagcggcgccgaaagagaggauuauuuggcgccauugcagguuucaucgaagggggauggcaaggcaugguugauggcugguauggguaccaccauucuaaugaacagggauccgguuaugcugccgacagggagagcacucagaaagcgauagacggcgugacaaacaagguaaauucgauuaucgauaaaaugaacacccaguuugaagccguggggcgggaguucaacaaucuggaacgucgcaucgagaaccucaauaagaaaauggaggacggauuucuugaugucuggacuuacaacgcagaacuguuggugcuaauggagaaugaaagaacacuggacuuccacgauucuaacguuaagaaucucuacgacaaggugaggcugcaacuucgggauaacgcuaaagagcugggcaaugguuguuucgaauuuuaucauaagugcgacaacgaguguauggaguccguccgaaaugggaccuacgauuauccacaguacucagaagaggcccgcuugaaaagagaagagauuaguggcgugaagcucgagagcaucggaacguaucagauucuguccauauacucuaccguagcuagcucauuagcccuggcaaucauuguugccggccuaagucucuggaugugcuccaacgggagccugcaaugcaggaucuguaucuga

SEQ ID NO: 142060 - RNA, 1704 nt, Artificial Sequence
  derived and/or modified CDS sequence (opt3) from hemagglutinin__InfluenzaA__AJE30333
auggagaagaucgugcugcuccuugccgucauuagccugguuaaauccgaccagauaugcaucggcuaccacgcuaacaauucuaccaagcaaguggauacaauuauggagaaaaacguaacugugacgcaugcacaggacaucuuggagaagacccacaaugggaaauuaugugaucugaacggagucaagccccuaauucucaaggacugcucaguggccgguuggcugcuuggcaauccuaugugugaugaguucaucagaguuccagaauggaguuauauaguggaaagggcgaacccggcuaaugaccugugcuaccccgggacauugaacgauuaugaggagcucaaacaucugcugagccggaucaaucacuuugaaaagacucucauuaucccucgcuccucuuggccaaaccaugagaccucguuaggagucucagccgcaugucccuaccagggcgccagcaguuucuuucgaaaugugguauggcugauuaaaaagaacgacgcuuauccuacaaucaaaauauccuacaauaacaccaaucgugaagaucuuuugauucugugggguauccaccacucuaacaacgcagccgagcagacuaaucuauauaagaacccagacacauacguuagcguggggaccuccacgcucaaucaaagacugguccccaagauugcuacuaggucacaggugaacggacagaguggccggauggauuucuuuuggaccauccuuaaaccuaaugacgccauccauuucgagagcaacggcaauuuuauugcgccagaauacgcauauaagauagugaaaaagggggauucuacaaucaugaaauccgagauggaauacggacacugcaacacuaagugucagaccccgauuggugccaucaauucaagcaugcccuuccauaacauacacccucugacaauuggcgagugcccaaaauaugucaagaguaauaaguugguucucgcuaccgggcugcgcaacucucccuuaagagaaaggcggcgcaaacgaggacuguuuggcgccaucgcagguuucaucgaagggggauggcaaggcaugguggacggcugguacggguaucaccauuccaaugagcagggaagcgguuacgcugccgacaaggaaucgacgcagaaagcgauugauggcguaacuaacaaggucaauucuaucauugacaaaaugaacacacaguuugaggccguggggagagaguucaacaaucucgaaaggcggauagaaaaccuuaauaagaagauggaggauggauuucuggacguguggaccuauaacgcagaguugcuaguucugauggaaaaugagcguacucucgauuuccacgacuccaacgugaaaaaucuguacgauaagguccgccuucaacugagagacaacgcuaaagaauugggcaaugguuguuucgaguuuuaccauaagugcgauaacgaauguauggagucagugaggaaugggacauaugacuacccuaaauauagugaggaagccauccucaagcgggaggaaauuagcggcguaaagcuggaguccaucggaaccuaccagaucuuaucuauuuauagcacgguugcuucaagucuggcccuagcaauaaucguggccggccucucccuguggaugugcagcaacgggucucuucagugccgaauuuguaucuga

SEQ ID NO: 142061 - RNA, 1704 nt, Artificial Sequence
  derived and/or modified CDS sequence (opt3) from hemagglutinin__InfluenzaA__EPI459855
augaucgccauuguggucauagcuauccuggcaagcgccggcaaguccgacaagauuugcaucggguaccacgcgaacaauucuaccacacagguugauacucuccuugagaagaacgugacgguaacccauucaguggaacuguuggagaaucaaaaagaaaagagauucuguaaaauuaugaacaaggcucccuuagaccugaaggauugcacaaucgagggauggauacuagguaauccuaaaugugaccuccugcuuggcgaucagaguuggagcuauaucgucgaaaggccaaacgcccagaaugggauuugcuacccgggagugcugaacgaguuggaggaacucaaggcauuuaucggcuccggugagcggguugaacgcuucgagauguuucccaaaucuacuugggccgggguggacaccucgcgaggagucacaaaugcuuguccuucauauaccauugauagcaguuucuaccguaaccugguguggaucguaaagacugacuccgcaacauauccaguuauaaaaggcaccuacaauaacacgggcacucagcccauucuguauuuuuggggagugcaccauccucucgauaccacaguccaagacaauuuauacgggucuggugauaaguacgugagaaugggcacugagagcaugaacuucgccaaguccccagaaaucgcugccaggcccgcggugaaugggcagcggucacgcauugacuauuacuggaguguccugagaccuggagagacccuuaacguugaaagcaacggcaauuugaucgcaccaugguaugccuacaaauuugugucuacaaacaagaaaggugcuguauucaaguccgaucugccgaucgagaauugcgacgccaccugucagacgauuacuggggugcuaaggacaaacaaaaccuuucagaaugucucaccccucuggauaggagaaugcccuaaguaugugaaaagcgagagucugcggcuugcaacuggccugcgcaacguuccacaaaucgcuacacgaggcauuuucggggccaucgcgggauuuauagaggguggcuggaccgggaugauugacggaugguacggcuaucaccaugaaaauucucaggguuccggguacgccgcagauagagagagcacgcagaaggcuaucgacggcaucaccaacaaggucaauucgauuaucaacaaaaugaauacacaguucgaagccguggaucacgaguuuucuaacuuggaaaggcggauuggaaaucucaacaagcguauggaggacggcuuccuggauguguggacuuacaaugcugaguuacugguacuccuugaaaacgagcgcacccuggacuugcacgaugccaacguuaaaaaucuauaugaaaaggugaaaucccaacugagagacaacgcaaaugaucucgggaacggauguuucgaguuuuggcauaagugcgacaaugaauguauggagucagucaagaacgguacauacgauuaucccaaauaccagaaggagaguaaacugaauaggcagggcauagaaagcgugaaacuugagaaccugggggucuaucaaaucuuggccauuuacuccacugugucuagcucacucguucuggugggauuaaucauggcuaucggccuguggaugugcaguaaugguuccaugcagugccggauuuguauauga

SEQ ID NO: 142062 - RNA, 1704 nt, Artificial Sequence; identical to SEQ ID NO: 142061
  derived and/or modified CDS sequence (opt3) from hemagglutinin__InfluenzaA__EPI459855/m1

SEQ ID NO: 142063 - RNA, 1692 nt, Artificial Sequence
  derived and/or modified CDS sequence (opt3) from hemagglutinin__InfluenzaA__ACZ36872
augaacacccagauccugguguucgcccucgucgcuguuauucacacaaaugcagacaagauaugccuuggccaucacgccgugagcaacgggacuaaaguaaauacgcugaccgagagaggaguggaagucgugaacgcgacagagacuguugaaaggaccaauauccccaagauuuguuccaaagguaagcggacaguggauuugggccaaugcggguuacugggaaccaucacuggcccuccacagugugaccaguuucuagaguucucugcugaucucauuaucgaacgccgagacgguaacgaugucugcuacccggggaaauuugugaauggagaggcccugcgucagauacuuagaaagucaggcggcaucaacaaggagacaaugggguucaccuauaguggaauuaggacgaaugguacuaccagcgcaugucggcgcuccgggucuucguuuuacgccgaaaugaaauggcuguugucagacacagauaacgcugcauucccccaaaugacuaagagcuauaaaaauaccagaagggagccugcccucaucguauggggcauucaucacaguggauccacaaccgaacagacgaagcuguacggcucugguaacaaacugguuacuguggggagcuccaaguaucagcagucauuugucccaagucccggaacacggccucaagugaauggccagagcggccgcaucgacuuccauuggcucauauuagauucuaacgacaccgugacuuuuuccuucaauggggcuuuuauugccccagaucgagcgucauuccugaagggaaaaagcauggguauccagagugacguccagguugaugcaaacugcgagggcgaguguuaccacucugggggaacaauuaccuccagccuucccuuucaaaacaucaauucgagagccgugggcaagugcccuagguauguaaaacaggaaucuuugcugcuagcuacggguaugaagaacgugccagagcucccgaaaaagcggcguaaacgcgggcuguucggcgccaucgcaggauucauugaaaauggcugggaggggcuugucgacggaugguacgguuuuagacaccagaacgcucaaggcgaagggaccgccgcggacuacaaguccacacagucagccauagaucagaucacuggaaagcugaauagguugauugagaaaaccaaccagcaauucgagcucaucgacaaugaauuuacagagguggaaaagcagauaggcaacguuauuaauuggacucgggauaguaucaccgagguguggagcuauaacgcagaacuguuagucgcuauggagaaucagcauacaaucgaccuggccgauuccgagaugaacaaacucuacgaacgagugcgcaagcagcuuagagagaaugcugaagaggacgguaccggguguuucgaaauuuuucacaaaugcgaugacgauuguauggccucuaucaggaacaauacuuaugaccauagcaaguaccgggaggaggcaaugcaaaaccgcauucagauagaucccguaaagcugucaggcggauauaaagacguuaucuugugguucaguuuuggcgccuccugcuuccuacugcucgcuauugcgauggggcugguguuuaucugcgucaagaacggaaauaugagauguacgaucugcauuuga

SEQ ID NO: 142064 - RNA, 1692 nt, Artificial Sequence
  derived and/or modified CDS sequence (opt3) from hemagglutinin__InfluenzaA__AGB51388
augaacacccagauccugguguucgcccucgucgcuguuauucacacaaaugcagacaagauaugccuuggccaucacgccgugagcaacgggacuaaaguaaauacgcugaccgagagaggaguggaagucgugaacgcgacagagacuguugaaaggaccaauauccccaagauuuguuccaaagguaagcggacaguggauuugggccaaugcggguuacugggaaccaucacuggcccuccacagugugaccaguuucuagaguucucugcugaucucauuaucgaacgccgagacgguaacgaugucugcuacccggggaaauuugugaauggagaggcccugcgucagauacuuagaaagucaggcggcaucaacaaggagacaaugggguucaccuauaguggaauuaggacgaaugguacuaccagcgcaugucggcgcuccgggucuucguuuuacgccgaaaugaaauggcuguugucagacacagauaacgcugcauucccccaaaugacuaagagcuauaaaaauaccagaagggagccugcccucaucguauggggcauucaucacaguggauccacaaccgaacagacgaagcuguacggcucugguaacaaacugguuacuguggggagcuccaaguaucagcagucauuugucccaaaucccgagacacggccucaagugaacggacagaguggccgcaucgacuuccauuggcucauauuagauagcaaugacaccgugacuuuuucuuucaacggcgcuuuuauugccccagaucgagcguccuuccugaaggggaaaucaaugggaauccagagcgacguccagguugaugcaaacugcgagggugaauguuaccacaguggcgggacaauuaccucuucccuucccuuucaaaauaucaacagcagagccgugggaaagugcccuagguauguaaaacaggagucguugcugcuagcuacgggcaugaagaaugugccagaacucccgaaaaagcggcguaaacgcggucuguucggggccaucgcaggcuucauugagaacggaugggaaggccuugucgacgggugguacggauuuagacaccagaaugcucaaggugagggcaccgccgcggacuacaagucuacacaguccgccauagaucagaucacugggaagcugaacagguugauugagaaaaccaaucagcaauucgaacucaucgacaacgaguuuacagaaguggagaagcagacuggaaauguuauaaacuggacccgggauucaauuacagaaguguggaguuauaaugcagagcuguuagucgcuauggagaaccagcauaccaucgaccuggccgauagcgaaaugaauaaacucuacgagcgagugcgcaagcagcuuagagaaaacgcugaggaagacggcacugguuguuucgagaucuuucacaaaugcgaugacgauuguauggccuccauuaggaauaacacguaugaccauucuaaguaccgggaggaagcaaugcaaaaccgcauccagauugaucccguaaagcugagcgggggcuauaaagacguuauauugugguucucauuuggagccaguugcuuccuacugcucgcuaucgcgaugggccugguguuuauuugcgucaagaaugggaacaugagauguacaaucugcaucuga

SEQ ID NO: 142065 - RNA, 1683 nt, Artificial Sequence; identical to SEQ ID NO: 138036
  derived and/or modified CDS sequence (opt3) from hemagglutinin__InfluenzaA__EPI439507

SEQ ID NO: 142066 - RNA, 1704 nt, Artificial Sequence
  derived and/or modified CDS sequence (opt3) from hemagglutinin__InfluenzaA__EPI164216
auggagaagaucgugcugcuccuugccauugucagccugguuaaauccgaccagauaugcaucggcuaccacgcuaacaauucuaccgaacaaguggauacaauuauggagaagaacguaacugugacgcaugcacaggacaucuuggaaaagacccacaaugggaaguuaugugaucuggacggagucaaaccccuaauucucagagauugcucaguggccgguuggcugcuuggcaacccuaugugugacgaguucaucaauguuccagaauggaguuauauaguggagaaggcgaacccggcuaaugaucugugcuaccccgggaacuuuaaugacuaugaggaauugaagcaucuccugagcaggaucaaccacuucgagaaaauucagaucauuccuaaguccucuuggucggaucaugaagccucaagcggagucaguuccgcauguccauaccagggcacacccagcuuuuuccggaaugugguauggcugaucaaaaagaacaauacuuauccuaccauaaaacgcagcuacaacaauacaaaccaagaggaccucuuaauucugugggguauccaccacuccaacgaugccgcugagcagaccaaacuuuaucagaauccaacuacauacauuucaguugggaccaguacguugaaccagcgacuggugcccaagaucgcaacucguagcaaagucaauggacaaucuggcagaauggacuuuuucuggaccauccuaaagccuaacgaugccauuaauuuugaauccaacggcaauuucauagcuccagaguacgccuauaaaaucgugaagaaaggggacucagcgauugugaagucugaagucgaguacggaaacugcaauacaaaaugucagacuccgaucggugcaauaaacaguucuaugcccuuucauaauauucacccucucaccaucggcgaaugcccaaaguauguuaaguccaacaaacuggugcuugccacagggcugaggaauagccccuugcgggagcgcagaaggaagcggggacucuucggcgcuaucgccgguuuuauugaagggggauggcagggcaugguagacggcugguacggguaucaucacucgaacgaacagggaucugguuacgcagcugauaaagaguccacccaaaaggccaucgacggcgugacgaauaaagucaacucaauuauagauaagaugaacacucaguucgaagcgguggggcgcgaguuuaauaaccuggaacgaagaaucgagaauuuaaacaagaaaauggaggacggauuccuggauguuuggacauauaaugccgaacuccuugugcugauggagaacgaaaggaccuuggacuuccacgauaguaaugucaagaaccuauacgacaaagugcggcugcagcuccgugauaaugcaaaggagcugggcaacgguuguuuugaguucuaccauaaaugcgacaaugaguguauggagagcguacgcaacgggacuuaugauuacccucaauauuccgaagaggcuagacuuaagagggaagagauuucuggcguuaagcuggagagcaucggaacauaccagaucuugucaauuuauaguaccguggccuccagccucgcucuggccauaauggucgcaggcuuaucucuguggaugugcucaaaugggagucuacagugccggaucuguauuuga

SEQ ID NO: 142067 - RNA, 1683 nt, Artificial Sequence; identical to SEQ ID NO: 140399
  derived and/or modified CDS sequence (opt3) from hemagglutinin__InfluenzaA__EPI486492

SEQ ID NO: 142068 - RNA, 1683 nt, Artificial Sequence
  derived and/or modified CDS sequence (opt3) from hemagglutinin__InfluenzaA__EPI740738
augaacacccagauccugguguucgcccucauugcuauaauccccacaaaugcagacaagauuugccuuggccaccaugccgucagcaacgggacuaaaguuaauacgcugaccgagagaggaguggaaguagugaacgcgacagagacugucgaaaggaccaauaucccucggauuuguuccaaggguaaacgcacaguggauuugggccaaugcggguuacugggaaccaucacuggcccaccgcagugugaccaguuucuagaguucucugcugaucucauaaucgaacgacgugaggguucagacguuugcuaccccgggaaguuugugaacgaggaagcccugagacagauucuuagggagaguggaggcaucgauaaagaaacaaugggcuucaccuauagcgggauucggacgaauggagucacuuccgcauguaagcgcucugguucgucauuuuacgccgagaugaaguggcuguugagcaacaccgacaaugcugcauucccucaaaugacaaaaaguuauaagaacacuagaaaauccccagccaucauaguguggggcauucaccauucuguaagcaccgcugagcagacaaagcucuacggguccggaaauaaacugguuaccgugggcucaaguaacuaucagcagagcuuuguccccucuccuggugccaggccacaagugaaugggcuguccggacggaucgauuuccacuggcucauuuuaaaccccaaugacacggugacuuuuucauucaacggcgcguuuaucgcaccugaucgcgccagcuuccugcgaggcaagaguauggggauccagucuggaguccagguugacgcuaacugcgaaggugauuguuaccauuccggcgggacaauuauaagcaaucuuccauuucagaacaucgacucgagagccgugggaaagugcccgagguauguaaaacaacggucuuugcugcuagcaaccggcaugaagaaugugcccgagauuccuaaaggucguggccucuucggggcuaucgccggauucauagaaaacggcugggaggggcugauugauggaugguacgguuuucgccaccagaaugcgcagggcgaagggacugccgcagacuacaaguccacacaaucagcuaucgaccagaucaccggaaaacuuaacagacugauugccaagacgaaucagcaguucgaguugaucgauaacgaguuuaaugaagucgagaaacaaauuggcaacgugauaaauuggaccagggacaguaucacagaaguuuggagcuauaacgcugagcuccugauugccauggaaaaucagcacacuaucgauuuagcagacuccgagauggauaagcuguacgagcgggugaagcgacagcuccgcgaaaacgccgaggaagacgguaccggguguuucgagaucuuucauaaaugcgaugacgauuguauggcuucuauuagaaauaacacauaugaccacaggaaguaccgggaagaggcgaugcagaaccgcauacaaaucgauccagucaaacuuagcucaggcuauaaggacgugauucugugguucaguuuuggagcauccugcuucaucuugcuagccauuguaaugggccugguuuuuaucugcgugaaaaaugggaacaugagauguacuauaugcaucuga

SEQ ID NO: 142069 - RNA, 1683 nt, Artificial Sequence
  derived and/or modified CDS sequence (opt3) from hemagglutinin__InfluenzaA__EPI730495
augaacauccagauucugguguucgcccucauagcuaucauucccaccgacgcagauaagaucugccuuggccaccaugccgucagcaaugggacaaaaguuaacacucugacggagagaggaguggaaguagugaaugcgaccgagacagucgaaaggacuaacauuccucggaucuguuccaaggguaaacgcaccguggacuugggccaaugcggguuacugggaacaauaaccggcccaccgcagugugaucaguuucuagaguucucugcugaccucaucauugaacgacgugaggguucagauguuugcuaccccgggaaguuugugaaugaggaagcccugagacagauccuuaggaaaaguggaggcauugacaaggaggcaaugggcuucacuuauagcgggauccggacaaacggagccaccuccgcuugucgcagaucugguucgucauuuuacgcagaaaugaaguggcuguugagcaauacggauaacgccgcuuucccucaaaugacuaaaaguuauaagaauaccaggaaauccccagccauaauugucuggggcauccaccauucugugagcacagcggagcagacuaagcucuacggguccggaucaaaacugguaaccguuggcaguagcaacuaucagcagucuuuugugcccuccccuggugcacggccacaagucaaugggcugucaggacgcauugacuuccacuggcucaucuuaaaccccaaugauacagugaccuuuagcuucaacggcgccuuuaucgcuccugaccgagccaguuuccugagaggcaagucuauggggauucaguccggagugcaggucgaugcagacugcgagggugauuguuaccauagcggcgggacgauaaucucgaaucuuccauuucagaacauugacucuagggcuguuggaaagugcccgcgguaugugaaacaacguuccuugcugcuagccacuggcaugaagaacguacccgaaaucccuaaaggucgcggccucuucggggcgauagccggauucauugagaauggcugggaagggcugaucgacggaugguacgguuuuagacaccagaacgcacagggcgaggggacagcugccgauuacaagucaacccaaagugcuaucgaccagauuacuggaaaacuuaauaggcugaucgaaaagacaaaccagcaguucgaguugauugauaaugaguuuauagaaguggagaaacaaaucggcaacgucauuaauuggacccgggacagcaucacggaagugugguccuauaacgccgagcuccugguugcaauggaaaaucagcacaccaucgauuuagccgacucugagauggauaagcuguacgagcgagugaagcgccagcucagagaaaacgcugaggaagacgguacaggguguuucgagauuuuucauaaaugcgaugacgauuguauggcgagcauaaggaauaacacuuaugaccacucaaaguaccgggaagaggcaaugcagaaucgcauccaaauugacccagucaaacuuaguuccggcuauaaggaugugauccugugguucagcuuuggagccucuugcuucauuuugcccgcuaucguaaugggccuaguuuuuaugugcgugaaaaacgggaauaugagauguaccauaugcaucuga

SEQ ID NO: 142070 - RNA, 1683 nt, Artificial Sequence
  derived and/or modified CDS sequence (opt3) from hemagglutinin__InfluenzaA__EPI712926
augaacacccagauccugguguucgcccucauugcuauaauccccacaaaugcagacaagauuugccuuggccaccaugccgucagcaacgggacuaaaguuaauacgcugaccgagagaggaguggaaguagugaacgcgacagagacugucgaaaggaccaauaucccucggauuuguuccaaggguaaacgcacaguggauuugggccaaugcggguuacugggaaccaucacuggcccaccgcagugugaccaguuucuagaguucucugcugaucucauaaucgaacgacgugaggguucagacguuugcuaccccgggaaguuugugaacgaggaagcccugagacagauucuuagggagaguggaggcaucgauaaagaaacaaugggcuucaccuauaaugggauucggaucaacggagucacgagcgcauguaagcgcuccgguucuucguuuuacgccgagaugaaguggcuguugucaaauacugacaacgcugcauucccucaaaugaccaaaagcuauaagaauacaagaaaaaguccagccauaauuguguggggcauccaccauuccguaucuacugcugagcagaccaagcucuacgggagcggaaacaaacugguuacagugggcuccucaaauuaucagcagaguuuuguccccagcccuggugccaggccacaagugaacgggcugucuggacggauugauuuccacuggcucaucuuaaaucccaacgacaccgugacguuuuccuucaacggcgcguuuaucgcaccugaucgcgccucauuccugcgaggcaagagcauugggauacagaguggaguccagguugacgcuaauugcgaaggugauuguuaccauucuggcgggacuaucauuuccaaccuuccauuucagaauaucgacagcagagccgugggaaagugcccgagguauguaaaacaacggucguugcugcuagcaacaggcaugaagaacgugcccgagauaccuaaaggucguggccucuucggggcuauugccggauucaucgaaaauggcugggaggggcugaucgauggaugguacgguuuucgccaccagaacgcgcagggcgaagggaccgccgcagacuacaagucuacucaauccgcuauugaccagaucacaggaaaacuuaauagacugauugccaagaccaaccagcaguucgaguugauagauaaugaguuuaacgaagucgagaaacaaaucggcaaugugauuaacuggacgagggacucaaucaccgaaguuuggaguuauaaugcugagcuccugaucgccauggaaaaccagcacacaauugauuuagcagacagcgagauggauaagcuguacgagcgggugaagcgacagcuccgcgaaaaugccgaggaagacgguacuggguguuucgagauauuucauaaaugcgaugacgauuguauggcuuccaucagaaacaacaccuaugaccacaggaaguaccgggaagaggcgaugcagaaucgcauucaaaucgauccagucaaacuuucuagcggcuauaaggacgugauucugugguucucauuuggagcaaguugcuucaucuugcuagccauaguaaugggccugguuuuuaucugcgugaaaaacgggaauaugagauguacaauuugcaucuga

SEQ ID NO: 142071 - RNA, 1683 nt, Artificial Sequence; identical to SEQ ID NO: 138036
  derived and/or modified CDS sequence (opt3) from hemagglutinin__InfluenzaA__AGL44438

SEQ ID NO: 142072 - RNA, 1683 nt, Artificial Sequence
  derived and/or modified CDS sequence (opt3) from hemagglutinin__InfluenzaA__EPI445996
auggagaccgugagccugaugacaauccuccuucuggucacuacguccaacgccgacaagauuugcauaggccaccagucuaccaauucaacagaaacuguugauaccuugacagagaccaacgugcccguaacucaugcuaaagaauuacugcacacagaccauaaugggaugcuaugugcaaccaaccucggacacccucugauccuugauacgugcaauguggagggucugauuuacggcaacccaaguugugacuugcuccuugggggaagagaauggagcuauaucgucgagaggccguccgccgugaauggcacuugcuaccccgguaacguugagaaucuggaggaacuccggaccuuauucucuucgucaagcaguuaucaacgcauucagaucuuuccugauacaauauggaacgugacuuacaccgggacauccaagucuuguagcgacuccuucuaucgaaauaugcguuggcugacccagaaaaacggacuuuacccaguccaggaugcgcaauuuacgaauaacagaggcaaggacaucuuguucguguggggcauucaucaucccccuacugauacagcucagaccaaucuguauacuaggacagacaccacgaccucaguaacaacugaaaaccuagaucggaccuuuaaaccacucaucgggccccgcccucugguuaacggacuuauugguagaaucaauuacuacuggagugugcugaagccaggccagacauugaggguccggagcaacgggaaucucauagccccgugguauggacacgugcugucuggcgagucccacggucgcauuuuaaagacuaaccucaauucagggaacugcgugguccagugucaaaccgagaaaggaggccugaauagcacacuucccuuccacaacaucaguaaguacgcauuuggcaauugcccuaaauauauugggguuaagucucugaaauuggccaucggacuacgaaacgugccagcuaaguccagcagaggucuguucggcgcaaucgccggguuuauugaaggaggcuggcccggucucguagcugggugguacggcuuccagcauucgaaugaccagggagugggcauagccgcggauagggucucuacccagaaggcaguggacaaaaucacuuccaagguuaacaauauuguggacaaaaugaacaagcaauaugagaucauagaucacgaauuuucagaggucgaaacgcggcugaauaugauuaacaacaaaaucgacgaucagauccaggacgugugggccuacaaugcugagcuucugguauugcucgagaaccaaaagacacuggaugaacacgacgccaauguuaacaauuuauauaacaaagugaagcgugcacuggggaguaaugcucuagaggauggaaaggguuguuucgaacucuaccauaaaugcgacgaucaguguauggagaccauucgcaacggcacuuacaauagaaggaaguaucaggaagagagccggcuggagcgacagaaaaucgaagggauuaagcuggaguccgaaggaaccuacaaaauauugacaaucuauucuaccgucgccagcucacuggugcucgcgaugggcuuugccgcauuccuguucugggcuaugaguaacgguuccugccgcugcaauauuuguaucuga

SEQ ID NO: 142073 - RNA, 1695 nt, Artificial Sequence
  derived and/or modified CDS sequence (opt3) from hemagglutinin__InfluenzaA__EPI433309
auggagaagaucgugcugcuccuugccauugcuagccuggucaaauccgaccagauaugcaucggcuaccacgcaaacaauucuaccgaacaaguugauacaauuauggagaagaacgugacuguaacgcaugcccaggacaucuuggaaaagacccacaaugggaaguuaugugaucuggacggagugaaaccccuaauucucagagauugcucagucgcggguuggcugcuuggcaacccuaugugugacaaguucaaugaugugccagaguggaguuauaucguugaaaaggcuaacccggccaaugaccugugcuaccccgggaacuugaaugauuaugaggagcucaaacaucugcugagcaggauaaaccacuuugaaaagauccagacauucccuaaauccucuuggucggaccaugaggcaucacucggagugagcgccgcuuguccauaccagggcaugcccuccuuuuuccggaaugucgugugguuaauuaagaaaaacaauacuuauccuaccaucaaguccucuuacaacaauacaaaccaagaagaucugcuuauuuugugggguauccaccacagcaacgacgaggcagagcagacccgccuguaucagaauaguaacacuuacauaucaguagggacaaguacccuaaaucagcgacucguuccaaagauugccacgcguagcaaagugaacggacaaucuggcagaauggauuucuucuggacuauccugaagcccaaugacgcuauuaacuuugaauccaauggcaacuucaucgccccugaguacgcguauaaaaucgucaagaaaggggacucagcaauuaugaaaagcgaagugggauacggugauugcaauaccaaaugucagacaccaauaggcgccaucaacaguucuaugccguuucauaauauucacccccuuacuaucggggagugcccuaaguaugugaaguccaacaaacuggucuuggcuaccggacucaggaauagcccacagauagaaacacggggccuguucggugccauugcaggguuuaucgagggaggcuggcagggcaugguugacgggugguacggauaucaucacucgaacgagcaagguucuggcuacgcugccgauaaggaauccacccagaaagcgaucgacggggugacgaauaagguaaacucaauuaucgauaaaaugaacacucaguucgaggccguggaacgcgaguuuaauaacuuagaaagaaggauugagaaucugaacaagaagauggaggacggauuccucgaugucuggacauauaaugcagaacuucugguguugauggagaacgaacggacccuagacuuccacgauaguaauguuaaaaaccuguacgacaaggugcgccuccaacugcgagauaaugcuaaagagcuuggcaacgguuguuuugaauuuuaccauaagugcgacaaugaguguauggagagcgucagaaacgggacuuaugacuacccccaguauuccgaagaggccaggcugaaacgggaagagauaucuggcgugaaguuggagagcaucggaacauaccagauucucucaaucuauaguaccguagcuuccagccuggccuuagcaaucaugguugccggccugucucuauggaugugcucaaaugggagucuccagugccguauuuguauauga

SEQ ID NO: 142074 - RNA, 1683 nt, Artificial Sequence
  derived and/or modified CDS sequence (opt3) from hemagglutinin__InfluenzaA__EPI470859
auggaggccaucccccugauuaccauacuccuuguggucacagcuagcaacgcagacaagaucugcauuggcuaccaguccacuaauucuacggaaaccguugauacacugacugagaacaaugugccuguaacccacgccaaagaauuguuacauacagagcacaacgggaugcugugugcgaccaaucuaggaagaccacucauccuggacacuugcacaauugaaggucuuaucuauggcaacccgucaugugaucuguugcucgggggaagggaguggaguuacauaguggagcggcccagcgcugucaauggcaugugcuauccugguaacguggaaaaucuggaggaacugcgcuccuucuuuucuucggccucaagcuaccaacgaauccagauuuucccagacaccaucuggaacguuaguuauuccgggacgucuaaggcauguagcgauuccuuuuaccguucaaugagauggcucacucagaaaaauaacgccuaucccauucaggacgcucaauacaccaauaacaggggaaagaguaucuuauucauguggggcauaaaucauccuccaacagauacugcacagaccaaccuguacacacggaccgacacgacuacaagcguggccaccgaggauauuaaccgcacuuuuaaacccgucaucggcccuagaccacuugugaauggguugcagggaaggauugacuauuacuggucuguacugaagccgggucagacacuacggguucgcuccaacggcaaucucaucgcucccugguaugggcacauccugucaggagagagccauggccgaauacuuaagaccgaucugaacagugguucuugcgugguccaaugucagacggaaagagggggauugaauaccacacucccuuuccacaacguguccaaauacgccuuuggcaauugcccaaaguaugugggcgucaaaagccugaaguuagcgguugggcugaggaacgugcccgcacggucgucucguggacucuucggugccauugcuggcuuuaucgaagggggaugguccggccuuguagccgguugguacggguuccagcacucaaaugaccagggcgugggaauugcagcugaucgcgacaguacucaaagagccaucgacaaaauaaccagcaaggucaacaauauuguggauaagaugaacaaacaguaugagaucaucgaccaugaguuuuccgaaguugagaauaggcugaacaugauuaauaacaagaucgaugaccagauucaagauauaugggcguacaacgccgaguugcuagugcugcucgaaaaucagaaaacacuggacgagcacgaugcaaacgucaauaaccuuuacaauaaggugaaacgggcucugggcucuaacgccauggaagacgggaagggauguuucgaguuguaucauaaaugcgaugaccaguguauggaaacuauccgaaaugguaccuacaaccgcagaaaguauaaggaggagagcaggcucgaacggcagaaaauugagggcguaaagcuggaaucagaggggacauacaaaaucuuaaccaucuauaguacuguugcuuccagccuggugauugccaugggauuugcagccuuccuauucugggcuaugucuaauggcucaugccgcugcaacauauguaucuga

SEQ ID NO: 142075 - RNA, 1683 nt, Artificial Sequence
  derived and/or modified CDS sequence (opt3) from hemagglutinin__InfluenzaA__EPI498037
auggagaccgugagccugaucacaauucuccuugucgccacuguuuccaacgcugacaagauaugcaucggcuaccagucuacuaauucaaccgaaacaguggauacucugaccgagaacaauguacccgugacacacgcaaaagaauuguuacauaccgagcacaacgggaugcugugugccacgagucuaggacaaccucucauucuggacacaugcaccaucgaaggucuuauuuauggcaauccaagcugugaucuguugcucgaggggagagagugguccuacaucgucgaaaggccgucugcggugaacggacugugcuaucccggcaauguugagaaccuggaggaacuccggucguuauucucaagcgcucgcaguuaccagcgaauacagaucuuuccugacacgauuuggaauguguccuauaacgguacuucuaaggccuguagcggguccuucuaccguucaaugagauggcugaccaggaaaaauggagauuauccaauccaggacguccaauacacaaacaaucagggcaagaacauucuuuuuauguggggcaucaaucaucccccuacugauaccacacagcgggacuuguacacccgcacggauacuacaaccaguguggcaacugaggaaauaaacagaauuuucaaaccacugaucgggcccaggccucuaguaaacggacucaugggucggauugacuauuacuggagcguucugaagccaggccagacacuucgcaucaagucugaugggaaucugaucgccccgugguauggacacauuuuguccggcgagucacauggucgaauacucaaaaccgaccugaagagagggagcugcacggugcaaugucagaccgaaaaaggaggcuuaaacacaacucugcccuuucagaaugucaguaaguacgcuuucggcaacugcucuaaauauaucgggauuaagucccucaaacuugcagugggacugaggaaugugccuagccggucgucucgugguuuguuuggcgccaucgcuggguucauagagggaggcugguccggucuagucgccgggugguacggcuuucagcacucaaacgaucaaggaguuggcauggcggcagaccgcgacaguacccagaaggccauugauaagaucacaagcaaagugaauaacaucguagacaagaugaauaaacaguaugaaauuaucgaucacgaguucuccgagguggaaacuagacugaacaugauuaauaacaagauagacgaucaaauccaggacauuugggcuuacaaugccgagcuccugguccuucuggaaaaccagaaaaccuuggaugagcaugacgcaaaugugaacaaccucuacaauaagguuaagagggcucuggggucuaacgccguggaagauggaaaagguuguuuugaguuauaucacaagugcgacaaucaguguauggagacaauccggaacggcaccuacaauaaacgaaaguaucaagaagagagcaaacuggaacgccagaagaucgagggggucaagcuagaaucagagggaacuuacaaaauucucacgauauauaguacaguggcguccagccugguaaucgccaugggcuucgcagcuuuucuuuucugggccaugucuaacgguucaugcagaugcaauauuuguaucuga

SEQ ID NO: 142076 - RNA, 1683 nt, Artificial Sequence
  derived and/or modified CDS sequence (opt3) from hemagglutinin__InfluenzaA__AGO17847
auggagaccaucagccugaugacaauucuccuuauaacuacggccuccaacgcugacaagaucugcauuggccaccagucuaccaauucaacagaaacuguggauacccugacagagaccaacguccccguuacucaugcaaaagaauuguuacaaacagagcacaaugggaugcugugugccaccaaccuaggacauccucucauccuggacacgugcacuauugaaggucuuaucuacggcaauccaaguugugaucuguugcucgaggggagagaguggagcuauauaguggaaaggccguccgcgguaaacggaaccugcuaccccggcaauguggagaaccuggaggaacugcggacacucuucucuucggcuucaagcuaucagcgcauccagauuuuuccugacacuaccuggaaugucacauacaccgguacgagucgauccuguucugggagcuucuaucguuccaugagaugguuaacucagaagucaggauuuuacccagugcaagaugccaaauauacaaacaauaggggcaagaacauccuguucguuuggggcauucaccauccccacaccuacacugaccagacaacccuuuacauccggaaugauacgaccacaagugugacuaccgaggaauugaaccgcauauuuaaaccugucauugugccaagacugcuaguaaaugggcagcagggaaggaucgacuauuacuggagcguucucaagcccggucaaacacugcgggugcgcucuaacggcaaccuuauugcaccuugguaugggcacguccuguccggaggcucacauggucgaaucuugaagacugaucucaaaagcgggaauugcguggugcagugucagaccgagaagggaggccugaacaguacauuaccauuccacaauaucucuaaauacgccuuugggaccugcccgaaguaugucaaaguuaacucccugaagcucgcuauuggccuuagaaaugugcccgcaaggagcaaccggggacuguucggugccauagcuggcuuuaucgaagggggauggccuggcuugguagccgguugguacggguuccagcauucgaaugaccaaggcgugggaauggcggcagaucgugacucuacucagaaggccgucgauaaaauuacguccaaggugaacaauaucguugacaaaaugaacaagcaguaugagauaauugaccacgaauuuucagagguggagacacgccuaaauaugaucaacaauaaaaucgaugaccaaauucaggaugucugggcuuacaacgccgaacugcucgugcugcuugagaaucagaagacccuggacgaacacgaugcaaacguaaacaauuuguacaacaaaguuaagagagcucucggcaguaaugccauggaggacgggaagggauguuucgaacuguaucauaaaugcgaugaccaguguauggagacuaucaggaacgguaccuacgaucggcgaaaguaucgcgaggaaagcagauuagagaggcaacggauugaaggcgugaaacuggaguccgaagggacauacaagauacuaaccaucuauucuacugucgcgagcucacucgugauugccaugggauuugcagcuuuccuguucugggccaugaguaauggcuccugccgcugcaacaucuguaucuga

SEQ ID NO: 142077 - RNA, 1683 nt, Artificial Sequence
  derived and/or modified CDS sequence (opt3) from hemagglutinin__InfluenzaA__ANZ03807
auggagaccgugagccugaucacaauucuccuugucgccacuguuuccaacgcugacaagauaugcaucggcuaccagucuacuaauucaaccgaaacaguggauacucugaccgagaacaauguacccgugacacacgcaaaagaauuguuacauaccgagcacaacgggaugcugugugccacgagucuaggacaaccucucauucuggacacaugcaccaucgaaggucuuauuuauggcaauccaagcugugaucuguccuuggaggggagagaguggucuuacaucgucgaaaggccgucggcggugaacggacucugcuaucccggcaauguugagaaccuggaggaacugcggucacucuucagcagugcucgcuccuaccagcgaauacagaucuuuccugacacgauuuggaaugugucuuaugaugguacuagcaccgccuguuccgggucauucuaccguaguaugagaugguuaacaaggaagaacggagacuauccaacucaggaugcacaauacaccaauaaccagggcaaaaauauccuguuuauguggggcauuaaccaucccccuacagacgauacccagcggaaucuuuacacgcgcacugacacaaccacuagcgucgccacagaggaaaucaacagaauauucaagccauugauugggcccaggccucuggugaacggacuaaugggucggaucgauuauuacuggucuguacucaaaccaggccagacccugcgcauuaaguccgacgggaaucuuaucgcuccgugguauggacacauccugucaggcgagagccauggucgaauuuugaagacggaucucaaaagagggaguugcaccguucaaugucagacagaaaagggaggccugaacacuaccuuacccuuucagaaugugucuaaauacgcauucggcaacugcuccaaguauauagggaucaaaagccugaagcucgccgucggacuuaggaaugugccuucgcggucuucccguggucuguuuggcgcuauugccggguucaucgagggaggcuggucagguuugguggcggggugguacggcuuucagcacaguaacgaccaaggagucggcauggcagccgaccgcgauagcacacagaaggcuauagacaaaauuacuuccaagguuaauaacaucguggauaaaaugaauaagcaguaugaaaucauugaccacgaguucucugagguagaaaccagacuaaacaugaucaauaacaaaauugaugaccaaauacaggauaucugggccuacaaugcagagcugcucgugcugcuugaaaaccagaagacacuggacgagcaugaugcuaaugucaacaacuuguacaauaaagugaagagggcccucgggagcaacgcgguugaagacggaaaggguuguuuugagcuguaucacaaaugcaaugaucaguguauggagaccauucggaacggcacuuacaaucgacgcaaguaucaagaagagucaaaauuagaaagacagaagaucgagggggugaaacuggaaagugagggaacguacaagauccuaacaauuuauuccaccgucgccagcucucucgugauagcaaugggcuucgcugccuuucuguucugggcuaugucaaacgguaguuguaggugcaauaucugcauuuga

SEQ ID NO: 142078 - RNA, 1683 nt, Artificial Sequence; identical to SEQ ID NO: 142077
  derived and/or modified CDS sequence (opt3) from hemagglutinin__InfluenzaA__EPI680526

SEQ ID NO: 142079 - RNA, 1683 nt, Artificial Sequence; identical to SEQ ID NO: 141733
  derived and/or modified CDS sequence (opt3) from hemagglutinin__InfluenzaA__ALT20080

SEQ ID NO: 142080 - RNA, 1410 nt, Artificial Sequence
  derived and/or modified CDS sequence (opt3) from neuraminidase__InfluenzaA__AAA43084
augaaccccaaucagaagaucauuaccauaggcagcgugucccugacaaucgccacugucugcuuccucaugcaaauugcuauccuugcaacgaccguuacacugcacuuuaaacagcaugagugugacucuccugccucaaaccaggugaugccaugcgaaccgauuaucauagagagaaauaucacugaaauuguauacuugaacaauaccacaaucgagaaggaaauuugucccgagguggucgaguauaggaacuggaguaaaccucagugccaaaucaccggguucgcgccauuuagcaaggauaauuccauacgguuaucugcuggaggugacauuugggugacucgcgaacccuacguuucgugugauccuggcaaaugcuaucaguucgcccuggggcagggaacaacccuagacaacaagcacucaaauggcacgauccaugaucguauuccacaccgaacucuccugaugaacgagcuuggugugcccuuucaucuggggaccaagcaggucuguguggcauggagcaguuccucuugccacgacggaaaagccugguugcacguauguguuacaggcgaugacagaaaugcuacugccagcuucaucuacgauggcaggcucguggacuccaucgggucauggagucaaaacauucugcggacccaggaaagcgagugcgucuguauaaauggaacaugcaccguggugaugacggaugguucugcauccggccgcgcugacacuagaauccuguuuauuaaggaggggaaaaucguccauauaucaccucucagcggaagugcccagcacauugaagagugcucuuguuauccaagguacccggauguucggugcaucugucgcgacaacuggaagggcuccaaucgacccgugaucgacauuaacauggaagauuauagcaucgacucggguuacguaugcucuggguuagugggagauacaccuagaaacgacgauuccucaaguaauagcaacuguagggacccaaauaacgagcggggcaaucccggcgucaaagggugggcguucgauaacggagacgauguguggaugggucguaccauuaauaaggaaucccgcucuggcuacgagacuuuuaagguuauagggggauggagcacaccuaacucaaaaagucaggugaauagacaagucaucguggacaacaauaacugguccggcuauagcgguauuuucucuguagaggggaagucaugcaucaauagguguuuuuacguugaacugauccggggccgaccacaggagacccgcgugugguggacgaguaacagcauugucguguucugcggaaccuccggcacauaugggacuggaucuuggcccgauggugcaaauauaaacuuuaugccgaucuga

SEQ ID NO: 142081 - RNA, 1362 nt, Artificial Sequence
  derived and/or modified CDS sequence (opt3) from neuraminidase__InfluenzaA__AAA43397
augaaccccaaucagaagaucauuaccauaggcagcaucugcaugguggucgggauuaucucccugauucuccaaaucggaaacauaaucucuauuuggaucucacacaguauucagacagguaaucagaaccauacuggcaucuguaaucaggggagcauaacguacaaaguuguggccggacaagacuccaccucuguaauucuuacaggcaacucgucacugugcccuaucagagguugggcuauucacagcaaggauaaugggaucaggaucggaaguaaaggcgacguguucgucauucgggagccauuuauauccuguucucauuuggaaugccgcacuuucuuuuuaacccagggcgcacugcuaaacgauaagcacagccgagggacauucaaagaccguuccccguauagagcccucaugucaugucccgugggagaggcgccuaguccauacaauagcagguuugaaucuguugcuugguccgccucagcaugccaugauggugugggcuggcugaccaucgggauuagcggacccgacgauggcgccgucgcugugcuuaaguauaaccggaucauaacugagacaauuaagaguuggcgcaaaaauauccugagaacccaggaaucugaguguacgugcguaaacgguuccuguuucacuaucaugaccgacgggccuagcgauggauuggcaucguacaagauuuuuaaaaucgagaagggcaaaguuacaaagucuauugaacucaaugccccaaacucccacuaugaggaaugcucauguuaccccgacacuggcaaggugaugugcgucugcagggauaauuggcacgggaguaaccggccuugggugagcuucgaccagaaccuggauuauaaaauaggauacaucuguuccgguguguuuggcgacaauccacgcccgaaggacgggaccggaucuugcggccccgucagcgcugauggugccaacgggguuaaaggcuucucauacaaguauggaaauggcguguggauugggcgaacaaaaagugacuccagcagacauggauuugagaugaucugggauccuaacgguuggaccgagacggacucuagguucucaaugcggcaagauguaguggcgaucacuaaucguaguggcuacagcggguccuuuguccagcacccagaacugacaggacucgacuguaugcgccccugcuucuggguggaguuaauuagaggccugccugaagaggaugcaauauggaccucugguucgaucauuagcuucugugggguuaacuccgacacuguggauuggucauggccagacggcgccgaacuucccuuuacaaucgauaaguga

SEQ ID NO: 142082 - RNA, 1365 nt, Artificial Sequence
  derived and/or modified CDS sequence (opt3) from neuraminidase__InfluenzaA__AAA43412
augaaccccaaucagaagaucauuaccauaggcagcaucugccugguggucgggcucauuucccuuauccugcaaauuggaaacaucauaucuaucuggauuucacacaguauccagacagguagccagaaucauacuggcauuuguaaccagaauaucauaacguacaaaaacuccaccuggguuaaggacacaacuucugugauuuugaccggaaauucgucauuaugcccuaucagagggugggccauuuauagcaaagauaacaguaucaggaucggcuccaagggugacguauucgugauucgggagccauuuauaucuuguagccaccuggaaugccgcacauucuuucuaacccaaggggcucuccugaaugaucgacauuccaacggaacugucaaagaccguucaccguacagagcacuuaugaguugucccgugggcgaggccccuagcccauauaauucuagguucgaauccguugcguggucagcuagcgccugccacgauggcaugggguggcugacaaucggaauuaguggucccgacaacggcgcaguggccgucuugaaguacaaugggaucauaaccgagacgauuaagucuuggcggaaaaagauccuccgcacucaggaauccgagugugcuugcgugaacggaagcuguuuuaccaucaugacagauggcccuucggacggucuggcaucuuauaaaauuuucaagaucgagaaagggaagguaacuaaguccauugaacugaaugccccaaacucacauuacgaggaaugcaguuguuaucccgauaccggaaaaguuaugugcgugugcagagacaacuggcacggcagcaauaggccuugggucuccuuugaucagaaccucgacuaccagauaggcuacaucuguucugggguguucggagauaauccacggccgaaggacgguacaggcagcugcgggcccguguaugucgacggagcuaacggcguuaaagguuuuucauaccgcuaugggaauggcguguggauuggacgaaccaagagucacuccagcagacauggcuucgagaugaucugggauccuaacggguggacggagacugacucuaaauuuucaguaaggcaagauguggucgccaugacagacuggaguggauacagcgguuccuucgugcagcacccagaauuaaccggccuggauuguauccggcccugcuuuuggguugagcuuauucgugggcgcccuaaggagaaaacuauauggacaucugcgucgagcaucuccuucuguggagucaauucagacaccguggauuggaguuggccagacggcgcagaauugcccuucacgauugauaaguga

SEQ ID NO: 142083 - RNA, 1410 nt, Artificial Sequence
  derived and/or modified CDS sequence (opt3) from neuraminidase__InfluenzaA__AAG01743
augaaccccaaucagaagaucauuacccugggcagcgugucccucacaauagccacuaucugcuuccuuaugcaaauugcuauccuggucacgaccguuacauugcacuuuaaacaguacgagugugacuauccugcaaacaaucaggccaugccaugcgaaccgauuaucauagagagaaacaucacugaaauuguguacuuaaccaauacaaccaucgagaaggaaguaugucccaaacugguggaguauaggaacuggucuaagccucagugcaaaauuacuggguucgcgccauuuucaaaggauaauaguauccggcuaagcgcuggaggugacauaugggucacacgcgagcccuacguguccugugauccuggcaagugcuaucaauucgcccucgggcagggaaccacgcuggacaacaaacauucuaaugauacuauucacgaccgaaccccacaucguacacuucugaugaacgaauugggcguucccuuucaccucgguacuagacagguguguaucgcauggucgucaagcaguugccaugaugggaaggccuggcugcacgucugugugaccggauacgacaaaaaugcuacagcauccuucauuuaugauggcaggcugguagacucuaucggcagcuggucccagaacauccuccggacccaagagucagaaugcguuuguauuaaugggacgugcacuguggucaugacagauggaagugccagcggucgcgcugacaccaagauauuauuuaucgaggagggcaaaauugugcacacuucuccucuguccgggucagcccagcauguggaagagugcagcuguuacccaagauacccgggagucaggugcaucugucgggauaacuggaagggcaguaaucgccccguuguggacauaaacguaaaggacuauucuauuaacuccagcuacgugugcucgggucuugucggggauacaccucgaaauaacgacagaucuuccucaaguuauugucagaauccaaacaaugaaaaaggaacccacggcgugaagggcugggcguucgaugacgggaacgauguuuggaugggaaggacgaucagcgaggacucccggucugguuacgaaaccuuuaaagugaucggcggguggagcacacccaauucaaaguugcagauuaaccgucaagucaucguggauagugacaaucgcuccggauauagcggcauuuucucuguagaggguaaaucaugcauaaacagauguuuuuacguugagcugaucagggggcgggaacaggagacucgagugugguggaccaguaauagcauugucguguucugcggcacauccggaacuuauggcaccgggucuuggccugauggagcagacaucaacaucaugccaauuuga

SEQ ID NO: 142084 - RNA, 1410 nt, Artificial Sequence
  derived and/or modified CDS sequence (opt3) from neuraminidase__InfluenzaA__AAG01759
augaaccccaaucagaagaucauuaccauaggcagcgugucccugacaaucgccacuaugugcuuccucaugcaaauugcuauccuugucacgaccguuacacugcacuuuaaacaguacgaguguaacucuccuccaaauaaccaggugauuuugugcgaaccgacuaucauagagagaaauaucaccgaaauuguauauuuaacaaacaccacuaucgagaaggaaauuugucccaaacuggcagaguacaagaauuggucaaaaccucagugcaagaucacaggguucgccccauuuaguaaggacaacagcauaaggcuauccgcgggaggugauauuugggugacccgggagcccuaugucucuugugacccugauaaaugcuaccaauucgcucucggccaggggacgacucugaauaaccgccauucgaaugacaccgugcacgaucgaacaccauaucguacucuucugaugaacgaauugggaguucccuuucaucucggcaccaaacagguguguaucgccuggucaagcaguuccugccacgacgguaaggcauggcugcaugucugugugacagggcacgaugagaaugccaccgcuucuuucauuuacgacggaagacugguagauagcaucggcuccuggucaaagaaaauccucaggacgcaggaaagugagugcguuuguauuaacggcacuugcacaguggucaugaccgacgggagcgcaucuggacgggccgauacuaagauauuauuuaucgaggaagguaagauugugcacaucuccccucugcuuggcucagcucaacauguggaggaaugcagcuguuauccacgcuacccgggggucagaugcguuuguagggacaauuggaaaggaaguaaccggcccauaguggauauuaacguaaaggacuacucuaucguguccagcuaugucugcucgggcuuggugggugacacaccucgcaaaaaugaucgaucuuccucaaguaacugucugaauccaaacaaugaggaagggggacacggcguuaagggcugggccuucgacgaugggaacgacguguggaugggaagaaccaucagcgagaaacuaagguccgguuacgagacguuuaaggucauugaaggcuggucuaaacccaauagcaagcuccagaucaaccgucaggugauuguagaucgggggaaucgcucaggauauaguggcauauucuccguugaggguaagagcugcaucaacagauguuuuuacguggaacugauuagggggcggaaacaggagaccgaagucugguggacaucuaauucaaucguggucuucugcggcaccaguggaacuuauggcacagggagcuggccugacggagcggauaucaaccuuaugccaauuuga

SEQ ID NO: 142085 - RNA, 1410 nt, Artificial Sequence
  derived and/or modified CDS sequence (opt3) from neuraminidase__InfluenzaA__AAG01777
augaaccccaaucagaagaucauuaccauaggcagcgugucccugacaaucgccacuauuugcuuccucaugcaaaucgcuauucuugucacgaccguuacacugcacuuuaaacaguacgaguguaacucuccuccaaauaaccaggugaucuugugcgaaccgacuauaaucgagagaaauauuaccgaaaucguauauuuaacaaacaccacuauugagaaggaaaucugucccaaacuggcagaguacaagaauuggucaaaaccucagugcaagauaacaggguucgccccauuuaguaaggacaacagcauuaggcuauccgcgggaggugauaucugggugacccgggagcccuaugucucuugugacccugauaaaugcuaccaauucgcucucggccaggggacgacucugaauaaccgccauucgaaugacaccgugcacgaucgaacaccauaucguacucuucugaugaacgaauugggaguucccuuucaucucggcaccaaacagguguguauugccuggucaagcaguuccugccacgacgguaaggcauggcugcaugucugugugacagggcacgaugagaaugccaccgcuucuuucaucuacgacggaagacugguagauagcaucggcuccuggucaaagaaaauucucaggacgcaggaaagugagugcguuuguauaaacggcacuugcacaguggucaugaccgacgggagcgcaucuggacgggccgauacuaagaucuuauuuauugaggaagguaagaucgugcacauauccccucugcuuggcucagcucaacauguggaggaaugcagcuguuauccacgcuacccgggggucagaugcguuuguagggacaauuggaaaggaaguaaccggcccauuguggauaucaacguaaaggacuacucuaucguguccagcuaugucugcucgggcuuggugggugacacaccucgcaaaaaugaucgaucuuccucaaguaacugucugaauccaaacaaugaggaagggggacacggcguuaagggcugggccuucgacgaugggaacgacguguggaugggaagaaccauuagcgagaaacuaagguccgguuacgagacguuuaaggucaucgaaggcuggucuaaacccaauagcaagcuccagauuaaccggccugugauaguagaucguggggaccgcucaggauauaguggcaucuucuccguugaggguaagagcugcauuaauagauguuuuuacguggaacugaucagggggcggaaacaggagaccgaagucugguggacaucuaacucaaucguggucuucugcggcaccaguggaacuuauggcacagggagcuggccagauggagcggacauuaaucuuaugcccauauga

SEQ ID NO: 142086 - RNA, 1410 nt, Artificial Sequence
  derived and/or modified CDS sequence (opt3) from neuraminidase__InfluenzaA__AAG01786
augaaccccaaucagaagaucauuaccauaggcagcgugucccugacaaucgccacuaugugcuuccucaugcagauugcuauccuugucacgaccguuacacugcacuuuaaacaguacgaguguaacucuccuccaaauaaccaggugauuuugugcgaaccgacuaucauagagagaaauaucaccgaaauuguauauuuaacaaacaccacuaucgagaaggaaauuugucccaaacuggcagaguacaagaauuggucaaaaccucagugcaagaucacaggguucgccccauuuaguaaggacaacagcauaaggcuauccgcgggaggugauauuugggugacccgggagcccuaugucucuugugacccugauaaaugcuaccaauucgcucucggccaggggacgacucugaauaaccgccauucgaaugacaccgugcacgaucgaacaccauaucguacucuucugaugaacgaauugggaguucccuuucaucucggcaccaaacagguguguaucgccuggucaagcaguuccugccacgacgguaaggcauggcugcaugucugugugacagggcacgaugagaaugccaccgcuucuuucauuuacgacggaagacugguagauagcaucggcuccuggucaaagaaaauccucaggacgcaggaaagugagugcguuuguauuaacggcacuugcacaguggucaugaccgacgggagcgcaucuggacgggccgauacuaagauauuauuuaucgaggaagguaagauugugcacaucuccccucugcuuggcucagcucaacauguggaggaaugcagcuguuauccacgcuacccgggggucagaugcguuuguagggacaauuggaaaggaaguaaccggcccauaguggauauuaacguaaaggacuacucuaucguguccagcuaugucugcucgggcuuggugggugacacaccucgcaaaaaugaucgaucuuccucaaguaacugucugaauccaaacaaugaggaagggggacacggcguuaagggcugggccuucgacgaugggaacgacguguggaugggaagaaccaucagcgagaaacuaagguccgguuacgagacguuuaaggucauugaaggcuggucuaaacccaauagcaagcuccagaucaaccggcaagugauuguagaucguggggaccgcucaggauauaguggcauauucuccguugaggguaagagcugcaucaauagauguuuuuacguggaacugauuagggggcggaaacaggagaccgaagucugguggacaucuaacucaaucguggucuucugcggcaccaguggaacuuauggcacagggagcuggccugauggagcggacaucaaucuuaugccaauuuga

SEQ ID NO: 142087 - RNA, 1410 nt, Artificial Sequence
  derived and/or modified CDS sequence (opt3) from neuraminidase__InfluenzaA__AAK71688
augaaccccaaucagaagaucauuaccauaggcagcgugucccugacaaucgccacuaugugcuuccucaugcaaauugcuauccuugucacgaccguuacacugcacuuuaaacaguacgaguguaacucuccuccaaauaaccaggugauuuugugcgaaccgacuaucauagagagaaauaucaccgaaauuguauauuuaacaaacgcaaccaucgagaaggaaauuugucccaaacuggccgaguacaggaauuggucaaagccucagugcaaaaucacuggguucgcgccauuuaguaaggacaacagcauacggcuauccgcuggaggugauauuugggugacacgcgagcccuaugucucuugugacccugauaagugcuaccaauucgcccucggccaggggaccacgcugaauaaccgacauucgaaugacacugugcacgaucguaccccauauagaacacuucugaugaacgaauugggaguucccuuucaucucggcacuaaacagguguguaucgcauggucaagcaguuccugccacgacgguaaggccuggcugcaugucugugugaccgggcacgaugagaaugcuacagcaucuuucauuuacgacggaaggcugguagauagcaucggcuccuggaguaaaaagauccuccggacccaggaaucagagugcguuuguauuaacggcacgugcacuguggucaugacagacgggagcgccucuggacgcgcugauaccaaaauauuauuuaucgaggaagguaagauugugcacaucuccccucugcuuggcucagcccaacauguggaggaaugcagcuguuauccaagauacccgggggucaggugcguuugucgggacaauuggaagggaaguaaccgccccauaguggauauuaacguaaaagacuacucuaucguguccagcuaugucugcucgggcuuggugggugacacuccucgaaagaaugauagaucuuccucaaguaacugucugaauccaaacaaugaggaagggggacacggcguuaaaggcugggcguucgacgaugggaacgacguguggaugggaaggacaaucagcgaggagcuacgguccgguuacgaaaccuuuaaggucauugagggcuggucuaaacccaauagcaagcuccagaucaaccgucaggugauuguagaucgcggggacagaucaggauauaguggcauauucuccguugaagguaaaagcugcaucaauagguguuuuuacguggagcugauucgggggcgaaagcaggaaacggaggucugguggaccucuaacucaaucguggucuucugcggcacaaguggaacuuauggcaccgggagcuggccugauggagcagacaucaaucuuaugccaauuuga

SEQ ID NO: 142088 - RNA, 1410 nt, Artificial Sequence
  derived and/or modified CDS sequence (opt3) from neuraminidase__InfluenzaA__AAN01169
augaaccccaaucagaagaucauuaccauaggcagcgugucccugacaaucgccacuauuugcuuccucaugcaaaucgcuauucuugucacgaccguuacacugcacuuuaaacaguacgaguguaacucuuugccuaauaaccaggugauguuaugcgaaccaacuaucauagagagaaauaucaccgaaauuguauaucugacaaacaccacuaucgagaaggaaauuuguccgaaacuagcagaguacaggaauuggucaaagccccagugcaaaaucacaggguucgccccuuuuaguaaggacaacagcauacggcucuccgcgggaggugauauuugggugacccgcgagccauaugucucuugugaccccgauaagugcuaccaauucgcucugggccaggggacgacucuuaauaaccgacauucgaaugacaccgugcacgaucguacaccuuauagaacucuguugaugaacgaacucggaguuccauuucaucugggcaccaaacagguguguaucgccuggucaagcaguuccugccacgacgguaaggcauggcugcaugucugugugacagggcacgaugagaaugccaccgcuucuuucauuuacgacggaaggcucguagauagcaucggcuccuggaguaaaaagaucuuacggacgcaggaaucagagugcguuuguauuaacggcacuugcacaguggucaugaccgacgggagcgcaucuggacgcgccgauacuaaaauacuguuuaucgaggaagguaagauuauccacauaucccaacuuucaggcagcgcucagcauguggaggaaugcaguuguuaucccagauacccuggggugaggugcgucugucgggacaauuggaagggaucuaaccgcccaauuguugauaucaacgugaaagacuacuccaucguaagcucguaugugugcucuggcuuggucggugacacaccgcgaaagaaugauuccucaaguagcucccacugucugaaccccaauaacgaggaagggggacauggcgugaaaggcugggccuucgacgaugggaaugacguuuggaugggaagaaccauuucugagaaguuuaggagcgguuacgagacguucaaagugaucgaaggcuggucaaagccuaacaguaaacuacagauuaaucggcaggucauaguggaucgugacaaccgcuccggguauagcggaaucuuuucuguagagggcaagucaugcauuaauagauguuucuacguugaacucaucaggggucggaagcaagagaccgaagugugguggacaaguaacagcaucgucguguuuugcgggacuuccggcaccuauggaacaggcucuuggccagauggggcggacauuaaucugaugcccauauga

SEQ ID NO: 142089 - RNA, 1410 nt, Artificial Sequence; identical to SEQ ID NO: 142088
  derived and/or modified CDS sequence (opt3) from neuraminidase__InfluenzaA__AAN01170

SEQ ID NO: 142090 - RNA, 1410 nt, Artificial Sequence
  derived and/or modified CDS sequence (opt3) from neuraminidase__InfluenzaA__AAN01171
augaaccccaaucagaagaucauuaccauaggcagcgugucccugacaaucgccacuauuugcuuccucaugcaaaucgcuauucuugucacgaccguuacacugcacuuuaaacaguacgaguguaacucuuugccuaauaaccaggugauguuaugcgaaccaacuaucauagagagaaauaucaccgaaauuguauaucugacaaacaccacuaucgagaaggaaauuuguccgaaacuagcagaguacaggaauuggucaaagccccagugcaaaaucacaggguucgccccuuuuaguaaggacaacagcauacggcucuccgcgggaggugauauuugggugacccgcgagccauaugucucuugugaccccgauaagugcuaccaauucgcucugggccaggggacgacucuuaauaaccgacauucgaaugacaccgugcacggacguacaccuuauagaacucuguugaugaacgaacucggcguuccauuucaucuggguaccaaacagguguguaucgccuggucaagcaguuccugccacgaugggaaggcauggcugcaugucugugugacaggacacgacgagaaugccaccgcuucuuucauuuacgauggcaggcucguagacagcaucggcuccuggaguaaaaagaucuuacggacgcaggaaucagagugcguuuguauuaacgggacuugcacaguggucaugaccgauggaagcgcaucuggucgcgccgacacuaaaauacuguuuaucgaggaaggcaagauuauccacauaucccaacuuucagggagcgcucagcauguggaggaaugcaguuguuaucccagauacccuggagugaggugcgucugucgggauaauuggaagggcucuaaccgcccaauuguugacaucaacgugaaagauuacuccaucguaagcucguaugugugcucugguuuggucggggacacaccgcgaaagaaugacuccucaaguagcucccacugucugaaccccaauaacgaggaaggaggccauggcgugaaagggugggccuucgaugacggaaaugauguuuggauggguagaaccauuucugagaaguuuaggagcggcuacgagacguucaaagugaucgaaggguggucaaagccuaacaguaaacuacagauuaaucggcaggucauaguggaccgugauaaccgcuccggauauagcggcaucuuuucuguagaggguaagucaugcauuaauagauguuucuacguugaacucaucagggggcggaagcaagagaccgaagugugguggacaaguaacagcaucgucguguuuugcggcacuuccggaaccuauggcacagggucuuggccagacggagcggauauuaaucugaugcccauauga

SEQ ID NO: 142091 - RNA, 1410 nt, Artificial Sequence; identical to SEQ ID NO: 142088
  derived and/or modified CDS sequence (opt3) from neuraminidase__InfluenzaA__AAN01172

SEQ ID NO: 142092 - RNA, 1410 nt, Artificial Sequence
  derived and/or modified CDS sequence (opt3) from neuraminidase__InfluenzaA__AAN01173
augaaccccaaucagaagaucauuaccauaggcagcgugucccugacaaucgccacuauuugcuuccucaugcaaaucgcuauucuugucacgaccguuacacugcacuuuaaacaguacgaguguaacucuuugccuaauaaccaggugauguuaugcgaaccaacuaucauagagagaaauaucaccgaaauuguauaucugacaaacaccacuaucgagaaggaaauguguccgaaacuagcagaguacaggaauuggucaaagccccagugcaaaauuacaggguucgccccuuuuaguaaggacaacagcauccggcucuccgcgggaggugauauaugggugacccgcgagccauaugucucuugugaccccgauaagugcuaccaauucgcucugggccaggggacgacucuuaauaaccgacauucgaaugacaccgugcacgaucguacaccuuauagaacucuguugaugaacgaacucggaguuccauuucaucugggcaccaaacagguguguauugccuggucaagcaguuccugccacgacgguaaggcauggcugcaugucugugugacagggcacgaugagaaugccaccgcuucuuucaucuacgacggaaggcucguagauagcauuggcuccuggaguaaaaagaucuuacggacgcaggaaucagagugcguuuguaucaacggcacuugcacaguggucaugaccgacgggagcgcaucuggacgcgccgauacuaaaauucuguuuauagaggaagguaagaucauucacaucucccaacuuucaggcagcgcucagcauguggaggaaugcaguuguuaucccagauacccuggggugaggugcgucugucgggacaauuggaagggaucuaaccgcccaauaguugauauuaacgugaaagacuacuccaucguaagcucguaugugugcucuggcuuggucggugacacaccgcgaaagaaugauuccucaaguagcucccacugucugaaccccaauaacgaggaagggggacauggcgugaaaggcugggccuucgacgaugggaaugacguuuggaugggaagaaccaucucugagaaguuuaggagcgguuacgagacguucaaagugauugaaggcuggucaaagccuaacaguaaacuacagaucaaucggcaggucauuguggaucgugacaaccgcuccggguauagcggaauauuuucuguagagggcaagucaugcaucaauagauguuucuacguugaacucauuaggggucggaagcaagagaccgaagugugguggacaaguaacagcaucgucguguuuugcgggacuuccggcaccuauggaacaggcucuuggccagauggggcggacaucaaucugaugcccauuuga

SEQ ID NO: 142093 - RNA, 1410 nt, Artificial Sequence; identical to SEQ ID NO: 142088
  derived and/or modified CDS sequence (opt3) from neuraminidase__InfluenzaA__AAN01174

SEQ ID NO: 142094 - RNA, 1410 nt, Artificial Sequence; identical to SEQ ID NO: 142088
  derived and/or modified CDS sequence (opt3) from neuraminidase__InfluenzaA__AAN01175

SEQ ID NO: 142095 - RNA, 1410 nt, Artificial Sequence; identical to SEQ ID NO: 142088
  derived and/or modified CDS sequence (opt3) from neuraminidase__InfluenzaA__AAN01176

SEQ ID NO: 142096 - RNA, 1410 nt, Artificial Sequence; identical to SEQ ID NO: 142088
  derived and/or modified CDS sequence (opt3) from neuraminidase__InfluenzaA__AAN01177

SEQ ID NO: 142097 - RNA, 1410 nt, Artificial Sequence; identical to SEQ ID NO: 142088
  derived and/or modified CDS sequence (opt3) from neuraminidase__InfluenzaA__AAN01178

SEQ ID NO: 142098 - RNA, 1410 nt, Artificial Sequence; identical to SEQ ID NO: 142088
  derived and/or modified CDS sequence (opt3) from neuraminidase__InfluenzaA__AAN01179

SEQ ID NO: 142099 - RNA, 1410 nt, Artificial Sequence; identical to SEQ ID NO: 142088
  derived and/or modified CDS sequence (opt3) from neuraminidase__InfluenzaA__AAN01180

SEQ ID NO: 142100 - RNA, 1410 nt, Artificial Sequence
  derived and/or modified CDS sequence (opt3) from neuraminidase__InfluenzaA__AAN01181
augaaccccaaucagaagaucauuaccauaggcagcgugucccugacaaucgccacuauuugcuuccucaugcaaaucgcuauucuugucacgaccguuacacugcacuuuaaacaguacgaguguaacucuuugccuaauaaccaggugauguuaugcgaaccaacuaucauagagagaaauaucaccgaaauuguauaucugacaaacaccacuaucgagaaggaaauuuguccgaaacuagcagaguacaggaauuggucaaagccccagugcaaaaucacaggguucgccccuuuuaguaaggacaacagcauacggcucuccgcgggaggugauauuugggugacccgcgagccauaugucucuugugaccccgauaagugcuaccaauucgcucugggccaggggacgacucuuaauaaccgacauucgaaugacaccgugcacgaucguacaccuuauagaacucuguugaugaacgaacucggaguuccauuucaucugggcaccaaacagguguguaucgccuggucaagcaguuccugccacgacgguaaggcauggcugcaugucugugugacagggcacgaugagaaugccaccgcuucuuucauuuacgacggaaggcucguagauagcaucggcuccuggaguaaaaagaucuuacggacgcaggaaucagagugcguuuguauuaacggcacuugcacaguggucaugaccgacgggagcgcaucuggacgcgccgauacuaaaauacuguuuaucgaggaagguaagauuauccacauaucccaacuuucaggcagcgcucagcauguggaggaaugcaguuguuaucccagauacccuggggugaggugcgucugucgggacaauuggaagggaucuaaccgcccaauuguugauaucaacgugaaagacuacuccaucguaagcucguaugugugcucuggcuuggucggugacacaccgcgaaagaaugauuccucaaguagcucccacugucugaaccccaauaacgaggaagggggacauggcgugaaaggcugggccuucgacgaugggaaugacguuuggaugggaagaaccauuggugagaaguuuaggucuggcuacgagacguucaaagugaucgaaggguggagcaagccuaacucaaaacuacagauuaaucggcaggucauaguggaucgugacaaccgcaguggauauuccggcaucuuuagcguagaggguaagucuugcauuaauagauguuucuacguugaacucaucagggggcggaagcaagagaccgaagugugguggacaucaaacaguaucgucguguuuugcggcacuagcggaaccuauggcacaggguccuggccagauggagcggacauuaaucugaugcccauauga

SEQ ID NO: 142101 - RNA, 1410 nt, Artificial Sequence; identical to SEQ ID NO: 142088
  derived and/or modified CDS sequence (opt3) from neuraminidase__InfluenzaA__AAN01182

SEQ ID NO: 142102 - RNA, 1410 nt, Artificial Sequence; identical to SEQ ID NO: 142088
  derived and/or modified CDS sequence (opt3) from neuraminidase__InfluenzaA__AAN01183

SEQ ID NO: 142103 - RNA, 1410 nt, Artificial Sequence; identical to SEQ ID NO: 142088
  derived and/or modified CDS sequence (opt3) from neuraminidase__InfluenzaA__AAN01184

SEQ ID NO: 142104 - RNA, 1410 nt, Artificial Sequence; identical to SEQ ID NO: 142088
  derived and/or modified CDS sequence (opt3) from neuraminidase__InfluenzaA__AAN01185

SEQ ID NO: 142105 - RNA, 1410 nt, Artificial Sequence
  derived and/or modified CDS sequence (opt3) from neuraminidase__InfluenzaA__AAN01186
augaaccccaaucagaagaucauuaccauaggcagcgugucccugacaaucgccacuauuugcuuccucaugcaaaucgcuauucuugucacgaccguuacacugcacuuuaaacaguacgaguguaacucuuugccuaauaaccaggugauguuaugcgaaccaacuaucauagagagaaauaucaccgaaauuguauaucugacaaacaccacuaucgagaaggaaauuuguccgaaacuagcagaguacaggaauuggucaaagccccagugcaaaaucacaggguucgccccuuuuaguaaggacaacagcauacggcucuccgcgggaggugauauuugggugacccgcgagccauaugucucuugugaccccgauaagugcuaccaauucgcucugggccaggggacgacucuuaauaaccgacauucgaaugacaccgugcacgaucguacaccuuauagaacucuguugaugaacgaacucggaguuccauuucaucugggcaccaaacagguguguaucgccuggucaagcaguuccugccacgacgguaaggcauggcugcaugucugugugacagggcacgaugagaaugccaccgcuucuuucauuuacgacggaaggcucguagauagcaucggcuccuggaguaaaaagaucuuacggacgcaggaaucagagugcguuuguauuaacggcacuugcacaguggucaugaccgacgggagcgcaucuggacgcgccgauacuaaaauacuguuuaucgaggaagguaagauuauccacauaucccaacuuucaggcagcgcucagcauguggaggaaugcaguuguuaucccagauacccuggggugaggugcgucugucgggacaauuggaagggaucuaaccgcccaauuguugauaucaacgugaaagacuacuccaucguaagcucguaugugugcucuggcuuggucggugacacaccgcgaaagaaugauuccucaaguagcucccacugucugaaccccaauaacgaggaagggggacauggcgugaaaggcugggccuucgacgaugggaaugacguuuggaugggaagaaccauuucugagaaguuuaggcuagguuacgagacguucaaagugaucgaaggcuggagcaagucaaacaguaaacuccagauuaaucggcaggucauaguggaucgugacaaccgcuccggguauagcggaaucuuuucuguagagggcaagucaugcauuaauagauguuucuacguugaacugaucaggggucggaagcaagagaccgaagugugguggacaaguaacagcaucgucguguuuugcgggacuuccggcaccuauggaacaggcucuuggccugauggggcggacauuaaucuuaugccaauauga

SEQ ID NO: 142106 - RNA, 1410 nt, Artificial Sequence
  derived and/or modified CDS sequence (opt3) from neuraminidase__InfluenzaA__AAN01187
augaaccccaaucagaagaucauuaccauaggcagcgugucccugacaaucgccacuauuugcuuccucaugcaaaucgcuauucuugucacgaccguuacacugcacuuuaaacaguacgagugugacucuuugccuaacaaucaggugauguuaugcgaaccaacuaucauagagagaaacaucaccgaaauuguauaucugacaaauaccacuaucgagaaggaaauguguccgaaacuagcagaguacaggaacuggucaaagccccagugcaaaauuacaggguucgccccuuuuaguaaggauaauagcauccggcucuccgcgggaggugacauaugggugacccgcgagccauaugucucuugugaucccgacaagugcuaccaauucgcucugggccaggggacgacucuuaacaaucgacauucgaacgauaccgugcacgaccguacaccuuauagaacucuguugaugaaugaacucggaguuccauuucaucugggcaccaaacagguguguauugccuggucaagcaguuccugccacgaugguaaggcauggcugcaugucugugugacagggcacgacgagaacgccaccgcuucuuucaucuacgauggaaggcucguagacagcauuggcuccuggaguaaaaagaucuuacggacgcaggaaucagagugcguuuguaucaauggcacuugcacaguggucaugaccgaugggagcgcaucuggacgcgccgacacuaaaauucuguuuauagaggaagguaagaucauucacaucucccaaaugucaggcagcgcucagcauguggaggaaugcaguuguuaucccagauacccuggggugaggugcgucugucgggauaacuggaagggaucuaaucgcccaauaguugacauuaacgugaaagacuacuccaucguaagcucguaugugugcucuggccuugucggugauacaccgcgaaagaacgacuccucaaguagcucccacuguuugaaucccaacaaugaggaagggggacauggcgugaaaggcugggccuucgaugacgggaacgauguuuggaugggaagaaccaucucugagaaguuuaggagcgguuacgagacguucaaagugauugaaggcuggucaaagccuaauaguaaacugcagaucaaccggcaggucauuguggaccgugauaaucgcuccggguauagcggaauauuuucuguagagggcaagucaugcaucaacagauguuucuacguugaacuaauuaggggucggaagcaagagaccgaagugugguggacaaguaauagcaucgucguguuuugcgggacuuccggcaccuauggaacaggcucuuggccagacggggcggauaucaaccucaugcccauuuga

SEQ ID NO: 142107 - RNA, 1410 nt, Artificial Sequence; identical to SEQ ID NO: 142088
  derived and/or modified CDS sequence (opt3) from neuraminidase__InfluenzaA__AAN01188

SEQ ID NO: 142108 - RNA, 1410 nt, Artificial Sequence
  derived and/or modified CDS sequence (opt3) from neuraminidase__InfluenzaA__AAN64883
augaaccccaaucagaagaucauuaccauaggcagcgugucccugacaaucgccacuauuugcuuccucaugcaaaucgcuauucuugucacgaccguuacacugcacuuuaaacaguacgaguguaacucuccuccaaauaaccaggugauguugugcgaaccgacuaucauagagagaaauaucaccgaaauuguauauuuaacaaacaccacuaucgagaaggaaauuugucccaaacuggcagaguacaggaauuggucaaagccucagugcaacaucacaggguucgccccauuuaguaaagacaauagcauacggcuauccgcgggaggugauauuugggugacccgcgagcccuaugucucuugugacccugauaagugcuaccaauucgcucucggccaggggacgacucugaacaauggacauucgaacgacaccgugcacgaucgaacaccauaucguacucuucugaugaaugaauugggcguucccuuucaucucgguaccaaacagguguguaucgccuggucaagcaguuccugccacgacgggaaggcauggcugcaugucugugugacaggagaugacgagaacgccaccgcuucuuucauuuacaauggcagacugguagauagcaucggcuccuggucaaagaaaauccucaggacgcaggaaagugagugcguuuguauuaacgggacuugcacaguggucaugaccgacggaagcgcaucugguaaggccgauacuaaaauauuauuuaucgaggaaggcaagauugugcacacaucccugcuuucagggagcgcucaacacguggaggaaugcaguuguuauccucgguacccaggaguccgcugcguuuguagagacaacuggaagggcucuaauaggccgaucguggauauaaacguaaaagacuacuccauugugagcucguaugucugcucugguuuggugggggacacuccccggaagaaugauuccucaaguagcucccauugucuggacccuaacaaugaggaaggaggccacggcguuaaagggugggccuucgaugacggagaugacguguggaugggucgcacgaucucugagaagcuacgaagcggcuacgagaccuuuaaagucaucgaaggguggucaaagccaaacaguaaacuccagauuaauagacaggugaucguagauaggggaaaccgguccggcuauagcgguauuuucucuguugaggggaagucaugcauaaaucguuguuuuuacguggaacugauccgcggcagaaagcaggagacagaaguccuuuggaccaguaacagcauuguggucuucugcggaaccuccggcacauaugggacuggaucuuggcccgacggugcggauaucaaucugaugccuaucuga

SEQ ID NO: 142109 - RNA, 1410 nt, Artificial Sequence
  derived and/or modified CDS sequence (opt3) from neuraminidase__InfluenzaA__AAN64884
augaaccccaaucagaagaucauuaccauaggcagcgugucccugacaaucgccacuauuugcuuccucaugcaaaucgcuauucuugucacgaccguuacacugcacuuuaaacaguacgaguguaacucuccuccaaauaaccaggugauguugugcgaaccgacuaucauagagagaaauaucaccgaaauuguauauuuaacaaacaccacuaucgagaaggaaauuugucccaaacuggcagaguacaggaauuggucaaagccucagugcaacaucacaggguucgccccauuuaguaaagacaauagcauacggcuauccgcgggaggugauauuugggugacccgcgagcccuaugucucuugugacccugauaagugcuaccaauucgcucucggccaggggacgacucugaacaauggacauucgaacgacaccgugcacgaucgaacaccauaucguacucuucugaugaaugaauugggcguucccuuucaucucgguaccaaacagguguguaucgccuggucaagcaguuccugccacgacgggaaggcauggcugcaugucugugugacaggagaugacgagaacgccaccgcuucuuucauuuacaauggcagacugguagauagcaucggcuccuggucaaagaaaauccucaggacgcaggaaagugagugcguuuguauuaacgggacuugcacaguggucaugaccgacggaagcgcaucugguaaggccgauacuaaaauauuauuuaucgaggaaggcaagauugugcacacaucccugcuuucagggagcgcucaacacguggaggaaugcaguuguuauccucgguacccaggaguccgcugcguuuguagagacaacuggaagggcucuaauaggccgaucguggauauaaacguaaaagacuacuccauugugagcucguaugucugcucugguuuggugggggacacuccccggaagaaugauuccucaaguagcucccauugucuggacccuaacaaugaggaaggaggccacggcguuaaagggugggccuucgaugacggaaacgauguguggaugggucgcacgaucucugagaagcuacgaagcggcuacgagaccuuuaaagucaucgaaggguggucaaagccaaauaguaaacuccagauuaacagacaggugaucguagacaggggaaaucgguccggcuauagcgguauuuucucuguugaggggaagucaugcauaaaccguuguuuuuacguggaacugauccgcggcagaaagcaggagacagaaguccuuuggaccaguaauagcauuguggucuucugcggaaccuccggcacauaugggacuggaucuuggcccgauggugcggacaucaaccugaugccuaucuga

SEQ ID NO: 142110 - RNA, 1410 nt, Artificial Sequence; identical to SEQ ID NO: 142109
  derived and/or modified CDS sequence (opt3) from neuraminidase__InfluenzaA__AAN64885

SEQ ID NO: 142111 - RNA, 1410 nt, Artificial Sequence; identical to SEQ ID NO: 142109
  derived and/or modified CDS sequence (opt3) from neuraminidase__InfluenzaA__AAN64886

SEQ ID NO: 142112 - RNA, 1410 nt, Artificial Sequence; identical to SEQ ID NO: 142109
  derived and/or modified CDS sequence (opt3) from neuraminidase__InfluenzaA__AAN64887

SEQ ID NO: 142113 - RNA, 1410 nt, Artificial Sequence
  derived and/or modified CDS sequence (opt3) from neuraminidase__InfluenzaA__AAN64888
augaaccccaaucagaagaucauuaccauaggcagcgugucccugacaaucgccacuauuugcuuccucaugcaaaucgucauucuuguuacgaccgugacacugcacuuuaaacaguacgaguguaacucuccuccaaauaaccagguaauguugugcgaaccgacuaucauagagagaaauaucaccgaaauuguguauuuaacaaacaccacuaucgagaaggaaauuugucccaaacuggcugaguacaggaauuggucaaagccucagugcaacaucacaggguucgcaccauuuaguaaagacaauagcauacggcuauccgccggaggugauauuugggucacccgcgagcccuaugugucuugugacccugauaagugcuaccaauucgcgcucggccaggggacgacucugaacaauggacauucgaacgacaccguucacgaucgaacaccauaucguacucuucugaugaaugaauugggcgugcccuuucaucucgguaccaagcaggucuguaucgcuuggucaagcaguuccugccacgacgggaaagccuggcugcauguguguguaacaggagaugacaagaacgcaaccgccucuuucauuuacaauggcagacugguugauagcaucggcuccuggaguaaaaagauccucaggacgcaggagucagaaugcguguguauuaacgggacuugcacagucgugaugaccgacggaagcgcuucugguaaagcagauacuaagauauuauuuaucgaggagggcaagauugugcacacaucccugcuuucagggagcgcccaacacgucgaagagugcaguuguuauccucgguacccaggaguucgcugcguguguagagacaacuggaaaggcucuaauaggccgaucguagauauaaacgugaaggacuacuccauugucagcucguaugugugcucugguuugguuggggacacuccccggaaaaaugauuccucaaguagcucccauugucuggacccuaacaaugaagagggaggccacggcgugaaggggugggcuuucgaugacggaaacgaugucuggaugggucgcacgaucucugaaaaacuacgaagcggcuacgagaccuuuaaggugaucgagggguggucaaaaccaaauaguaagcuccagauuaacagacagguaaucguugacaggggaaaucgguccggcuauagcgguauuuucucuguggaagggaagucaugcauaaaccguuguuuuuacgucgagcugauccgcggcagaaaucaggaaacagaggugcuuuggaccaguaacagcauugucguguucugcggaaccuccggcacauaugggacuggaucuuggcccgauggugccgacaucaaucugaugccuaucuga

SEQ ID NO: 142114 - RNA, 1410 nt, Artificial Sequence; identical to SEQ ID NO: 142109
  derived and/or modified CDS sequence (opt3) from neuraminidase__InfluenzaA__AAN64889

SEQ ID NO: 142115 - RNA, 1410 nt, Artificial Sequence
  derived and/or modified CDS sequence (opt3) from neuraminidase__InfluenzaA__AAN64890
augaaccccaaucagaagaucauuaccauaggcagcgugucccugacaaucgccacuauuugcuuccucaugcaaaucgcuauucuugucacgaccguuacacugcacuuuaaacaguacgaguguaacucuccuccaaauaaccaggaaauguugugcgagccgacuaucauagaaagaaauaucaccgagauuguguauuuaacaaacaccacuaucgaaaaggagauuugucccaaacuggcagaguacaggaauuggucaaagccucagugcaacaucacaggguucgccccauuuaguaaagacaauagcauacggcuauccgcgggaggugauauuuggguaacccgcgaacccuaugugucuugugacccugauaagugcuaccaauucgcucucggccaggggacgacucugaacaauggacauucgaacgacaccguccacgaucgaacaccauaucguacucuucugaugaaugaguugggcgugcccuuucaucucgguaccaagcagguuuguaucgccuggucaagcaguuccugccacgacgggaaagcauggcugcaugugugugucacaggagaugacgaaaacgccaccgcuucuuucauuuacaauggcagacugguggauagcaucggcuccuggucaaagaaaauccucaggacgcaggagagugagugcguauguauuaacgggacuugcacaguugugaugaccgacggaagcgcaucugguaaggccgauacuaaaauauuauuuaucgaagagggcaagauuguccacacaucccugcuuucagggagcgcucaacacguggaagagugcaguuguuauccucgguacccaggagugcgcugcgucuguagagacaacuggaagggcucuaauaggccgaucguugauauaaacgugaaagacuacuccauuguaagcucguaugugugcucugguuuggucggggacacuccccggaagaaugauuccucaaguagcucccauugucuggacccuaacaaugaagagggaggccacggcgugaaagggugggccuucgaugacggaaacgauguuuggaugggucgcacgaucucugagaagcuacgaagcggcuacgaaaccuuuaaagugaucgagggguggucaaagccaaauaguaaacuccagauuaacagacaggucaucguggacaggggaaaucgguccggcuauagcgguauuuucucuguagaagggaagucaugcauaaaccguuguuuuuacguugagcugauccgcggcagaaagcaggaaacagaggugcuuuggaccaguaauagcauugucguguucugcggaaccuccggcacauaugggacuggaucuuggcccgauggugcggacaucaaccugaugccuaucuga

SEQ ID NO: 142116 - RNA, 1410 nt, Artificial Sequence; identical to SEQ ID NO: 142109
  derived and/or modified CDS sequence (opt3) from neuraminidase__InfluenzaA__AAN64891

SEQ ID NO: 142117 - RNA, 1410 nt, Artificial Sequence
  derived and/or modified CDS sequence (opt3) from neuraminidase__InfluenzaA__AAO46212
augaaccccaaucagaagaucauuaccauaggcagcgugucccugacaaucgagacugucugcuuccucaugcaaauugccauccuugcuacgaccguuacacugcacuuuaaacagcaugaaugugacucuccugcaucaaaccaggugaugccaugcgagccgauuaucauagaaagaaauaucacugagauuguauacuugaacaauaccacaaucgaaaaggagauuugucccgagguggucgaauauaggaacuggaguaaaccucagugccaaaucaccggguucgccccauuuagcaaggauaauuccauacgguuaucugcgggaggugacauuugggugacucgcgagcccuacguuucgugugauacaggcaaaugcuaucaguucgcucuggggcagggaaccacgcuagacaacaagcacucaaauggcacuauccaugaucguauuccucaccgaacccuccugaugaacgaacuuggugugccauuucaucuggggacaaagcaggucuguguggccuggagcaguuccucuugccacgacggaaaagcaugguugcacguauguguuacuggcgaugacagaaaugccaccgcuagcuucaucuacgauggcaggcucguggacuccaucgggucauggagucaaaacauucugcggacacaggagagcgagugcgucuguauaaauggaaccugcacgguggugaugacugaugguucugcauccggccgcgccgacacaagaauccuguuuauuaaggaagggaaaaucguccauauaucaccccucagcggaagugcucagcacauugaggaaugcucuuguuauccuagguacccagauguucggugcaucugucgcgacaacuggaagggcuccaaucgaccggugaucgacauuaacauggaggauuauagcaucgacucgucuuacguaugcuccgguuuagugggggauacccccagaaacgacgauucaaguagcaauuccaacuguagggacccuaauaacgaacggggaaauccaggcgucaaaggcugggccuucgauaacggggacgauguguggaugggacguacuauuucuaaggaccugcgcagcgguuacgagacauuuaagguuauaggcggguggucaacccccaauaguaaaucccaggugaacagacaagucaucguggauaauaacaauuggagcggauauucuggcauuuucucaguagaggguaagaguugcaucaacagguguuuuuacguugaacuuauccgggggcgaccucaggagacgcgcgugugguggaccagcaauuccauugucguguucugcggcacaucuggaacuuauggcaccgggucguggccagacggagcgaacauaaauuuuaugcccaucuga

SEQ ID NO: 142118 - RNA, 1410 nt, Artificial Sequence
  derived and/or modified CDS sequence (opt3) from neuraminidase__InfluenzaA__AAO46213
augaaccccaaucagaagaucauuaccauagacagcgugucccugacaaucgccacugucugcuuccucaugcaaauugcuauccuugcaacgaccguuacacugcacuuuaaacagcaugagugugauucuccugccucaaaccaggugaugccaugcgaaccgauuaucauagagagaaauaucacugaaauuguauacuugaacaauaccacaaucgagaaggaaauuugucccgagguggucgaguauaggaacuggaguaaaccucagugccaaaucaccggcuucgcgccauuuagcaaggacaauuccauacgguuaucugcugggggagauauuugggugacucgcgaacccuacguuucgugugacacagguaaaugcuaucaguucgcccugggccaggggaccacgcuagauaacaagcacucaaauggaacuauccaugaccguauuccucaccgaacccuccugaugaacgagcuuggcgugccauuucaucuggguacaaagcaggucuguguggcauggagcaguuccucuugccacgaugggaaagccugguugcacguauguguuacuggagacgauagaaaugcuaccgccagcuucaucuacgacggcaggcucguggauuccaucggcucauggagucaaaacauucugcggacacaggaaagcgagugcgucuguauaaaugggaccugcacgguggugaugacugacggaucugcauccggucgcgcugauacaagaauccuguuuauuaaggagggcaaaaucguccauauaucaccccucagcgggagugcccagcacauugaagagugcucuuguuauccuagguacccagacguucggugcaucugucgcgacaacuggaagggauccaaucgaccggugaucgauauuaacauggaagacuauagcaucgauucgucuuacguaugcuccggcuuagugggugacacccccagaaacgaugacucaaguagcaauuccaacuguagggauccuaauaacgagcgggggaauccaggagucaaaggcugggcguucgacaacggcgaugacguguggauggggcguacuauuucuaaggaucugcgcagcggauacgaaacauuuaagguuauagguggcuggucaacccccaauaguaaaucccaggugaacagacaagucaucguggacaauaacaauuggagcggguauucuggaauuuucucaguagagggcaagaguugcaucaacagguguuuuuacguugagcuuauccggggucgaccucaggaaacgcgcgugugguggaccagcaauuccauugucguguucugcgggacaucuggcacuuauggaaccggcucguggccagacggggcaaacauaaauuuuaugcccaucuga

SEQ ID NO: 142119 - RNA, 1410 nt, Artificial Sequence
  derived and/or modified CDS sequence (opt3) from neuraminidase__InfluenzaA__AAO46214
augaaccccaaucagaagaucauuaccauaggcagcgugucccugacaaucgccacugucugcuuccucaugcaaauugcuauccuugcaacgaccguuacacugcacuuuaaacagcaugagugugacucuccugccucaaaccaggugaugccaugcgaaccgauuaucauagagagaaauaucacugaaauuguauacuugaacaauaccacaaucgagaaggaaauuugucccgaggcgguggaguauaggaacuggaguaaaccucagugccaaaucaccggguucgcuccauuuagcaaggauaauuccauacgguuaucugccggaggugacauuugggucacucgcgaacccuacgugucgugugauccuggcaaaugcuaucaguucgcacuggggcagggaacaacccuagacaacaagcacucaaauggcacgauccaugaucgaaucccacaccguacucuccugaugaacgagcuugguguucccuuucaucuggggaccaaacaggugugugucgccuggagcaguuccucuugccacgacggaaaggcuugguugcacguguguguaacaggcgaugacagaaaugcaacugccagcuucauuuacgauggcaggcucguugacuccaucgggucauggagucaaaacauucugcggacccaggaaagcgagugcguguguauaaauggaaucugcacagucgugaugaccgaugguucugcuuccggccgcgccgacacgaggauucuguuuaucgaggaagggaagauagugcauauuucaccucucagcggaagugcgcagcacgucgaggaaugcucuuguuauccaagauacccggauguucggugcaucugucgcgacaacuggaaaggcuccaaucgacccgugaucgacauuaacauggaggauuauagcaucgacucgucuuacguaugcuccgguuuagugggggauacuccuagaaacgacgauaggucaaguaauagcaacugucgggacccaaauaacgaacguggaaaucccggcgucaagggcugggcauucgauaacggggacgauguguggaugggacgcacaauuuccaaagaccugagaucugguuacgagaccuuuaagguuauaggcggguggagcacuccuaauucaaagagucaggugaacaggcaagucaucguggauaauaacaauugguccggauauagcggcauuuucucuguagaggguaaaucaugcaucaaccgguguuuuuacguugaacuuauccgagggcgccagcaggagacaagagugugguggaccaguaauagcauugucguguucugcggcacguccggaaccuauggcacagggucuuggccagacggagccaacauaaauuuuaugcccaucuga

SEQ ID NO: 142120 - RNA, 1410 nt, Artificial Sequence
  derived and/or modified CDS sequence (opt3) from neuraminidase__InfluenzaA__AAO46215
augaaccccaaucagaagaucauuaccauaggcagcgugucccugacaaucgccacugucugcuuccucaugcaaauugcuauccuugcaacgaccguuacacugcacuuuaaacagcaugagugugacucuccuacuucaaaccaggugaugccaugcgaaccgauuaucauagagagaaauaucaccgaaauuguauacuugaacaauacaaccaucgagaaggaaauuugucccgagguggucgaguauaggaacuggaguaaaccucagugccaaaucacuggguucgccccauuuagcaaggauaauuccauacgguuaucugcgggaggugacauuugggugacacgcgaacccuacguuucgugugauccuggcaaaugcuaucaguucgcucuggggcagggaaccacgcuagacaacaagcacucaaauggcacuauccaugaucguauuccacaccgaacccuccugaugaacgagcuuggugugcccuuucaucuggggacaaagcaggucuguguggccuggagcaguuccucuugccacgacggaaaagcaugguugcacguauguguuacuggcgaugacagaaaugccaccgcuagcuucaucuacgauggcaggcucguggacuccaucgggucauggagucaaaacauucugcggacacaggaaagcgagugcgucuguauaaauggaaccugcacgguggugaugacugaugguucugcauccggccgcgccgacacaagaauccuguuuauuaaggaggggaaaaucguccauauaucaccucucagcggaagugcucagcacauugaagagugcucuuguuauccaagguacccggauguucggugcaucugucgcgacaacuggaagggcuccaaucgacccgugaucgacauuaacauggaagauuauagcaucgacucgucuuacguaugcuccgguuuagugggggauaccccuagaaacggagacucaaguagcaauuccaacuguagggauccaaauaacgagcggggcaaucccggcgucaaagggugggccuucgacaacggagaugacguguggaugggucguacuauuucuaaggaaagccgcucaggcuacgagacauuuaagguuauagggggauggaguaccccuaauuccaaaagccaggugaacagacaagucaucguggauaauaacaauuggucuggcuauucagguauuuucaguguagagggcaagagcugcaucaacagguguuuuuacguugaacugauccgggggcgaccacaggagacgcgcgugugguggaccuccaauucuauugucguguucugcggaacaucgggcacuuaugggaccggaagcuggcccgacggugcgaacauaaauuuuaugccgaucuga

SEQ ID NO: 142121 - RNA, 1410 nt, Artificial Sequence
  derived and/or modified CDS sequence (opt3) from neuraminidase__InfluenzaA__AAO46216
augaaccccaaucagaagaucauuaccauaggcagcgugucccugacaaucgccacugucugcuuccucaugcaaauugcuauccuugcaacgaccguuacacugcacuuuaaacagcaugagugugacucuccugccucaaaccaggugaugccaugcgaaccgauuaucauagagagaaauaucacugaaauuguauacuugaacaauaccacaaucgagaaggaaauuugucccgagguggucgaguauaggaacuggaguaaaccucagugccaaaucaccggguucgcgccauuuagcaaggauaauuccauacgguuaucugcuggaggugacauuugggugacucgcgaacccuacguuucgugugauccuucaaaaugcuaucaguucgcccugggccaggggacaacccuagagaacaagcacagcaauggaacgaagcaugaccgaaucccacaccguacucuccugaugaacgaacuuggcgugcccuuucaucuggguaccaaacaggucuguguggcauggaguuccucuagcugccacgaugggaaggccugguugcacguauguguuacaggagacgauagaaaugcuacugcauccuucauuuacgagggcaggcucguggacucaaucgucaguuggagccaaaacauccugcggacccaggagucugaaugcguguguauuaauggcacaugcaccguggucaugacggauggguccgccucaggacgcgcugacacuagaauacuguuuaucaaagaggguaagauuguucauaucagcccucucaguggcucugcccagcacauagaagagugcuccuguuauccaagguacccggaugugcggugcauuugucgcgacaacuggaaagggagcaaucgacccguaaucgauaucaacauggaagacuauucgauugacucuuccuacgugugcucaggauuagucggcgauacaccuagaaacgacgauaguagcuccaauucuaacuguagggacccaaauaacgagcgggguaaucccggggugaagggaugggcguucgauaacggcgacgauguuuggaugggccguaccaucagcaaggacucacgcaguggguacgagacuuuuaaagugauuggagguugguccacaccuaauagcaagucucaggucaacagacaagugauaguagauucaaauaacuggaguggcuauagcgggaucuucuccguugaaggaaaaucuugcauuaauagguguuuuuacguggagcugauccggggccgaccacaggaaacccgcgucugguggacgucgaacagcaucguggucuucugcgguaccuccgggacauauggcacuggaucauggcccgacggcgcaaauauuaacuuuaugccgauauga

SEQ ID NO: 142122 - RNA, 1410 nt, Artificial Sequence
  derived and/or modified CDS sequence (opt3) from neuraminidase__InfluenzaA__AAO46217
augaaccccaaucagaagaucauuaccauaggcagcgugucccugacaaucgccacugucugcuuccucaugcaaauugcuauccuugcaacgaccguuacacugcacuuuaaacagcaugagugugacucuccugccucaaaccaggugaugccaugcgaaccgauuaucauagagagaaauaucacugaaauuguauacuugaacaauaccacaaucgagaaggaaauuugucccgagguggucgaguauaggaacuggaguaaaccucagugccaaaucaccggguucgcgccauuuagcaaggauaauuccauacgguuaucugcuggaggugacauuugggugacucgcgaacccuacguuucgugugauccuucaaaaugcuaucaguucgcccugggccaggggacaacccuagacaacaagcacagcaauggaacgauccaugaucguauuccacaccgaacucuccugaugaacgagcuuggcgugcccuuucaucuggguaccaagcaggucuguguggcauggaguuccucuagcugccacgacgggaaagccugguugcacguauguguuacaggagaugacagaaaugcuacugcauccuucaucuacgauggcaggcucgaagacucaaucggcaguuggagccaaaacauucugcggacccaggagucugagugcguguguauaaaugggacaugcaccgucgugaugacggauggauccgccucaggucgcgcugacacuagaauccuguuuauuaaggaaggcaaaaucgugcauauaagcccucucagugggucugcccagcacauugaggaaugcuccuguuauccaagguacccggauguccggugcaucugucgcgacaacuggaagggaagcaaucgacccguuuuagacaucucgauggaggauuauucuauugacuccucauacgugugcaguggccugguaggugauacaccuagaaacgacgauagcuccucuaacagcaauuguagggacccaaacaaugaacgggggaaccccggagugaaaggcugggcguucgauaauggcgacgaugucuggauggggcguaccaucucaaaggaccuucgcaguggauacgagacuuuuaaggugauugguggcugguccacaccuaacagcaaaucucagguuaauagacaagugauagucgauaacaauaacuggucaggguauaguggaaucuucagcguggagggcaaguccugcauuaauagguguuuuuacguagaauugauccggggucgaucucaggagacccgcguuugguggacgucgaacagcaucguggucuucugcgggaccuccggcacauauggaacuggcucauggccagacggggcaaauauuaacuuuaugcccauauga

SEQ ID NO: 142123 - RNA, 1410 nt, Artificial Sequence
  derived and/or modified CDS sequence (opt3) from neuraminidase__InfluenzaA__AAO46218
augaaccccaaucagaagaucauuaccauaggcagcgugucccugacaaucgccacugucugcuuccucaugcaaauugcuauccuugcaacgaccguuacacugcacuuuaaacagcaugagugugacucuccugccucaaaccaggugaugccaugcgaaccgauuaucauagagagaaauaucacugaaauuguauacuugaacaauaccacaaucgagaaggaaauuugucccgagguggucgaguauaggaacuggaguaaaccucagugccaaaucaccggguucgcgccauuuagcaaggauaauuccauacgguuaucugcuggaggugacauuugggugacucgcgaacccuacguuucgugugauccuggcaaaugcuaucaguucgcccuggggcagggaacaacccuagacaacaagcacucaaauggcacgauccaugaucguauuccacaccgaacucuccugaugaacgagcuuggugugcccuuucaucuggggaccaagcaggucuguguggcauggagcaguuccucuugccacgacggaaaagccugguugcacguauguguuacaggcgaugacagaaaugcuacugccagcuucaucuacgauggcaggcucgaagacuccaucgggucauggagucaaaacauucugcggacccaggagagcgagugcguguguauaaauggaacaugcaccgucgugaugacggaugguucugcauccggccgcgcugacacuagaauccuguuuauuaaggaagggaaaaucgugcauauaucaccucucagcggaagugcccagcacauugaggaaugcucuuguuauccaagguacccggauguccggugcaucugucgcgacaacuggaagggcuccaaucgacccguuuuagacaucagcauggaggauuauucgauugguucuuccuacgugugcucagggcugguaggagacacaccuagaaacgaugacaguagcuccaacucuaauuguagggauccaaacaaugaacggggcaaccccggcgugaaagggugggcguucgacaauggagaugacgucuggaugggucguaccaucagcaaggaucuucgcucaggcuacgagacuuuuaaggugauugggggauggaguacaccuaacuccaaaagccagguuaauagacaagugauagucgacaacaauaacuggucuggcuauucagguaucuucaguguggagggcaagagcugcauuaauagguguuuuuacguagaauugauccgggggcgaucccaggagacccgcguuugguggacgucuaacucgaucguggucuucugcggaaccagcggcacauaugggacuggauccuggccagauggugcaaauauuaacuuuaugcccauauga

SEQ ID NO: 142124 - RNA, 1410 nt, Artificial Sequence
  derived and/or modified CDS sequence (opt3) from neuraminidase__InfluenzaA__AAO46220
augaaccccaaucagaagaucauuaccauaggcagcgugucccugacaaucgccacugucugcuuccucaugcaaauugcuauccuugcaacgaccguuacacugcacuuuaaacagcaugagugugacucuccugccucaaaccaggugaugccaugcgaaccgauuaucauagagagaaauaucacugaaauuguauacuugaacaauaccacaaucgagaaggaaauuugucccgaggcgguggaguauaggaacuggaguaaaccucagugccaaaucaccggguucgcuccauuuagcaaggauaauuccauacgguuaucugccggaggugacauuugggucacucgcgaacccuacgugucgugugauccuggcaaaugcuaucaguucgcacuggggcagggaacaacccuagacaacaagcacucaaaugauacgauccaugaccguauuccacaccgaacucuccugaugaacgagcuuggcguucccuuucaucuggguaccagacaggugugugucgccuggagcaguuccucuugccacgaugggaaggcuugguugcacguguguguaacaggagacgauaggaaugcaacugccagcuucaucuacgacggccggcucguugauuccaucggcucauggagucaaaacauucugcgcacccaggaaagcgagugcguguguauaaaugggaucugcacagucgugaugaccgacggaucugcuuccgguagagccgauacgaggauucuguuuaucgaggaaggcaaaauagugcauauuucaccucucagcgggagugcgcagcacgucgaggaaugcucuuguuauccacgguacccggacguucgcugcaucugucgagacaacuggaagggauccaauagacccgugaucgauauuaacauggaggacuauagcaucgauucgucuuacguaugcuccggcuuagugggugacacuccuaggaacgaugaccggucaaguaauagcaacugucgugauccaaauaacgaacgcgggaaucccggagucaaaggcugggcauucgacaacggcgaugacguguggauggggagaacaauuuccaaggaucugaggucuggauacgagaccuuuaaaguuauagguggcuggagcacuccuaauucaaagagucaggugaaccggcaagucaucguggacaauaacaauugguccggguauagcggaauuuucucuguagagggcaagucaugcaucaaccgauguuuuuacguugaacuuauccgcgguagacagcaggagacaagggugugguggaccaguaauagcauugucguguucugcgggacguccggcaccuauggaacaggcucuuggccagacggggccaacauaaauuuuaugcccaucuga

SEQ ID NO: 142125 - RNA, 1410 nt, Artificial Sequence
  derived and/or modified CDS sequence (opt3) from neuraminidase__InfluenzaA__AAO46221
augaaccccaaucagaagaucauuaccauaggcagcgugucccugacaaucgccacugucugcuuccucaugcaaauugcuauccuugcaacgaccguuacacugcacuuuaaacagcaugagugugacucuccugccucaaaccaggugaugccaugcgaaccgauuaucauagagagaaauaucacugaaauuguauacuugaacaauaccacaaucgagaaggaaauuugucccgaggcggcugaguauaggaacuggaguaaaccucagugccaaaucaccggguucgccccauuuagcaaggauaauuccauacgguuaucugcaggaggugacauuugggugacucgcgaacccuacgucucgugugauccuggcaaaugcuaucaguucgcccuggggcagggaacaacccuagacaacaagcacucaaaugauacgauccaugaccguauuccacaccgaacucuccugaugaacgagcuuggcgugcccuuucaucuggguaccagacagguuuguguggcuuggagcaguuccucuugccacgaugggaaggcaugguugcacgucugugugacaggagacgauaggaaugccacugcuagcuucaucuacgacggccggcucguagauuccaucggcucauggagucaaaacauucugcgcacccaggaaagcgagugcguuuguauaaaugggaucugcacaguggucaugaccgacggaucugccuccgguagagcggauacgaggauucuguuuaucgaggaaggcaaaauagugcauauuucaccucucagcgggagugcacagcacguggaggaaugcucuuguuauccacgguacccggacguccgcugcaucugucgagacaacuggaagggauccaauagacccguuaucgauauuaacauggaggacuauagcaucgauucgucuuacgugugcuccggcuuaguaggugacacuccuaggaacgaugaccggucaaguaauagcaacugucgugauccaaauaacgaacgcgggaaucccggagugaaaggcugggccuucgacaacggcgaugacgucuggauggggagaacaauuuccaaggaucugaggucuggauacgagaccuuuaaagugauagguggcuggagcacuccuaauucaaagagucagguuaaccggcaagugaucgucgacaauaacaauugguccggguauagcggaauuuucucuguggagggcaagucaugcaucaaccgauguuuuuacguagaacuuauccgcgguagacagcaggagacaaggguuugguggaccaguaauagcauuguggucuucugcgggacguccggcaccuauggaacaggcucuuggccagacggggcuaacauaaauuuuaugcccaucuga

SEQ ID NO: 142126 - RNA, 1410 nt, Artificial Sequence
  derived and/or modified CDS sequence (opt3) from neuraminidase__InfluenzaA__AAO46223
augaaccccaaucagaagaucauuaccauaggcagcgugucccugacaaucgccacugucugcuuccucaugcaaauugcuauccuuguuacgaccgugacacugcacuuuaaacagcaugagugugacucuccugcaucaaaccagguaaugccaugcgaaccgauuaucauagagagaaauaucacugaaauuguguacuugaacaauaccacaaucgagaaggaaauuugucccgaggucguggaguauaggaacuggaguaaaccucagugccaaaucaccggguucgccccauuuagcaaggauaauuccauacgguuaucugcgggaggugacauuuggguuacucgcgaacccuacgugucgugugauccuggcaaaugcuaucaguucgcucuggggcagggaacaacccuagacaacaagcacucaaaugauacgauccaugaccguauuccacaccgaacucuccugaugaacgagcuuggcguccccuuucaucuggguaccagacagguguguguagccuggagcaguuccucuugccacgaugggaaggcaugguugcacguuugugugacaggagacgauaaaaaugccacugcuagcuucaucuacgacggcaggcucgucgauuccaucggcucauggagucaaaacauucugcggacccaggaaagcgagugcguguguauaaaugggacaugcaccguggucaugacggacggaucugcauccggucgcgccgauacuagaauccuguuuauugaggaaggcaagaucguucauauaucaccucucagcgggagugcucagcacguggaggaaugcucuuguuauccaagguacccggacguacggugcauuugucgcgacaacuggaaaggauccaaucgacccgugaucgauaucaacauggaggacuauagcauugauucgucuuacgucugcuccggcuuagugggugacacaccuagaaacgaugacaggucaaguaauagcaacugucgggauccaaauaacgaacgugggaaucccggaguuaagggcugggccuucgacaacggcgaugacguguggauggggcgcaccaucuccaaagaucugagaucuggauacgagacuuuuaaggucauugguggcuggagcacaccuaauucaaagagucagauaaacaggcaagugaucguagacuccaauaacuggagcggguauucuggaauuuucucaguugagggcaaaaguugcaucaaucgguguuuuuacguggaacuuauccgaggucgcaagcaggagaccagagucugguggacgagcaacuccauuguggucuucugcgggaccucuggcacauauggaacuggcucguggccagacggggcgaauauaaacuuuaugcccaucuga

SEQ ID NO: 142127 - RNA, 1410 nt, Artificial Sequence; identical to SEQ ID NO: 142126
  derived and/or modified CDS sequence (opt3) from neuraminidase__InfluenzaA__AAO46224

SEQ ID NO: 142128 - RNA, 1410 nt, Artificial Sequence
  derived and/or modified CDS sequence (opt3) from neuraminidase__InfluenzaA__AAO46225
augaaccccaaucagaagaucauuaccauaggcuucgugagccugaucauugccacagucugcuuucucaugcaaaucgcuauucuugcaacuacgguuacccugcacuucaaacagcaugagugugacuccccugccucuaaccaggugaugccaugcgaaccgaucauaaucgagagaaauauuacaaagaucguauacuugaacaauacuaccauugaaaaagagaucugucccgaaguggucgaguauaggaacuggucaaagccucagugccacauaacaggguuugcgccauucaguaaagauaauagcauucgguuauccgcuggaggugacaucugggugacccgcgagcccuacguuucuugugauccuggcaagugcuaucaauuugcccuggggcagggaacuacacuagacaacaagcauucgaaugauaccauucacgaccgaaucccacaucguacgcuccugaugaacgaacuuggcgugcccuuccaccuggguacuagacaggucuguguggcauggucaagcaguuccugccacgaugggaaagccugguugcauguauguguuaccggagacgauaagaaugcuacagcaucuuuuaucuacgacggcaggcucguggauagcauuggcuccuggucacacaacauacugcggacucaggagagugaaugcgucuguaucaaugggaccugcacaguggugaugaccgacggaagcgccucuggucgcgcugauacgaggauucuguucaucaaagagggcaagauaguccauauuuccccucucucagggagcgcccaacacguugaggaaugcaguuguuauccaagauacccggacgugcggugcaucugucgcgacaacuggaaaggaucuaaucgacccguaaucgauauuaacauggaggacuauuccaucgauagcucguacgugugcucuggcuuagucggugacacuccuagaaacaaugauggguccucaaacaguaauuguagggacccaaacaaugaacggggaaaccccggcgugaagggcugggcguuugauaauggggacgauguuuggaugggacguacaauuagcaaggaccugcgcuccgguuacgagaccuucaaagugauaggcggguggucuacuccuaacagcaagucacaggucaauagacaggugaucguagauaacaauaacuggaguggauauuccggcauuuuuagcguugaagguaaaucuugcaucaauagguguuucuacguggagcuuauccgggggcgacagcaagagacacgcgucugguggaccucaaacaguauuguggucuuuugcggcacgagcggaaccuauggcacaggguccuggccagacggagcaaauauaaacuucaugcccaucuga

SEQ ID NO: 142129 - RNA, 1410 nt, Artificial Sequence
  derived and/or modified CDS sequence (opt3) from neuraminidase__InfluenzaA__AAO46226
augaaccccaaucagaagaucauuaccauaggcagcgugucccugacaaucgccacugucugcuuccucaugcaaauugcuauccuuguuacgaccgugacacugcacuuuaaacagcaugagugugacucuccugcaucaaaccagguaaugccaugcgaaccgauuaucauagagagaaauaucacugaaauuguguacuugaacaauaccacaaucgagaaggaaauuugucccgaggucguggaguauaggaacuggaguaaaccucagugccaaaucaccggguucgccccauuuagcaaggauaauuccauacgguuaucugcgggaggugacauuuggguuacucgcgaacccuacgugucgugugauccuggcaaaugcuaucaguucgcucuggggcagggaacaacccuagacaacaagcacucaaaugauacgauccaugaccguauuccacaccgaacucuccugaugaacgagcuuggcguccccuuucaucuggguaccagacagguguguguagccuggagcaguuccucuugccacgaugggaaggcaugguugcacguuugugugacaggagacgaugaaaaugccacugcuagcuucaucuacgacggcaggcucgucgauuccaucggcucauggagucaaaacauucugcggacccaggagagcgagugcguguguauaaaugggacaugcaccguggucaugacggacggaucugcauccggucgcgccgauacuagaauccuguuuauugaagagggcaaaaucguucauauaucaccucucagcgggagugcucagcacguggaagagugcucuuguuauccaagguacccggacguacggugcauuugucgcgacaacuggaagggauccaaucgacccgugaucgauaucaacauggaagacuauagcauugauucgucuuacgucugcuccggcuuagugggugacacaccuagaaacgaugacaggucaaguaauagcaacugucgggauccaaauaacgagcgugggaaucccggaguuaaaggcugggccuucgacaacggcgaugacguguggauggggcgcaccaucuccaaggaucugagaucuggauacgagacuuuuaaagucauugguggcuggagcacaccuaauucaaagagucagauaaacaggcaagugaucguagacuccaauaacuggagcggguauucuggaauuuucucaguugaaggcaagaguugcaucaaucgguguuuuuacguggagcuuauccgaggucgccagcaggaaaccagagucugguggacgagcaacuccauuguggucuucugcgggaccucuggcacauauggaacuggcucguggccagacggggcgaauauaaacuuuaugcccaucuga

SEQ ID NO: 142130 - RNA, 1410 nt, Artificial Sequence
  derived and/or modified CDS sequence (opt3) from neuraminidase__InfluenzaA__AAO46229
augaaccccaaucagaagaucauuaccauaggcagcgugucccugacaaucgccacugucugcuuccucaugcaaauugcuauccuuguuacgaccgugacacugcacuuuaaacagcaugagugugacucuccugcaucaaaccagguaaugccaugcgaaccgauuaucauagagagaaauaucacugaaauuauguacuugaacaauaccacaaucgagaaggaaauuugucccgagguggucgaguauaggaacuggaguaaaccucagugccaaaucaccggguucgccccauuuagcaaggauaauuccauacgguuaucugcgggaggugacauuugggugacucgcgaacccuacguuucgugugauccuggcaaaugcuaucaguucgcucuggggcagggaacaacccuagacaacaagcacucaaaugauacgauccaugaccguauuccacaccgaacucuccugaugaacgagcuuggcgugcccuuucaucuggguaccagacaggucuguguggccuggagcaguuccucuugccacgaugggaaggcaugguugcacguauguguuacaggagacgauaaaaaugccacugcuagcuucaucuacgacggcaggcucguggauuccaucggcucauggagucaaaacauucugcggacccaggaaagcgagugcgucuguauaaaugggacaugcaccguggugaugacggacggaucugcauccggucgcgccgauacuagaauccuguuuauugaggaaggcaagaucguccauauaucaccucucagcgggagugcucagcacguugaggaaugcucuuguuauccaagguacccggacgugcggugcauuugucgcgacaacuggaaaggauccaaucgacccaucaucgauauuaacauggaggacuauagcaucgauucgucuuacguaugcuccggcuuagugggugacacaccuagaaacgaugacaggucaaguaauagcaacugucggaauccaaacaaugaacgugggaaccccggagucaagggcugggccuucgauaauggcgacgauguguggauggggcgcaccauuuccaaagaccugagaucuggauacgagacuuuuaagguuauagguggcuggagcacaccuaacucaaagagucagaucaauaggcaagugauugucgauuccaacaauuggagcggguauucuggaaucuucucaguggagggcaaaaguugcaucaaccgguguuuuuacguagaacuuauucgaggucgccagcaggagaccagaguuugguggacgagcaauuccauaguggucuucugcgggaccucuggcacauauggaacuggcucguggccagacggggcgaacaucaauuuuaugcccauuuga

SEQ ID NO: 142131 - RNA, 1410 nt, Artificial Sequence
  derived and/or modified CDS sequence (opt3) from neuraminidase__InfluenzaA__AAO46230
augaaccccaaucagaagaucauuaccauaggcagcgugucccugacaaucgccacugucugcuuccucaugcaaauugcuauccuuguuacgaccgugacacugcacuuuaaacagcaugagugugacucuccugcaucaaaccagguaaugccaugcgaaccgauuaucauagagagaaauuugacugaaaucguguacuuaaacaauaccacaauugagaaggaaaucugucccgaggucguggaguauaggaacuggaguaaaccucagugccaaauuaccggguucgccccauuuagcaaggauaauuccauccggcugucugcgggaggugacauauggguuacucgcgaacccuacgugucgugugauccuggcaaaugcuaucaguucgcucuagggcagggaacaacccucgacaacaagcacucaaaugauacgauucaugaccgaaucccacaccguacucugcuuaugaacgagcugggcguccccuuucauuuggguaccagacagguguguguagccuggagcaguuccucuugccacgaugggaaggcauggcuccacguuugugugacaggagacgauaaaaaugccacugcuagcuucauuuacgacggcaggcuggucgauuccaucggcucauggagucaaaacauccugcggacccaggaaagcgagugcguguguauuaaugggacaugcaccguggucaugacggacggaucugcauccggucgcgccgauacuagaauacucuuuaucgaggaaggcaagauuguucauaucucaccuuuaagcgggagugcucagcacguggaggaaugcucuuguuauccaagguacccggacguacggugcauaugucgcgacaacuggaaaggauccaaucgacccgugauugauaucaacauggaggacuauagcaucgauucgucuuacgucugcuccggccuggugggugacacaccuagaaacgaugacaggucaaguaauagcaacugucgggauccaaauaacgaacgugggaaucccggaguuaagggcugggccuucgacaacggcgaugacguguggauggggcgcaccauuuccaaagaucuuagaucuggauacgagacuuuuaaggucaucgguggcuggagcacaccuaauucaaagagucagauuaacaggcaagugauaguagacuccaauaacuggagcggguauucuggaaucuucucaguugagggcaaaaguugcauuaaucgguguuuuuacguggaauugauccgaggucgccagcaggagaccagagucugguggacgagcaacuccaucguggucuucugcgggaccucuggcacauauggaacuggcucguggccagacggggcgaauauuaacuuuaugcccauauga

SEQ ID NO: 142132 - RNA, 1410 nt, Artificial Sequence
  derived and/or modified CDS sequence (opt3) from neuraminidase__InfluenzaA__AAO46231
augaaccccaaucagaagaucauuaccauaggcagcgugucccugacaaucgccacugucugcuuccucaugcaaauugcuauccuuguuacgaccgugacacugcacuuuaaacagcaugacugugauucuccugcaucaaaccagguaaugccaugcgagccgauuaucauagaaagaaauaucacugagauuguguacuugaacaauaccacaaucgaaaaggagauuugucccaaagucguggaauauaggaacuggaguaagccucagugccaaaucaccggguucgccccauuuagcaaagacaauuccauacgguuaucugcgggaggugauauuuggguuacucgcgagcccuacgugucgugugacccugucaagugcuaucaguucgcucugggccaggggacaacccuagauaacaagcacucaaaugacacggugcaugaucgaaucccacaccguacucuccugaugaacgagcuuggaguacccuuucaucugggcaccagacagguuuguauugccuggagcaguuccucuugccacgacgguaaagcaugguugcacgugugugucacaggggaugacaagaaugccacugcuagcuucaucuacgauggaaggcucguggacuccaucggcucauggagucaaaacauucugcggacccaggaaagcgagugcguguguauaaauggcacaugcaccgucguuaugacggaugggucugcauccggacgcgccgacacuagaauccuguuuauugaagaggguaaaaucgugcauauaucaccucucagcggcagugcucagcacguagaggaaugcucuuguuauccaagguacccggacgugcggugcauuugucgcgauaacuggaagggguccaaucgacccgucaucgacaucaacauggaggauuauagcauugacucgucuuacgugugcuccggauuaguuggcgauacaccuagaaacgacgauaggucaaguaauagcaacugucggaauccaaacaaugaacgugguaaccccggggugaaaggaugggccuucgacaauggcgaugacgucuggaugggccgcaccaucuccaaggaucugagaucuggguacgagacuuuuaaggugauuggagguuggagcacaccuaacucaaaaagucagauaaauaggcaaguaaucguugacuccaacaauuggagcggcuauucugggauuuucucaguggaaggaaagaguugcaucaaccgguguuuuuacgucgagcuuauccgaggccgccagcaggagaccagagugugguggacgagcaauuccauugucguguucugcgguaccucugggacauauggcacuggaucguggccagacggcgcgaacauaaauuuuaugcccaucuga

SEQ ID NO: 142133 - RNA, 1410 nt, Artificial Sequence
  derived and/or modified CDS sequence (opt3) from neuraminidase__InfluenzaA__AAO46232
augaaccccaaucagaagaucauuaccauaggcagcgugucccugacaaucgccacugucugcuuccucaugcaaauugcuauccuuguuacgaccgugacacugcacuuuaaacagcaugagugugacucuccugcaucaaaccagguaaugccaugcgaaccgacuauuaucgagagaaauauaaccgaaaucguguacuugaacaauacaaccauugagaaggaaaucugucccaaagucguggaguauaggaacuggaguaagccucagugccaaauuacuggguucgccccauuuagcaaagauaauuccauccgguuaucugcgggaggugacauauggguuacacgcgagcccuacgugucgugugauccuggcaagugcuaucaguucgcucuggggcagggaaccacgcuagacaacaagcacucaaaugauacuauucaugaccgaaucccacaccguacccuccugaugaacgaacuuggcguccccuuucaucuggguacaagacagguguguauugccuggagcaguuccucuugccacgaugggaaagcaugguugcacguauguguuacuggagacgauaagaaugccaccgcuagcuucaucuacgacggcaggcucguggauuccaucggcucauggagucaaaacauucugcggacacaggagagcgaaugcgucuguauaaaugggaccugcacgguggugaugacugacggaucugcauccggucgcgccgauacaagaauccuguuuauugaggagggcaaaaucguccauauaucaccucucagcgggagugcucagcacguugaagagugcucuuguuauccaagguacccggacgugcggugcauuugucgcgacaacuggaagggauccaaucgacccaucaucgauauuaacauggaagacuauagcaucgauucgucuuacguaugcuccggcuuagugggugacaccccuagaaacgaugacaggucaaguaauagcaacugucggaauccaaacaaugagcgugggaaccccggagucaaaggcugggccuucgauaauggcgacgauguguggauggggcgcacuauuuccaaggaccugagaucuggauacgaaacauuuaagguuauagguggcuggagcaccccuaacucaaaaagucagaucaauaggcaagugauugucgauuccaacaauuggagcggguauucuggaaucuucucaguggagggcaagaguugcaucaaccgguguuuuuacguagagcuuauucgaggucgccagcaggaaacgagaguuugguggaccagcaauuccauaguggucuucugcgggacaucuggcacuuauggaaccggcucguggccagacggggcgaacaucaauuuuaugcccauuuga

SEQ ID NO: 142134 - RNA, 1410 nt, Artificial Sequence
  derived and/or modified CDS sequence (opt3) from neuraminidase__InfluenzaA__AAO46233
augaaccccaaucagaagaucauuaccauaggcagcgugucccugacaaucgccgcugucugcuuccucaugcaaauugcaauccuuguuacuacggugacccugcacuuuaaacagcaugagugugacucuccugccucaaaccagguaaugccaugcgaaccgauuaucauagagagaaauaucacagaaauuguguacuugaacaauacuaccaucgagaaggaaauuugucccaaagucguggaguauaggaacuggaguaagccucagugccaaaucacaggguucgcgccauuuagcaaagauaauuccauacgguuaucugcuggaggugacauuuggguuacccgcgagcccuacgugucgugugauccuggcaagugcuaucaguucgcccuggggcagggaacuacacuagacaacaagcacucaaaugauaccauccaugaccgaaucccacaccguacgcuccugaugaacgaacuuggcguccccuuucaucuggguacuagacagguguguauugcauggagcaguuccucuugccacgaugggaaagccugguugcacguauguguuaccggagacgauaagaaugcuacagccagcuucaucuacgacggcaggcucguggauuccauuggcucauggagucaaaacauacugcggacucaggagagcgaaugcgucuguaucaaugggaccugcacaguggugaugaccgacggaucugcauccggucgcgcugauacgaggauucuguuuaucgaggagggcaaaauaguccauauuucaccucucagcgggagugcccagcacguugaagagugcucuuguuauccaagauacccggacgugcggugcaucugucgcgacaacuggaagggauccaaucgacccguaguggauaucaacauggaagacuauagcauugauucgucuuacgucugcuccggcuuagugggugacacuccuagaaacgaugacaggucaaguaauagcaacugucggaauccaaacaaugagcgugggaaccccggaguuaaaggcugggcguucgauaauggcgacgauguguggauggggcgcacaaucuccaaggaccugagaucuggauacgaaaccuuuaaggucauugguggcuggagcacuccuaacucaaaaagucagauaaauaggcaagugaucguagauuccaacaaucggagcggguauucuggaauuuucucaguugagggcaaggguugcaucaaccgauguuuuuacguggagcuuauccgcgggagacagcaggaaacaagggucugguggaccaguaauagcauuguggucuucugcggcacguccggaaccuauggcacagggucuuggccagacggagcaaacauaaauuuuaugcccaucuga

SEQ ID NO: 142135 - RNA, 1410 nt, Artificial Sequence
  derived and/or modified CDS sequence (opt3) from neuraminidase__InfluenzaA__AAO46235
augaaccccaaucagaagaucauuaccauaggcagcgugucccugacaaucgccacugucugcuuccucaugcaaauugcuauccuuguuacgaccgugacacugcacuuuaaacagcaugagugugacucuccugcaucaaaccagguaaugccaugcgaaccgauuaucauagagagaaauaucacugaaauuguguacuugaacaauaccacaaucgagaaggaaauuugucccaaagucguggaguauaggaacuggaguaagccucagugccaaaucaccggguucgccccauuuagcaaagauaauuccauacgguuaucugcgggaggugacauuuggguuacucgcgagcccuacgugucgugugauccuggcaagugcuaucaguucgcucuggggcagggaacaacccuagacaacaagcacucaaaugauacgauccaugaccguauuccacaccgaacucuccugaugaacgaacuuggcguccccuuucaucuggguaccagacagguguguaucgccuggagcaguuccucuugccacgaugggaaagcaugguugcacguauguaucacaggagacgauaagaaugccacugcuagcuucauuuacgacggcaggcucguugauuccauaggcucauggagucaaaacauccugcggacccaggagagcgaaugcguguguauuaaugggacaugcaccgucgugaugacggacggaucugcauccggucgcgccgauacuagaauccuguuuauagaggagggcaaaauugugcauaucucaccucucagcgggagugcucagcacgucgaagagugcucuuguuauccaagguacccgggaguucggugcaucugucgcgacaacuggaagggcuccaaucgacccgugguagacauuaacauggaagauuauagcaucgacucgucuuacgugugcuccgguuuagucggggauacaccuagaaacgacgauaggucaaguaauagcaacugucggaauccaaacaaugagcguggaaaccagggcgugaaaggcugggccuucgacaauggggaugacguuuggaugggacgcaccauuuccaaggaucugagaucugguuacgaaacuuuuaaggugauaggcggguggagcacacccaacucaaaaagucaaaucaauaggcaggucauuguggacuccgauaaccggagcggauauucuggcaucuucucaguagaggguaagaguugcaucaaucgauguuuuuacguugagcuuauucgcgggagaaaacaggaaaccagggugugguggacgagcaacuccauagucguguucugcggcaccucuggaacauauggcacugggucguggccugacggagcgaauaucaacuuuaugccaauuuga

SEQ ID NO: 142136 - RNA, 1410 nt, Artificial Sequence
  derived and/or modified CDS sequence (opt3) from neuraminidase__InfluenzaA__AAO46236
augaaccccaaucagaagaucauuaccauaggcagcgugucccugacaaucgccacugucugcuuccucaugcacauugcuauccuuguuacgaccgugacacugcauuuuaaacaacacgagugugacucuccugcaucaaaccagguaaugccaugcgaaccgauuaucauagagagaaauaucacugaaauuguguacuugaacaauaccacaaucgagaaggaaauuugucccaaagucguggaguauaggaacuggaguaagccucagugccagaucaccggguucgccccauuuagcaaagauaauuccauacgguuaucugcgggaggugacauuuggguuacucgcgagcccuacgugucgugugauccuggcaagugcuaucaauucgcucuggggcagggaacaacccuagacaacaagcauucaaaugauacgauccacgaccguauuccacaucgaacucuccugaugaacgaacuuggcguccccuuucaccuggguaccagacagguguguaucgccuggagcaguuccucuugccacgaugggaaagcaugguugcauguauguaucacaggagacgauaagaaugccacugcuagcuucauuuacgacggcaggcucguugauuccauaggcucauggagucagaacauccugcggacccaagagagcgaaugcguguguauuaaugggacaugcaccgucgugaugacggacggaucugcauccggucgcgccgauacuagaauccuguuuauagaggagggcaaaauugugcacaucucaccucucagcgggagugcucagcaugucgaagagugcucuuguuauccaagguacccgggaguucggugcaucugucgcgacaacuggaagggcuccaaucgacccgugguagacauuaacauggaagauuauagcaucgacucgucuuacgugugcuccgguuuagucggggauacaccuagaaacgacgauaggucaaguaauagcaacugucggaauccaaacaaugagcguggaaaccagggcgugaaaggcugggccuucgacaauggggaugacguuuggaugggacgcaccauuuccaaggaucugagaucugguuacgaaacuuuuaaggugauaggcggguggagcacacccaacucaaaaagucagaucaauaggcaagucauuguggacuccgauaaccggagcggauauucuggcaucuucucaguagaggguaagaguugcaucaaucgauguuuuuacguugagcuuauucgcgggagaaaacaggaaaccagggugugguggacgagcaacuccauagucguguucugcggcaccucuggaacauauggcacugggucguggccugacggagcgaauaucaacuuuaugccaauuuga

SEQ ID NO: 142137 - RNA, 1410 nt, Artificial Sequence
  derived and/or modified CDS sequence (opt3) from neuraminidase__InfluenzaA__AAO46237
augaaccccaaucagaagaucauuaccauaggcagcgugucccugacaaucgccacugucugcuuccucaugcagauugcuauccuuguuacgaccgugacacugcacuuuaaacagcaugagugugacucuccugcaucaaaccagguaaugccaugcgaaccgauuaucauagagagaaauaucacugaaauuguguacuugaacaauaccacaaucgagaaggaaauuugucccaaaaucgucgaguauaggaacuggaguaagccucagugccaaauaaccggguucgccccauuuagcaaagauaauuccauucgguuaucugcgggaggugacaucugggugacucgcgagcccuacguuucgugugauccuggcaagugcuaucaguucgcucuggggcagggaacaacccuagacaacaagcacucaaaugauacgauucaugaccgaaucccacaccguacucuccugaugaacgaacuuggcgugcccuuucaucuggguaccagacaggucuguaucgccuggagcaguuccucuugccacgaugggaaagcaugguugcacguguguauuacaggagacgauaagaaugccacugcuagcuucauauacgacggcaggcucguagauuccaucggcucauggagucaaaacauucugcggacccaggagagcgaaugcguuuguaucaaugggacaugcaccguggucaugacggacggaucugcauccggucgcgccgauacuagaauacuguuuauugaggagggcaaaaucgugcauaucucaccucucagcgggagugcucagcacguggaagagugcucuuguuauccaagguacccgggaguccggugcauuugucgcgacaacuggaagggcuccaaucgacccguuguggacaucaacauggaagauuauagcauugacucgucuuacguaugcuccgguuuagugggggauacaccuagaaacgacgauaggucaaguaauagcaacugucggaauccaaacaaugagcguggaaaccagggcgucaaaggcugggccuucgacaauggggaugacguguggaugggacgcaccauauccaaggaucugagaucugguuacgaaacuuuuaagguuaucggcggguggagcacacccaacucaaaaagucaaauuaauaggcaagugaucgucgacuccgauaaccggagcggauauucuggcaucuucucaguggaggguaagaguugcauuaaucgauguuuuuacguagagcuuauacgcgggagaaaacaggaaaccaggguuugguggacgagcaacuccaucguggucuucugcggcaccucuggaacauauggcacugggucguggccugacggagcgaauauuaacuuuaugccaaucuga

SEQ ID NO: 142138 - RNA, 1410 nt, Artificial Sequence
  derived and/or modified CDS sequence (opt3) from neuraminidase__InfluenzaA__AAO46238
augaaccccaaucagaagaucauuaccauaggcagcgccucccugacaaucgcuacugugugcuuccucaugcaaauugcaauccuugucacgaccguuacacugcacuuuaaacagcaugagugugacucuccugccucaaaccaggugaugccaugcgaaccgauuaucauagagagaaauaucacugaaauuguauacuugaacaauaccacaaucgagaaggaaauuugucccaaaaucguggaguauaggaacuggaguaagccucagugcaaaauaaccggguucgcgccauuuagcaaggauaauuccauucgguuaucugcuggaggugacaucugggucacucgcgagcccuacgugucgugugauccuggcaagugcuaucaauucgcccuggggcagggaacaacccuagacaacaaacacucaaaugauacgauucaugaccgaaucccacaccguacucuccugaugaacgaacuuggcguucccuuucaucuggguaccagacagguguguaucgcauggagcaguuccucuugccacgaugggaaggccugguugcacgucugugugacaggagacgauaaaaaugcuacugccagcuucauuuacgacggcaggcucguagauuccauaggcucauggagucagaacauccugcggacccaagagagcgaaugcguuuguauuaaugggacaugcaccguggucaugacggacggaucugcauccggucgcgcugauacuagaauccuguuuauagaggagggcaagauugugcauaucucaccucucagcgggagugcccagcacguggaagagugcucuuguuauccaagguacccggacguccggugcaucugucgcgacaacuggaaaggauccaaucgacccguuguggauauuaacauggaagacuauagcaucgauucgucuuacguaugcuccggcuuagugggugacacaccuagaaacgaugacaggucaaguaauagcaacugucggaauccaaacaaugagaaggggaaccagggagucaagggcugggcguucgauaauggcgacgauguguggauggggcguaccauuuccaaagaccugcgcucuggauacgaaacuuuuaagguuauagguggcuggagcacacccaacucaaaaagucagaucaauagacaagugauugucgauuccgacaacaggagcggguauucuggaaucuucucaguggagggcaagaguugcaucaaucgguguuuuuacguagagcuuauucgaggucgcaaacaggaaaccagaguuugguggacgagcaacuccauaguggucuucugcgggaccucuggcacauauggaacuggcucguggccugacggggcaaauaucaacuugaugccaauuuga

SEQ ID NO: 142139 - RNA, 1410 nt, Artificial Sequence
  derived and/or modified CDS sequence (opt3) from neuraminidase__InfluenzaA__AAO46241
augaaccccaaucagaagaucauuaccauaggcagcgugucccugacaaucgccacugucugcuuccucaugcaaauugcuauccuuguuacgaccgugacacugcacuuuaaacagcaugagugugacucuccugcaucaaaccagguaaugccaugcgaaccgauuaucauagagagaaauaucacugaaauuguguacuugaacaauaccacaaucgagaaggaaauuugucccaaagucgugggguauaggaacuggaguaagccucagugccaaaucaccggauucgccccauuuagcaaagauaauuccauacgguuaucugcggguggcgacauuuggguuacucgcgagcccuacgugucgugugauccugggaagugcuaucaguucgcucugggacagggcacaacccuagacaacaagcacucaaaugauacgauccaugaccguauuccacaccgaacucuccugaugaacgagcuugguguccccuuucaucuggggaccagacagguguguaucgccuggagcaguuccucuugccacgauggaaaagcaugguugcacguauguaucacaggcgacgauaagaaugccacugcuagcuucauuuacgacggcaggcucguugauuccauagggucauggagucaaaacauccugcggacccaggaaagcgagugcguguguauuaauggaacaugcaccgucgugaugacggacgguucugcauccggccgcgccgauacuagaauccuguuuauagaagaggggaaaauugugcauaucucaccucucagcggaagugcucagcacgucgaggaaugcucuuguuauccaagguacccgggcguucggugcaucugucgcgacaacuggaaggguuccaaucgacccgugguagacauuaacauggaggauuauagcaucgacucgucuuacgugugcuccggguuagucggagauacaccuagaaacgacgauaggucaaguaauagcaacugucggaauccaaacaaugaacguggcaaccagggcgugaaagggugggccuucgacaauggagaugacguuuggaugggucgcaccauuuccaaggaucugagaucuggcuacgagacuuuuaaggugauagggggauggagcacacccaacucaaaaagucaaaucaauaggcaggucauuguggacuccgauaaccggagcggcuauucugguaucuucucaguagaagggaagaguugcaucaaucgauguuuuuacguugagcuuauucgcggcagaaaacaggagaccagggugugguggacgagcaacuccauagucguguucugcggaaccucuggcacauaugggacuggaucguggccugacggugcgaauaucaacuuuaugccaauuuga

SEQ ID NO: 142140 - RNA, 1410 nt, Artificial Sequence
  derived and/or modified CDS sequence (opt3) from neuraminidase__InfluenzaA__AAO46245
augaaccccaaucagaagaucauuaccauaggcagcgugucccugacaaucgccacugucugcuuccucaugcaaauugcuauccuuguuacgaccgugacacugcacuuuaaacagcaugacugugauucuccugcaucaaaccagguaaugccaugcgagccgauuaucauagaaagaaauaucacugagauuguguacuugaacaauaccacaaucgaaaaggagauuugucccaaagucguggaauauaggaacuggaguaagccucagugccaaaucaccggguucgccccauuuagcaaagacaauuccauacgguuaucugcgggaggugauauuuggguuacucgcgagcccuacgugucgugugacccugucaagugcuaucaguucgcucugggccaggggacaacccuagauaacaagcacucaaaugacacggugcaugaucgaaucccacaccguacucuccugaugaacgagcuuggaguacccuuucaucugggcaccagacagguuuguauugccuggagcaguuccucuugccacgacgguaaagcaugguugcacguguguaucacaggggaugacaagaaugccacugcuagcuucaucuacgauggaaggcucgucgacuccauuggcucauggagucaaaacauacugcggacccaggaaagcgagugcguguguaucaauggcacaugcaccguggucaugacggaugggucugcauccggacgcgccgacacuaggauucuguuuaucgaagaggguaaaauaguucauauuucaccucucgcuggcagcgcccagcacguggaggaaugcaguuguuauccaagguacccggggguacggugcaucugucgcgacaacuggaagggaucuaaucgacccguggucgauaucaacauggaggacuauuccauugauagcucguacgugugcucuggcuuaguuggugacacaccuagaaacgaugacagguccucaaauaguaacugucggaauccaaacaaugaacgugggacccagggagugaaaggcugggcguucgauaacggcaaugaccuguggauggggcgcacuaucagcaaggaucuuagauccggauacgagacauuuaaggucauugguggcuggucuacccccaacagcaaaucacaaauaaauagacaggugaucguagacagugauaaccgguccggguauagcggaauuuucucuguugaaggcaagucaugcaucaaucgauguuuuuacguggaguugauccgcgguagaaaacaggagacgagggucugguggaccaguaacagcauuguggucuucugcgggacauccggcacuuauggaaccggcucuuggccugacggggcaaauauaaacuuuaugccaaucuga

SEQ ID NO: 142141 - RNA, 1410 nt, Artificial Sequence
  derived and/or modified CDS sequence (opt3) from neuraminidase__InfluenzaA__AAO46246
augaaccccaaucagaagaucauuaccauaggcagcgugucccugacaaucgccacugucugcuuccucaugcagauugcuauccuugcaacgaccguuacacugcacuuuaaacagcaugagugugacucuccugccucaaaccaggugaugccaugcgaaccgauuaucauagagagaaauaucacugaaauuguauacuugaacaauaccaucauugagaaggaaaucugucccaaaguggucgaguauaggaacuggaguaagccucagugccaaauaacaggguucgcgccauuuagcaaagauaauuccauucgguuaucugcuggaggugacaucugggugacccgcgagcccuacguuucgugugauccuggcaagugcuaucaguucgcccuggggcagggaacuacacuagacaacaagcacucaaaugauaccauucaugaccgaacgccacaccguacucuccugaugaacgaacuuggcgugcccuuucaucuggguaccagacaggucuguaucgcauggagcaguuccucuugccacgaugggaaagccugguugcacguguguaucacaggagacgauaagaaugcuacugccagcuucauuuacgacggcaggcucguagauuccauaggcucauggagucaaaacauccugcggacccaggagagcgaaugcguuuguauuaaugggacaugcaccguggucaugacggacggaucugcauccggucgcgcugauacuagaauccuguuuauagaggagggcaaaauugugcauaucucaccucucagcgggagugcccagcacguggaagagugcucuuguuauccaagguacccgggaguccggugcaucugucgcgacaacuggaagggcuccaaucgacccguuguggacauuaacauggaagauuauagcaucgacucgucuuacguaugcuccgguuuagugggggauacaccuagaaacgacgauaggucaaguaauagcaacugucggaauccaaacaaugagcguggaaaccagggcgucaaaggcugggcguucgacaauggggaugacguguggaugggacgcaccauuuccaaggaucugagaucugguuacgaaacuuuuaagguuauaggcggguggagcacacccaacucaaaaagucaaaucaauaggcaagugauugucgacuccgauaaccggagcggauauucuggcaucuucucaguggaggguaagaguugcaucaaucgauguuuuuacguagagcuuauucgcgggagaaaacaggaaaccaggguuugguggacgagcaacuccauagcaguguucugcggcaccucuggaacauauggcacugggucguggccugacggagccaauaucaacuuuaugccaauuuga

SEQ ID NO: 142142 - RNA, 1410 nt, Artificial Sequence
  derived and/or modified CDS sequence (opt3) from neuraminidase__InfluenzaA__AAO46247
augaaccccaaucagaagaucauuaccauaggcagcgugucccugacaaucgccacugucugcuuccucaugcaaauugcuauccuuguuacgaccgugacacugcacuuuaaacagcaugagugugacucuccugcaucaaaccagguaaugccaugcgaaccgauuaucauagagagaaauaucacugaaauuguguacuugaacaauaccacaaucgagaaggaaauuugucccaaagucguggaguauaggaacuggaguaagccucagugccaaaucaccggguucgccccauuuagcaaagauaauuccauacgguuaucugcgggaggugacauuuggguuacucgcgagcccuacgugucgugugauccuggcaagugcuaucaguucgcucuggggcagggaacaacccuagacaacaagcacucaaaugauacgauccaugacaggauuccacaccguacucuccugaugaacgaacuuggcguccccuuucaucuggguaccagacagguguguaucgccuggagcaguuccucuugccacgaugggaaagcaugguugcacguauguaucacaggagacgauaagaaugccacugcuagcuucauuuacgacggcaggcucguugauuccauaggcucauggagucaaaacauccugcggacccaggagagcgaaugcguguguauuaaugggacaugcaccgucgugaugacggacggaucugcauccggucgcgccgauacuagaauccuguuuauagaggagggcaaaauugugcauaucucaccucucagcgggagugcucagcacgucgaagagugcucuuguuauccaagguacccgggaguucggugcaucugucgcgacaacuggaagggcuccaaucgacccgugauugacaucaacauggaagauuauagcauugacucgucuuacguaugcuccgguuuagugggggauacaccuagaaacgacgauaggucaaguaauagcaacugucggaauccaaacaaugagcguggaaaccagggcgucaaaggcugggccuucgacaauggggaugacguguggaugggacgcaccauauccaaggaucugagaucugguuacgaaacuuuuaagguuaucggcggguggagcacacccaacucaaaaagucaaauuaaucgacaggugaucgucgacuccgauaaccggagcggauauucuggcaucuucucaguggaggguaagaguugcauuaaucgauguuuuuacguagagcuuauacgcgggagaaaacaggaaaccaggguuugguggacgagcaacuccaucguggucuucugcggcaccucuggaacauauggcacugggucguggccugacggagcgaauauuaacuuuaugccaaucuga

SEQ ID NO: 142143 - RNA, 1410 nt, Artificial Sequence
  derived and/or modified CDS sequence (opt3) from neuraminidase__InfluenzaA__AAO46462
augaaccccaaucagaagaucauuaccauaggcagcgugucccugacaaucgccacugucugcuuccucaugcaaauugcuauccuuguuacgaccgugacacugcacuuuaaacaguacgagugugacucuccugcaucaaaccagguaaugccaugcgaaccgauuaucauagagagaaauaucacugaaauuguguauuugaacaauaccacaaucgagaaggaaauuugucccaaagucguggaguacaggaacuggaguaagccucagugccaaaucaccggguucgccccauuuagcaaagauaauuccauacgguuaucugcgggaggugacauuuggguuacucgcgagcccuaugugucgugugaucauggcaagugcuaccaguucgcucuggggcagggaacaacccuagacaacaagcacucaaaugauacgauccaugaccguauuccucaccgaacucuccugaugaacgaacuuggcgucccauuucaucuggguaccagacagguguguaucgccuggagcaguuccucuugccacgaugggaaagcaugguugcacguauguaucacaggagacgauaagaaugccacugcuagcuucauuuaugacggcaggcucguugauuccauaggcucauggagucaaaacauccugcggacccaggagagcgaaugcguguguauuaaugggacaugcaccgucgugaugacggacggaucugcauccggucgcgccgauacuagaauccuguuuauagaggagggcaaaauugugcauaucucaccccucagcgggagugcucagcacgucgaagagugcucuuguuacccuagguauccaggaguucggugcaucugucgcgacaacuggaagggcuccaaucgaccggugguagacauuaacauggaagauuacagcaucgacucgucuuacgugugcuccgguuuagucggggauacacccagaaacgacgauaggucaaguaauagcaacugucggaauccuaacaaugagcguggaaaccagggcgugaaaggcugggccuucgacaauggggaugacguuuggaugggacgcaccauuuccaaggaucugagaucugguuaugaaacuuuuaaggugauaggcggguggagcacaccaaacucaaaaagucaaaucaauaggcaggucauuguggacuccgauaaccggagcggauacucuggcaucuucucaguagaggguaagaguugcaucaaucgauguuuuuauguugagcuuauucgcgggagaaaacaggaaaccagggugugguggacgagcaacuccauagucguguucugcggcaccucuggaacauacggcacugggucguggcccgacggagcgaauaucaacuuuaugccuauuuga

SEQ ID NO: 142144 - RNA, 1410 nt, Artificial Sequence; identical to SEQ ID NO: 142143
  derived and/or modified CDS sequence (opt3) from neuraminidase__InfluenzaA__AAO46463

SEQ ID NO: 142145 - RNA, 1410 nt, Artificial Sequence; identical to SEQ ID NO: 142143
  derived and/or modified CDS sequence (opt3) from neuraminidase__InfluenzaA__AAO46464

SEQ ID NO: 142146 - RNA, 1410 nt, Artificial Sequence; identical to SEQ ID NO: 142143
  derived and/or modified CDS sequence (opt3) from neuraminidase__InfluenzaA__AAO46465

SEQ ID NO: 142147 - RNA, 1410 nt, Artificial Sequence; identical to SEQ ID NO: 142143
  derived and/or modified CDS sequence (opt3) from neuraminidase__InfluenzaA__AAO46466

SEQ ID NO: 142148 - RNA, 1410 nt, Artificial Sequence
  derived and/or modified CDS sequence (opt3) from neuraminidase__InfluenzaA__AAO46467
augaaccccaaucagaagaucauuaccauaggcagcgugucccugacaaucgccacugucugcuuccucaugcaaauugcuauccuuguuacgaccgugacacugcacuuuaaacaguacgagugugacucuccugcaucaaaccagguaaugccaugcgaaccgauuaucauagagagaaauaucacugaaauuguguauuugaacaauaccacaaucgagaaggaaauuugucccaaagucguggaguacaggaacuggaguaagccucagugccaaaucaccggguucgccccauuuagcaaagauaauuccauacgguuaucugcgggaggugacauuuggguuacucgcgagcccuaugugucgugugaucauggcaagugcuaccaguucgcucuggggcagggaacaacccuagacaacaagcacucaaaugauacgauccaugaccguauuccucaccgaacucuccugaugaacgaacuuggcgucccauuucaucuggguaccagacagguguguaucgccuggagcaguuccucuugccacgaugggaaagcaugguugcacguauguaucacaggagacgauaagaaugccacugcuagcuucauuuaugacggcaggcucguugauuccauaggcucauggagucaaaacauccugcggacccaggagagcgaaugcguguguauuaaugggacaugcaccgucgugaugacggacggaucugcauccggucgcgccgauacuagaauccuguuuauagaggagggcaaaauugugcauaucucaccccucacagggagcgcucagcacgucgaagagugcaguuguuacccuagguauccaggaguucggugcaucugucgcgacaacuggaagggcucuaaucgaccggugguagacauuaacauggaagauuacuccaucgacagcucguacgugugcucugguuuagucggggauacccccagaaacgacgauagguccucaaauaguaacugucggaauccuaacaaugagcguggaaaccagggcgugaaaggcugggccuucgacaauggggaugacguuuggaugggacgcacuauuagcaaggaucugagauccgguuaugaaacauuuaaggugauaggcggguggucuaccccaaacagcaaaucacaaaucaauaggcaggucauuguggacagugauaaccgguccggauacagcggcaucuucucuguagaggguaagucaugcaucaaucgauguuuuuauguugagcuuauucgcgggagaaaacaggaaacgagggugugguggaccaguaacagcauagucguguucugcggcacauccggaacuuacggcaccgggucuuggcccgacggagcgaauaucaacuuuaugccuauuuga

SEQ ID NO: 142149 - RNA, 1410 nt, Artificial Sequence
  derived and/or modified CDS sequence (opt3) from neuraminidase__InfluenzaA__AAO46468
augaaccccaaucagaagaucauuaccauaggcagcgugucccugacaaucgccacugucugcuuccucaugcaaauugcuauccuuguuacgaccgugacacugcacuuuaaacaguacgagugugacuucccugcaucuaaccagguaaugccaugcgaaccgauuaucauagagagaaauaucacugaaauuguguauuugaacaauaccacaaucgagaaggaaauuugucccaaagucguggaguacaggaacuggucaaagccucagugccaaaucaccggguuugccccauucaguaaagauaauagcauacgguuauccgcgggaggugacauuuggguuacucgcgagcccuaugugucuugugaucauggcaagugcuaccaguuugcucuggggcagggaacaacccuagacaacaagcacucgaaugauacgauccaugaccguauuccucaccgaacucuccugaugaacgaacuuggcgucccauuccaucuggguaccagacagguguguaucgccuggucaagcaguuccugccacgaugggaaagcaugguugcacguauguaucacaggagacgauaagaaugccacugcuucuuuuauuuaugacggcaggcucguugauagcauaggcuccuggucacaaaacauccugcggacccaggagagugaaugcguguguauuaaugggacaugcaccgucgugaugacggacggaagcgcaucuggucgcgccgauacuagaauccuguucauagaggagggcaaaauugugcauaucucaccccucuccgggagcgcucagcacgucgaagagugcaguuguuacccuagguauccaggaguucggugcaucugucgcgacaacuggaagggcucuaaucgaccggugguagacauuaacauggaagauuacuccaucgacagcucguacgugugcucugguuuagucggggauacacccagaaacgacgauagguccucaaauaguaacugucggaauccuaacaaugagcguggaaaccagggcgugaaaggcugggccuuugacaauggggaugacguuuggaugggacgcaccauuagcaaggaucugagauccgguuaugaaacuuucaaggugauaggcggguggucuacaccaaacagcaaaucacaaaucaauaggcaggucauuguggacagugauaaccgguccggauacagcggcaucuuuucuguagaggguaagucaugcaucaaucgauguuucuauguugagcuuauucgcgggagaaaacaggaaaccagggugugguggacgaguaacagcauagucguguuuugcggcaccuccggaacauacggcacugggucuuggcccgacggagcgaauaucaacuucaugccuauuuga

SEQ ID NO: 142150 - RNA, 1410 nt, Artificial Sequence; identical to SEQ ID NO: 142143
  derived and/or modified CDS sequence (opt3) from neuraminidase__InfluenzaA__AAO46469

SEQ ID NO: 142151 - RNA, 1410 nt, Artificial Sequence
  derived and/or modified CDS sequence (opt3) from neuraminidase__InfluenzaA__AAO46471
augaaccccaaucagaagaucauuaccauaggcagcgugucccugacaaucgccacugucugcuuccucaugcaaauugcuauccuuguuacgaccgugacacugcacuuuaaacaguacgagugugacucuccugcaucaaaccagguaaugccaugcgaaccgauuaucauagagagaaauaucacugaaauuguguauuugaacaauaccacaaucgagaaggaaauuugucccaaagucguggaguacaggaacuggaguaagccucagugccaaaucaccggguucgccccauuuagcaaagauaauuccauacgguuaucugcgggaggugacauuuggguuacucgcgagcccuaugugucgugugauccuggcaagugcuaccaguucgcucuggggcagggaacaacccuagacaacaagcauucaaaugauacgauccacgaccguauuccacaucgaacucuccugaugaacgaacuuggcguccccuuucaccuggguaccagacagguguguaucgccuggagcaguuccucuugccaugaugggaaagcaugguugcacguauguaucacaggagacgauaagaaugccacugcuagcuucauuuaugacggcaggcucguugauuccauaggcucauggagucaaaacauccugcggacccaggagagcgaaugcguguguauuaaugggacaugcaccgucgugaugacggacggaucugcauccggucgcgccgauacuagaauccuguuuauagaggagggcaaaauugugcacaucucaccucucagcgggagugcucagcaugucgaagagugcucuuguuacccaagguauccgggaguucggugcaucugucgcgacaacuggaagggcuccaaucgacccgugguagacauuaacauggaagauuacagcaucgacucgucuuacgugugcuccgguuuagucggggauacaccuagaaacgacgauaggucaaguaauagcaacugucggaauccaaacaaugagcguggaaaccagggcgugaaaggcugggccuucgacaauggggaugacguuuggaugggacgcaccauuuccaaggaucugagaucugguuaugaaacuuuuaaggugauaggcggguggagcacacccaacucaaaaagucaaaucaauaggcaggucauuguggacuccgauaaccggagcggauacucuggcaucuucucaguagaggguaagaguugcaucaaucgauguuuuuauguugagcuuauucgcgggagaaaacaggaaaccagggugugguggacgagcaacuccauagucguguucugcggcaccucuggaacauacggcacugggucguggccugacggagcgaauaucaacuuuaugccaauuuga

SEQ ID NO: 142152 - RNA, 1410 nt, Artificial Sequence
  derived and/or modified CDS sequence (opt3) from neuraminidase__InfluenzaA__AAO46472
augaaccccaaucagaagaucauuaccauaggcagcgugucccugacaaucgccacugucugcuuccucaugcaaauugcuauccuuguuacgaccgugacacugcacuuuaaacaguacgagugugacucuccugcaucaaaccagguaaugccaugcgaaccgauuacuaucgagagaaauauaaccgaaaucguguauuugaacaauacaaccauugagaaggaaaucugucccaaagucguggaguacaggaacuggaguaagccucagugccaaauuacuggguucgccccauuuagcaaagauaauuccauccgguuaucugcgggaggugacauauggguuacacgcgagcccuaugugucgugugauccuggcaagugcuaccaguucgcucuggggcagggaaccacgcuagacaacaagcauucaaaugauacuauucacgaccgaaucccacaucguacccuccugaugaacgaacuuggcguccccuuucaccuggguacaagacagguguguauugccuggagcaguuccucuugccaugaugggaaagcaugguugcacguauguaucacuggagacgauaagaaugccaccgcuagcuucaucuaugacggcaggcucguugauuccauuggcucauggagucaaaacauacugcggacacaggagagcgaaugcguguguaucaaugggaccugcacggucgugaugacugacggaucugcauccggucgcgccgauacaaggauucuguuuaucgaggagggcaaaauagugcacauuucaccucucagcgggagugcucagcaugucgaagagugcucuuguuacccaagauauccgggaguucggugcaucugucgcgacaacuggaagggcuccaaucgacccgugguagacaucaacauggaagauuacagcauugacucgucuuacgugugcuccgguuuagucggggauaccccuagaaacgacgauaggucaaguaauagcaacugucggaauccaaacaaugagcguggaaaccagggcgugaaaggcugggccuucgacaauggggaugacguuuggaugggacgcacuaucuccaaggaucugagaucugguuaugaaacauuuaaggugauuagcggcuggucaacccccaacaguaaaucccaaauaaauaggcaggucaucguggacagcgauaaccggucuggguacucaggaauuuucaguguagagggcaagagcugcaucaaucgauguuuuuauguugagcuuauccgcgguagaaaacaggaaacgagggugugguggaccuccaacucuauugucguguucugcgggacaucgggcacuuacggaaccggcagcuggccugacggggcgaauauaaacuuuaugccaaucuga

SEQ ID NO: 142153 - RNA, 1410 nt, Artificial Sequence; identical to SEQ ID NO: 142143
  derived and/or modified CDS sequence (opt3) from neuraminidase__InfluenzaA__AAO46473

SEQ ID NO: 142154 - RNA, 1410 nt, Artificial Sequence; identical to SEQ ID NO: 142143
  derived and/or modified CDS sequence (opt3) from neuraminidase__InfluenzaA__AAO46474

SEQ ID NO: 142155 - RNA, 1410 nt, Artificial Sequence; identical to SEQ ID NO: 142143
  derived and/or modified CDS sequence (opt3) from neuraminidase__InfluenzaA__AAO46475

SEQ ID NO: 142156 - RNA, 1410 nt, Artificial Sequence
  derived and/or modified CDS sequence (opt3) from neuraminidase__InfluenzaA__AAO46476
augaaccccaaucagaagaucauuaccauaggcagcgugucccugacaaucgccacugucugcuuccucaugcaaauugcuauccuuguuacgaccgugacacugcacuuuagacaguacgagugugacucuccugcaaacaaucagguaaugccaugcgaaccgacuauuaucgagaggaacauaaccgaaaucguguauuugaauaacacaaccauugagaaagaaaucugucccaaguuagucgaguaccggaauuggucaaaaccucagugcaagauuacuggguucgccccauuuaguaaagauaacagcauccgccuguccgcgggaggugacauaugggugacacgagagcccuauguuucuugugauccuggcaagugcuaccaauucgcucuagggcagggaaccacgcucgacaauaagcauucgaacgauacuauucacgaccguaucccacauagaacccugcuuaugaaugaacugggcgugcccuuucacuuggguacaaggcaggucuguauugccuggucaagcaguuccugccaugaugggaaagcauggcuccacguguguguaacuggagacgauaagaacgccaccgcuucuuucaucuaugacggccggcugguugauagcaucggcuccuggucacagaauauucugcgcacacaagagagugaaugcguguguauaaacgggaccugcacggucgugaugacugacggaagcgcaucugguagagccgauacaaggauccucuuuauugaggagggcaaaaucgugcacauauccccuuuaucagggagcgcucagcaugucgaagagugcaguuguuacccacgguauccgggaguucgcugcauuugucgagacaauuggaagggcucuaacagacccgugguagacaucaacguggaagauuacuccaucgacagcucguacgucugcucuggucuggugggggauaccccuaggaauaacgaccgguccucaaauaguaacugucguaauccaaacaaugagcgcggaaaccacggcguuaaaggcugggccuucgaugacgggaaugauguguggaugggaagaacuauuagcaaggaccuuagguccgguuaugaaacauuuaaggucaucggcggguggucuacccccaacagcaaaucacagauuaaucgacaggugauaguagauagugacaaccgguccggauacagcggcaucuucucuguugaggguaagucaugcauuaaucgcuguuuuuauguggaguugaucagagggagggaacaagagacgcgggucugguggaccaguaacagcaucguggucuucugcggcacauccggaacuuacggcaccgggucuuggccugauggagcggacauuaaucugaugccaauauga

SEQ ID NO: 142157 - RNA, 1410 nt, Artificial Sequence; identical to SEQ ID NO: 142143
  derived and/or modified CDS sequence (opt3) from neuraminidase__InfluenzaA__AAO46477

SEQ ID NO: 142158 - RNA, 1410 nt, Artificial Sequence
  derived and/or modified CDS sequence (opt3) from neuraminidase__InfluenzaA__AAO46478
augaaccccaaucagaagaucauuaccauaggcagcgugucccugaucauugccacagucugcuuccucaugcaaaucgcuauucuuguuacuacggugacccugcacuuuaaacagcaugagugugacucuccuucaaguaaccagguaaugccaugcgaaccgaucauaaucgagagaaauauuacagaaaucguguacuugaacaauacuaccauugagaaggaaacaugucccaaauuagucgaguauaggaacuggagcaagccucagugcaaaaucaccggguucgcaccauuuuccaaggauaauucuauacggcugucggccggaggugacauuugggugacucgcgagcccuacguuucaugugauccuggcaagugcuaucaauucgcgcuagggcagggaacaacccucgacaacaaacacagcaaugauacgauccaugaccgaaucccacaccguacucugcuuaugaacgaacugggcgugcccuuucauuuggguaccagacaggucuguauugcuuggaguuccucuagcugccacgaugggaaggccuggcuccacguguguguaacaggagacgauaaaaaugcaacugccuccuucaucuacgacggcaggcugguugauucaauuggcaguuggagccagaacauacugcggacccaagagucugaaugcguguguaucaaugggacaugcaccgucgugaugacggacggaaacgcuuccggucgcgcagauacuaggauucucuuuaucgaggagggcaagauagugcauauuucaccuuuaagcgggagugcccagcacgucgaagagugcucuuguuauccaagguacccggacguucggugcaucugucgcgacaauuggaaaggauccaaccgacccaucguggauauuaacaugaaggacuauagcaucgauucgucuuacguaugcuccggccuggugggugacacaccuagaaaugaugacaggucaaguaagagcaacugucggaauccaaacaaugaacgugggaaccauggagucaaaggcugggcuuucgauaauggcaacgacguguggauggggcgcaccauuuccaaggaucuuagaucuggauacgagacuuuuaaaguuauagguggcuggagcacacccaauucaaagagucagaucaacagacaggugauugucgacuccgauaaucggagcggguauucuggaaucuucucaguggaaggcaaaaguugcaucaaccgauguuuuuacguagaguugauucgcgguagagagcaagaaaccaggguuugguggacgagcaauuccauaguggucuucugcgggaccucuggcacauauggaacuggcucguggccugacggggccaacaucaauuuuaugccaauuuga

SEQ ID NO: 142159 - RNA, 1410 nt, Artificial Sequence
  derived and/or modified CDS sequence (opt3) from neuraminidase__InfluenzaA__AAO46479
augaaccccaaucagaagaucauuaccauaggcagcgugucccugacaaucgccacugucugcuuccucaugcaaauugcuauccuuguuacgaccgugacacugcacuuuaaacaguacgagugugacucuccugcaucaaacagaguaaugccaugcgaaccgauuaucauagagaggaauaucacugaaauuguguauuugaacaauaccacaaucgagaaggaaauuugucccaaagucguggaguaccggaacuggaguaagccucagugccagaucaccggguucgccccauuuagcaaagauaauuccauacgcuuaucugcgggaggugacauuuggguuacucgagagcccuaugugucgugugauccuggcaagugcuaccaauucgcucuggggcagggaacaacccuagacaacaagcauucaaaugauacgauccacgaccguauuccacauagaacucuccugaugaacgaacuuggcguccccuuucaccuggguaccaggcaaguguguaucgccuggagcaguuccucuugccaugaugggaaagcaugguugcacguauguaucacaggagacgauaagaaugccacugcuagcuucauuuaugacggccggcucguugauuccauaggcucauggagucagaacauccugcgcacccaggagagcgaaugcguguguauuaaugggacaugcaccgucgugaugacggacggaucugcauccgguagagccgauacuaggauccuguuuauagaggagggcaaaauugugcacaucucaccucucagcgggagugcucagcaugucgaagagugcucuuguuacccacgguauccgggaguucgcugcaucugucgagacaacuggaagggcuccaauagacccgugguagacauuaacauggaagauuacagcaucgacucgucuuacgugugcuccgguuuagucggggauacaccuaggaacgacgaucggucaaguaauagcaacugucguaauccaaacaaugagcgcggaaaccagggcgugaaaggcugggccuucgacaauggggaugacguuuggaugggaagaaccauuuccaaggaucugaggucugguuaugaaacuuuuaaggugauaggcggguggagcacacccaacucaaaaagucagaucaaucggcaagucauuguggacuccggaaaccgaagcggcuacucugguaucuucucaguagaggggaagaguugcaucaaucgcuguuuuuauguugagcuuauuagaggcaggaaacaggaaacccgggugugguggacgagcaacuccauagucguguucugcggaaccucuggcacauacgggacuggaucguggccugauggugcgaauaucaacuuuaugccaauuuga

SEQ ID NO: 142160 - RNA, 1410 nt, Artificial Sequence
  derived and/or modified CDS sequence (opt3) from neuraminidase__InfluenzaA__AAO46481
augaaccccaaucagaagaucauuaccauaggcagcgugucccugacaaucgccacugucugcuuccucaugcaaauugcuauccuuguuacgaccgugacacugcacuuuaaacaguacgagugugacucuccugcaaacaaucagguaaugccaugcgaaccgauuaucauagagagaaacaucacugaaauuguguauuugaccaauacaaccaucgagaaggaaauuugucccaaauuagucgaguacaggaacuggucaaagccucagugcaaaaucacuggguucgccccauuuaguaaggauaauagcauacggcuguccgcgggaggugacauuugggugacacgcgagcccuauguuucuugugauccuggcaagugcuaccaauucgcucuagggcagggaaccacgcucgacaacaaacauucgaaugauacuauccacgaccgaaucccacaucguacccugcuuaugaacgaacugggcgugcccuuucacuuggguacaagacaggucuguauugccuggucaagcaguuccugccaugaugggaaggcauggcuccacguguguguaacuggagacgauaaaaaugccaccgcuucuuucaucuaugacggcaggcugguugauagcauuggcuccuggucacagaacauacugcggacacaagagagugaaugcguguguaucaaugggaccugcacggucgugaugacugacggaagcgcaucuggucgcgccgauacacggauucucuuuaucgaggagggcaagauagugcacauuuccccuuuaucagggagcgcucagcaugucgaagagugcaguuguuacccaagguauccgggaguucggugcaucugucgcgacaacuggaaaggcucuaaucgacccgugguagacaucaacgugaaggauuacuccauugacagcagauacgucugcucgggucuggugggggauaccccuaggaacaaugaccggucuuccaacucaaauugucguaacccaaauaacgaacgcggaaaucacggcguuaagggcugggccuucgaugacgggaacgauguguggaugggaagaacuaucaguaaagacagcagguccgguuaugagacauuuaaggucauuggcggguggucuacccccaauagcaaaucacagauaaacagacaggugaucguagauagugacaaucgauccggauacagcggcauuuucucuguugaaucaaagaguugcaucaaccgcuguuuuuauguggagcuuaucagagguagggagcaagaaacgcgggucugguggaccagcaauuccauuguggucuucugcgggacaucuggcacuuacggaaccggcucguggccugauggggcggacauaaacuugaugccaaucuga

SEQ ID NO: 142161 - RNA, 1410 nt, Artificial Sequence
  derived and/or modified CDS sequence (opt3) from neuraminidase__InfluenzaA__AAO46482
augaaccccaaucagaagaucauuaccauaggcagcgugucccugacaaucgccacugucugcuuccucaugcaaauugcuauccuuguuacgaccgugacacugcacuuuaaacaguacgagugugacucuccugcaaacaaucagguaaugccaugcgaaccgaugauuaucgagagaaacauaacugaaaucguguauuugaccaauacaaccauugagaaggaaaucugucccaaauuagucgaguacaggaacuggucaaagccucagugcaaaauuacuggguucgccccauuuaguaaggauaauagcauccggcuguccgcgggaggugacauaugggugacacgcgagcccuauguuucuugugauccuggcaagugcuaccaauucgcucuagggcagggaaccacgcucgacaacaaacauucgaaugauacuauucacgaccgaaucccacaucguacccugcuuaugaacgaacugggcgugcccuuucacuuggguacaagacaggucuguauugccuggucaagcaguuccugccaugaugggaaggcauggcuccacguguguguaacuggagacgauaaaaaugccaccgcuucuuucaucuaugacggcaggcugguugauagcaucggcuccuggucacagaacauucugcggacacaagagagugaaugcguguguauaaaugggaccugcacggucgugaugacugacggaagcgcaucuggucgcgccgauacaagaauccucuuuauugaggagggcaagaucgugcacauauccccuuuaucagggagcgcucagcaugucgaagagugcaguuguuacccaagguauccgggaguucggugcauuugucgcgacaacuggaaaggcucuaaucgacccgugguagacaucaacgugaaggauuacuccaucgacagcagauacgucugcucgggucuggugggggauaccccuaggaacaaugaccggucuuccaacucaaauugucguaacccaaauaacgauaagggaaaucacggcguuaaaggcugggccuucgacgaugggaacgacguguggaugggacgcacuauuaguaaggauagcagauccgguuaugaaacauuuaaagucaucggcggguggucuacccccaauagcaagucacagauuaacaggcaagugauaguagacagugauaaucgguccggauacagcggcaucuucucuguugaggguaaaucaugcauuaaccgauguuuuuauguggaacuuauccgcgggagagagcaggagacgagggucugguggaccaguaauagcaucguggucuucugcggcacauccggaacuuacggcaccgggucuuggccugacggagcggacauuaacuugaugccaauauga

SEQ ID NO: 142162 - RNA, 1410 nt, Artificial Sequence
  derived and/or modified CDS sequence (opt3) from neuraminidase__InfluenzaA__AAO46483
augaaccccaaucagaagaucauuaccauaggcagcgugucccugacaaucgccacugucugcuuccucaugcaaauugcuauccuuguuacgaccgugacacugcacuuuagacaguacgagugugacucuccugcaaacaaucagguaaugccaugcgaaccgauuaucauagagaggaacaucacugaaauuguguauuugaauaacaccacaaucgagaaagaaauuugucccaaguuagucgaguaccggaauuggucaaaaccucagugcaagaucaccggguucgccccauuuaguaaagauaacagcauacgccuguccgcgggaggugacauuugggugacucgagagcccuauguuucuugugauccuggcaagugcuaccaauucgcucuagggcagggaacaacccucgacaauaagcauucgaacgauacgauccacgaccguauuccacauagaacucugcuuaugaaugaacugggcgugcccuuucacuuggguaccaggcaggucuguaucgccuggucaagcaguuccugccaugaugggaaagcauggcuccacguguguguaacaggagacgauaagaacgccacugcuucuuucaucuaugacggccggcugguugauagcauuggcuccuggucacagaauauacugcgcacccaagagagugaaugcguguguaucaacgggacaugcaccgucgugaugacggacggaagcgcaucugguagagccgauacuaggauucucuuuaucgaggagggcaaaauagugcacauuuccccuuuaucagggagcgcucagcaugucgaagagugcaguuguuacccacgguauccgggaguucgcugcaucugucgagacaauuggaagggcucuaacagacccgugguagacaucaacguggaagauuacuccauugacagcucguacgucugcucuggucuggugggggauacaccuaggaauaacgaccgguccucaaauaguaacugucguaauccaaacaaugagcgcggaaaccacggcguuaaaggcugggccuucgaugacgggaaugauguguggaugggaagaaccaucagcaaggaccuuagguccgguuaugaaacuuuuaaggucauuggcggguggucuacacccaacagcaaaucacagauaaaucgacaggugaucguagauagugacaaccgguccggauacagcggcauuuucucuguugaggguaagucaugcaucaaucgcuguuuuuauguggaguugaucagagggagggaacaagagacccgggucugguggacgaguaacagcauuguggucuucugcggcaccuccggaacauacggcacugggucuuggccugauggagcggacauaaaucugaugccaaucuga

SEQ ID NO: 142163 - RNA, 1410 nt, Artificial Sequence
  derived and/or modified CDS sequence (opt3) from neuraminidase__InfluenzaA__AAO46485
augaaccccaaucagaagaucauuaccauaggcagcgugucccugacaaucgccacugucugcuuccucaugcaaauugcuauccuuguuacgaccgugacacugcacuuuaaacaguacgagugugacucuccugcaaacaaucagguaaugccaugcgaaccgauuaucauagagagaaacaucacugaaauuguguauuugaccaauacaaccaucgagaaggaaauuugucccaaauuagucgaguacaggaacuggucaaagccucagugcaaaaucacuggguucgccccauuuaguaaggauaauagcauacggcuguccgcgggaggugacauuugggugacacgcgagcccuauguuucuugugauccuggcaagugcuaccaauucgcucuagggcagggaaccacgcucgacaacaaacauucgaaugauacuauccacgaccgaaucccacaucguacccugcuuaugaacgaacugggcgugcccuuucacuuggguacaagacaggucuguauugccuggucaagcaguuccugccaugaugggaaggcauggcuccacguguguguaacuggagacgauaaaaaugccaccgcuucuuucaucuaugacggcaggcugguugauagcauuggcuccuggucacagaacauacugcggacacaagagagugaaugcguguguaucaaugggaccugcacggucgugaugacugacggaagcgcaucuggucgcgccgauacaaggauucucuuuaucgaggagggcaagauagugcacauuuccccuuuaucagggagcgcucagcaugucgaagagugcaguuguuacccaagguauccgggaguucggugcaucugucgcgacaacuggaaaggcucuaaucgacccgugguagacaucaacgugaaggauuacuccauugacagcagauacgucugcucgggucuggugggggauaccccuaggaacaaugaccggucuuccaacucaaauugucguaacccaaauaacgauaagggaaaucacggcguuaaaggcugggccuucgacgaugggaacgacguguggaugggacgcacuaucaguaaggauagcagauccgguuaugaaacauuuaaagucauuggcggguggucuacccccaauagcaagucacagauaaacagacaggugaucguagacagugauaaucgguccggauacagcggcauuuucucuguugaggguaaaucaugcaucaaccgauguuuuuauguggaacuuauccgcgggagagagcaagagacgagggucugguggaccaguaauagcauuguggucuucugcggcacauccggaacuuacggcaccgggucuuggccugacggagcggacauaaacuugaugccaaucuga

SEQ ID NO: 142164 - RNA, 1410 nt, Artificial Sequence
  derived and/or modified CDS sequence (opt3) from neuraminidase__InfluenzaA__AAO46486
augaaccccaaucagaagaucauuaccauaggcagcgugucccugacaaucgccacuauuugcuuccucaugcaaaucgcuauucuugucacgaccguuacacugcacuuuaaacaguacgagugugacucuccugcaaacaaucaggugaugccaugcgaaccgaucauaaucgagagaaacauuacugaaaucguauauuugaccaauacaaccauugagaaggaaaucugucccaaauuaguggaguacaggaacuggucaaagccucagugcaaaauaacuggguucgccccauuuaguaaggauaauagcauucggcuguccgcgggaggugacaucugggucacacgcgagcccuaugugucuugugauccuggcaagugcuaccaauucgcucuagggcagggaaccacgcucgacaacaaacauucgaaugauacuauucacgaccgaaucccacaucguacccugcuuaugaacgaacugggcguucccuuucacuuggguacaagacagguguguaucgccuggucaagcaguuccugccaugaugggaaggcauggcuccacgucugugugacuggagacgauaaaaaugccaccgcuucuuucauuuaugacggcaggcugguagauagcauaggcuccuggucacagaacauccugcggacacaagagagugaaugcguuuguauuaaugggaccugcacgguggucaugacugacggaagcgcaucuggucgcgccgauacaagaauccucuuuauagaggagggcaagauugugcacaucuccccuuuaucagggagcgcucagcauguggaagagugcaguuguuacccaagguauccgggaguccggugcaucugucgcgacaacuggaaaggcucuaaucgacccguuguggacauuaacguaaaggauuacuccaucgacagcucguacgugugcucuggucuggucggggauaccccuagaaacaaugacagguccucaaacaguuauugucggaauccaaacaaugaacguggaaaccacggcgugaagggcugggccuucgaugacgggaaugauguuuggaugggacgcacuauuagcaaagacuccagaucugguuacgagacauuuaaggugauaggcggguggagcacccccaacucaaaaagucagaucaauaggcaggucauuguggauuccgacaaccggagcggauauucuggcaucuucucaguagaagguaagaguugcaucaaucgauguuuuuacguugagcuuauucgcgggagagagcaagaaacgagggugugguggaccagcaacuccauagucguguucugcggcacaucuggaacuuauggcaccgggucguggccugauggagcggacaucaauuugaugccaauuuga

SEQ ID NO: 142165 - RNA, 1410 nt, Artificial Sequence
  derived and/or modified CDS sequence (opt3) from neuraminidase__InfluenzaA__AAO46489
augaaccccaaucagaagaucauuaccauaggcagcgugucccugacaaucgccacuauuugcuuccucaugcaaaucgcuauucuugucacgaccguuacacugcacuuuaaacaguacgagugugacucuccugcaaacaaucaggugaugccaugcgaaccgaucauaaucgagagaaacauuacugaaaucguauauuugaccaauacaaccauugagaaggaaaucugucccaaauuaguggaguacaggaacuggucaaagccucagugcaaaauaacuggguucgccccauuuaguaaggauaauagcauucggcuguccgcgggaggugacaucugggucacacgcgagcccuaugugucuugugauccuggcaagugcuaccaauucgcucuagggcagggaaccacgcucaacaauaaacauucgaacgacacuauucacgaucgaaucccacaucguacccugcuuaugaaugaacugggcguucccuuucacuuggguacaagacagguguguaucgccuggucaagcaguuccugccaugacgggaaggcauggcuccacgucugugugacuggagaugacaaaaacgccaccgcuucuuucauuuaugauggcaggcugguagacagcauaggcuccuggucacagaauauccugcggacacaagagagugaaugcguuuguauuaacgggaccugcacgguggucaugacugauggaagcgcaucugguaaggccgacacacgcauccucuuuauagaggagggcaaaauugugcacaucuccccuuuaucagggagcgcucagcauguggaagagugcaguuguuacccaagauauccgggagucaggugcaucugucgggauaauuggaagggcucuaaccgccccguuguggacauuaacguaaaggacuacuccaucgauagcucguacgugugcucuggucuggucggggacaccccucgaaauaacgauagauccucaaguagcuauuguaggaauccaaacaaugaacggggaaaccacggcgugaaaggcugggccuucgacgaugggaaugacguuuggaugggacguacuauuuccaaggauucucgcagcgguuacgagacauuuaaagugauaggcggguggucaacccccaacaguaagucccagaucaauagacaggucauuguggacagcgauaacaggucuggauauucaggcaucuucaguguagaagguaaaagcugcaucaaucgguguuuuuacguugagcuuauucgagggcgcgagcaagaaacgagagugugguggaccuccaacucuauagucguguucugcggcacaucgggaacuuauggcaccgggagcuggccugacggagcggauaucaauuugaugccaauuuga

SEQ ID NO: 142166 - RNA, 1410 nt, Artificial Sequence
  derived and/or modified CDS sequence (opt3) from neuraminidase__InfluenzaA__AAO46491
augaaccccaaucagaagaucauuaccauaggcagcgugucccugacaaucgccacuauuugcuuccucaugcaaaucgcuauucuugucacgaccguuacacugcacuuuaaacaguacgagugugacucuccugcaaacaaucaggugaugccaugcgaaccgaucauaaucgagagaaacauuacugaaaucguauauuugaccaauacaaccauugagaaggaaaucugucccaaauuaguggaguacaggaacuggucaaagccucagugcaaaauaacuggguucgccccauuuaguaaggauaauagcauucggcuguccgcgggaggugacaucugggucacacgcgagcccuaugugucuugugauccuggcaagugcuaccaauucgcucuagggcagggaaccacgcucgacaacaaacauucgaaugauacuauucacgaccgaaccccacaucguacacugcuuaugaacgaacugggcguucccuuucacuuggguacuagacagguguguaucgccuggucaagcaguuccugccaugaugggaaggcauggcuccacgucugugugaccggauaugacaaaaaugccacagcuucuuucaucuacgauggcaggcugguagacagcauuggcuccuggucacagaacauacugcggacccaagagagugaaugcguuuguaucaaugggacgugcacuguggucaugacagauggaagcgcaucuggucgcgccgacaccaagauucucuuuaucgaggagggcaaaauagugcacauuuccccuuuaucagggagcgcucagcauguggaagagugcaguuguuauccaagauacccgggagucaggugcaucugucgggauaacuggaagggcucuaaucgccccguuguggacaucaacguaaaggacuacuccauugauagcucguaugugugcucuggucuggucggggacacuccucgaaacaaugauagauccucaaacaguuacuguaggaauccaaacaaugaaaaaggaaaccacggcgugaagggcugggccuucgacgaugggaaugacguuuggaugggacggacaaucagcgaggauucccguucugguuaugaaaccuuuaaagugauuggcggguggagcacgcccaacucaaaacuucagauaaaucgccaggucaucguggacagugauaacagauccggauacagcggcauuuucucuguagaggguaagucaugcaucaauagguguuuuuauguugaguugauccgggggcgagaacaagagacccgcgugugguggacaaguaacagcauugucguguucugcggcacuuccggaaccuacggcacagggucuuggccugacggagcggauauaaaucugaugccaaucuga

SEQ ID NO: 142167 - RNA, 1410 nt, Artificial Sequence; identical to SEQ ID NO: 142166
  derived and/or modified CDS sequence (opt3) from neuraminidase__InfluenzaA__AAO46492

SEQ ID NO: 142168 - RNA, 1410 nt, Artificial Sequence
  derived and/or modified CDS sequence (opt3) from neuraminidase__InfluenzaA__AAO88264
augaacaccaaucagagaaucauuacaauaggcacugugugccugaucgucgggauuguuagccuccuucugcaaaucggaaacauuguguccuuguggaucucucacucaauacagacggguaagaaaaauuacaguaagaucuguagcaaauccguaauuaccuaugagaacaauacaugggugaaccagacuuacgucaauaucucuaacauuaauaucgccgacggccagggggugaacucgauaauuuuagcuggaaauucaagccugugccccaucaguggcugggcaauuuauuccaaggauaacucuaucaggaucgguagcaaaggggacauuuucguuauacgggaaccuuuuaucuccuguucacaucuagagugccgcaccuucuuucucacacaaggagcccugcuuaaugaucgacacaguaacggcaccgugaaggaccguagcccauacagaacucugaugucuuguccgauuggcgaagcgcccuccccuuauaauucaagguucgagagcgucgcuuggagugccucugcaugccaugaugggaugggaugguugacaaucgguauauccggcccagacaacggggccguggcuguacucaaguacaacggaauuaucaccgauacgaucaaaagcuggcggaauaagauucugcgcacucaggaaucggaguguguuugcaucaacggcucuuguuuuaccauuaugacagacggucccuccaaugggcaggcaucauauaaaauauucaagauggagaaaggaaagaucauuaagaguguggaacuggaugccccuaacuaccacuacgaggaaugcagcuguuauccagacacuggcaaagucgugugcgugugcuccgauaauuggcaugcuucuaacagacccugggucagcuuugaccagaaucucgauuaccaaaucggcuauaucuguucagggguuuucggagacaacccuaggaguaaugacggucggggcaacugcgggccaguguuauccaauggagccaacggcguaaaggguuuuagcuuccgcuacgggaauggcguguggauuggacgaaccaaaucuauaucaaguagaagcggcuuugagaugaucugggauccgaacggguggacagagaccgacuccucuuucucgauuaagcaggaugucaucgcgcugacggacuggagcggauauuccgguucauuugugcagcaccccgaacuuacuggcaugaauuguauuaggccuugcuucuggguugaguugauccgggggcagccaaaagaaaguacaauauggaccucuggaagcuccaucucauucuguggcguggauagcgagacugcaucuugguccuggcccgacggugccgaucugccuuuuacaauugacaaguga

SEQ ID NO: 142169 - RNA, 1410 nt, Artificial Sequence
  derived and/or modified CDS sequence (opt3) from neuraminidase__InfluenzaA__AAQ10334
augaaccccaaucagaagaucauuaccauaggcagcgugucccugacaaucgccacuauuugcuuccucaugcaaaucgcuauucuugucacgaccguuacacugcacuuuaaacaguacgaguguaacccuccaccgaauaaccaggugauguugugcgaacccacuaucauagagagaaauaucaccgaaauuguauauuuaacaaacaccacuaucgagaaggaaauuuguccuaaacuggcagaguacaggaauuggucuaagccacagugcaaaaucacaggguucgcccccuuuucaaaggacaacaguauacggcuaagcgcgggaggugauauuugggugacccgcgagccuuaugucuccugugacccaggcaagugcuaccaauucgcucucgggcagggaacgacucugaauaaccgacauucuaaugauaccgugcacgaccguacacccuauagaacucuucugaugaacgaauugggcguuccuuuucaucucgguaccaaacagguguguaucgccuggucgucaagcaguugccacgaugggaaggcauggcugcaugucugugugacaggacacaaugagaacgccaccgcuuccuucauuuacaauggcaggcugguagacucuaucggcagcugguccaaaaacauccuccggacgcaggaaucagagugcguuuguauuaacgggacuugcacaguggucaugaccgauggaagugcaagcggucgcgccgacacuaagauauuauuuaucgaggaaggcaaaauugugcacaucucuccacuguccgggucagcucaacauguggaggaaugcagcuguuauccgagauaccccggagucaggugcguuugucgggauaauuggaagggcaguaaccgcccuauaguggacauuaauguaaaggauuacucuaucguguccagcuaugucugcucgggucuugugggggacacaccacggaaaaacgauucuuccucaaguagcuacuguuugaaucccaacaaugaggaaggaggccacggcguuaaggggugggccuucgacgacggaaacgauguguggauggguagaaccaucuccgagaaacugaggucuggcuaugagacguuuaaggucauugggggauggagcaaaccuaauucaaagcuacagaucaaccgacaggugauuguagaccguggcaaucgcagugguuacuccgggauauucagcguugaaggcaaaucuugcaucaacagauguuuuuauguggagcucauuaggggacggaagcaggaaaccgaggucugguggacaucaaauaguaucguggucuucugcggcacuagcgggaccuacggaacagguuccuggccagauggcgcggacaucaaccugaugcccauuuga

SEQ ID NO: 142170 - RNA, 1410 nt, Artificial Sequence; identical to SEQ ID NO: 142169
  derived and/or modified CDS sequence (opt3) from neuraminidase__InfluenzaA__AAQ10335

SEQ ID NO: 142171 - RNA, 1410 nt, Artificial Sequence
  derived and/or modified CDS sequence (opt3) from neuraminidase__InfluenzaA__AAQ10336
augaaccccaaucagaagaucauuaccauaggcagcgugucccugacaaucgccacuauuugcuuccucaugcaaaucgcuauucuugucacgaccguuacacugcacuuuaaacaguacgaguguaacccuccaccgaauaaccaggugauguugugcgaacccacuaucauagagagaaauaucaccgaaauuguauauuuaacaaacaccacuaucgagaaggaaauuuguccuaaacuggcagaguacaggaauuggucuaagccacagugcaaaaucacaggguucgcccccuuuucaaaggacaacaguauacggcuaagcgcgggaggugauauuugggugacccgcgagccuuaugucuccugugacccaggcaagugcuaccaauucgcucucgggcagggaacgacucugaauaaccgacauucuaaugauaccgugcacgaccguacacccuauagaacucuucugaugaacgaauugggcguuccuuuucaucucgguaccaaacagguguguaucgccuggucgucaagcaguugccacgaugggaaggcauggcugcaugucugugugacaggacacaaugagaacgccaccgcuuccuucauuuacaauggcaggcugguagacucuaucggcagcugguccaaaaacauccuccggacgcaggaaucagagugcguuuguauuaacgggacuugcacaguggucaugaccgauggaagugcaagcggucgcgccgacacuaagauauuauuuaucgaggaaggcaaaauugugcacaucucuccacuguccgggucagcucaacauguggaggaaugcagcuguuauccgagauaccccggagucaggugcguuugucgggauaauuggaagggcaguaaccgcccuauaguggacauuaauguaaaggauuacucuaucguguccagcuaugucugcucgggucuugugggggacacaccacggaaaaacgauucuuccucaaguagcuacuguuugaaucccaacaaugaggaaggaggccacggcguuaaggggugggccuucgacgacggaaacgauguguggauggguagaaccaucuccgagaaacugaggucuggcuaugagacguuuaaggucauugggggauggagcaaaccuaauucaaagcuacagaucaaccgacaggugauuguagaccguggcaaucgcagugguuacuccgggauauucagcguugaaggcaaaucuugcaucaacagauguuuuuauguggagcucauuaggggacggaagcaggaaaccgaggucugguggacaucaaauaguaucguggucuucugcggcacuagcgggaccuacggaacagguuccuggccagauggcgcggaaaucaaccugaugcccauuuga

SEQ ID NO: 142172 - RNA, 1410 nt, Artificial Sequence; identical to SEQ ID NO: 142169
  derived and/or modified CDS sequence (opt3) from neuraminidase__InfluenzaA__AAQ10337

SEQ ID NO: 142173 - RNA, 1410 nt, Artificial Sequence
  derived and/or modified CDS sequence (opt3) from neuraminidase__InfluenzaA__AAQ10339
augaaccccaaucagaagaucauuaccauaggcagcgugucccugacaaucgccacuauuugcuuccucaugcaaaucgcuauucuugucacgaccguuacacugcacuuuaaacaguacgaguguaacucuccuccaaauaaccaggugauguugugcgaaccgacuaucauagagagaaauaucaccgaaauuguauauuuaacaaacaccacuaucgagaaggaaauuugucccaaacuggcagaguacaggaauuggucaaagccucagugcaaaaucacaggguucgccccauuuaguaaggacaacagcauacggcuauccgcgggaggugauauuugggugacccgcgagcccuaugucucuugugacccugauaagugcuaccaauucgcucucggccaggggacgacucugaauaaccgacauucgaaugacaccgugcacgaucguacaccauauagaacucuucugaugaacgaauugggaguucccuuucaucucggcaccaaacagguguguaucgccuggucaagcaguuccugccacgacgguaaggcauggcugcaugucugugugacagggcacgaugagaaugccaccgcuucuuucauuuacgacggaaggcugguagauagcaucggcuccuggaguaaaaagauccuccggacgcaggaaagugagugcguuuguauuaacggcacuugcacaguggucaugaccgacgggagcgcaucuggacgcgccgauacuaaaauauuauuuaucgaggaagguaagauugugcacaucuccccucugucaggcagcgcucaacauguggaggaaugcaguuguuauccaagauacccgggggucaggugcguuugucgggacaauuggaagggaucuaaccgccccauaguggauauuaacguaaaagacuacuccaucgugagcucguaugucugcucuggccuugugggugacacaccucgaaagaaugauuccucaaguagcucccacuguuugaacccaaauaacgaggaagggggacauggcguuaaaggcugggccuucgacgaugggaaugacguguggaugggaagaaccaucucugagacgcugaggagcgguuacgagaccuuuaaggucauugaaggcuggucaaaacccaacaguaagcuacagaucaaucgucaggugauuguagaucgggggaaccgcuccggauauagcggcauauucucuguugaggguaaaucaugcaucaauagauguuuuuacguggaacucauuagggggcggaagcaggagacagaagucugguggacuucaaacagcaucguggucuucugcggcaccuccggaacauauggcacugggucuuggccugacggagcggauaucaaucugaugccaauuuga

SEQ ID NO: 142174 - RNA, 1410 nt, Artificial Sequence
  derived and/or modified CDS sequence (opt3) from neuraminidase__InfluenzaA__AAQ10341
augaaccccaaucagaagaucauuaccauaggcagcgugucccugacaaucgccacuauuugcuuccucaugcaaaucgcuauucuugucacgaccguuacacugcacuuuaaacaguacgaguguaacucuccuccaaauaaccaggugauguugugcgaaccgacuaucauagagagaaauaucaccgaaauuguauauuuaacaaacaccacuaucgagaaggaaauuugucccaaacuggcagaguacaggaauuggucaaagccucagugcaaaaucacaggguucgccccauuuaguaaggacaacagcauacggcuauccgcgggaggugauauuugggugacccgcgagcccuaugucucuugugacccugauaagugcuaccaauucgcucucggccaggggacgacucugaauaaccgacauucgaaugacaccgugcacgaucguacaccauauagaacucuucugaugaacgaauugggaguucccuuucaucucggcaccaaacagguguguaucgccuggucaagcaguuccugccacgacgguaaggcauggcugcaugucugugugacagggcacgaugagaaugccaccgcuucuuucauuuacgacggaaggcugguagauagcaucggcuccuggaguaaaaagauccuccggacgcaggaaucagagugcguuuguauuaacggcacuugcacaguggucaugaccgacgggagcgcaucuggacgcgccgauacuaaaauauuauuuaucgaggaagguaagauugugcacaucuccccucugucaggcagcgcucaacauguggaggaaugcaguuguuauccaagauacccgggggucaggugcguuugucgggacaauuggaagggaucuaaccgccccauaguggauauuaacguaaaagacuacuccaucgugagcucguaugucugcucuggccuugugggugacacaccucgaaagaaugauuccucaaguagcucccacuguuugaacccaaauaacgaggaagggggacauggcguuaaaggcugggccuucgacgaugggaaugacguguggaugggaagaaccaucucugagaagcugaggagcgguuacgagacguuuaaagucauugaaggcuggucaaagcccaacaguaaacuacagaucaaucgucaggugauuguagaucgggggaaccgcuccggauauagcggcauauucucuguugaggguaagucaugcaucaauagauguuuuuacguggaacucauuagggggcggaagcaggagaccgaagucugguggacaaguaacagcaucguggucuucugcggcacuuccggaaccuauggcacagggucuuggccugacggagcggauaucaaucugaugccaauuuga

SEQ ID NO: 142175 - RNA, 1410 nt, Artificial Sequence
  derived and/or modified CDS sequence (opt3) from neuraminidase__InfluenzaA__AAQ10343
augaaccccaaucagaagaucauuaccauaggcagcgugucccugacaaucgccacuauuugcuuccucaugcaaaucgcuauucuugucacgaccguuacacugcacuuuaaacaguacgaguguucuucaccuccaaacaaucaggugauguugugcgaaccgacuaucauagagagaaacaucaccgaaauuguauauuuaacaaauaccacuaucgagaaggaaauuugucccaaacuggcagaguacaggaacuggaguaagccucagugcaaaaucacaggguucgccccauuuagcaaggacaauuccauacggcuaucugcgggaggugauauuugggugacccgcgagcccuaugucucgugugacccugauaagugcuaccaauucgcucucggccaggggacgacucugaacaaucgacauucaaacgacaccgugcacgaucguacaccauauagaacucuucugaugaaugaauugggaguucccuuucaucucggcaccaaacagguguguaucgccuggagcaguuccucuugccacgacgguaaggcauggcugcaugucugugugacagggcacgaugagaacgccaccgcuagcuucauuuacgacggaaggcugguagauuccaucggcucauggaguaaaaagauccuccggacgcaggaaagcgagugcguuuguauuaauggcacuugcacaguggucaugaccgacgggucugcauccggacgcgccgauacuaaaauauuauuuaucgaggaagguaagauugugcacaucucaccucugagcggcagugcucaacauguggaggaaugcucuuguuauccaagauacccgggggucaggugcguuugucgggacaacuggaagggauccaaucgccccauaguggauauuaacguaaaagacuacagcaucgugucgucuuaugucugcuccggccuugugggugacacaccucgaaagaacgauucaaguagcuccucucacuguuugaauccaaacaaugaggaagggggacauggcguuaaaggcugggccuucgacgaugggaacgacguguggaugggaagaaccaucagcgagaaguuuaggucagguuacgagacguucaaagucauugaaggcuggaguaagcccaauuccaaacugcagaucaaccgucaggugauuguagaucgggggaaucgcagcggauauucuggcauauuuucaguugaggguaagaguugcaucaacagauguuucuacguggaacuaauuagggggcggaagcaggagaccgaagucugguggacaagcaauuccaucguggcguuuugcggcacuucuggaaccuauggcacagggucguggccugacggagcagauaucaaccucaugccaauuuga

SEQ ID NO: 142176 - RNA, 1191 nt, Artificial Sequence
  derived and/or modified CDS sequence (opt3) from neuraminidase__InfluenzaA__AAQ10344
augaaccccaaucagaagaucauuaccauaggcagcgugucccugacaaucgccacuauuugcuuccucaugcaaaucgcuauucuugucacgaccguuacacugcacuuuaaacaguacgaguguaacucuccuccaaauaaccaggcaauguugugcgaaccgacuaucauagagagaaauaucaccgaaauuguguauuuaacaaacaccacuaucgagaaggaaauuugucccaaacuggccgaguacaggaauuggucaaagccucagugcaaaaucacaggguucgcgccauuuaguaaggacaacagcauacggcuauccgcuggaggugauauuuggguaacccgcgagcccuaugugucuugugacccugauaagugcuaccaauucgcccucggccaggggacgacucugaauaaccgacauucgaaugacaccguccacgaucguacaccauauagaacucuucugaugaacgaauugggagugcccuuucaucucggcaccaaacagguuuguaucgcauggucaagcaguuccugccacgacgguaaggccuggcugcaugugugugucacagggcacgaugagaaugcuaccgcaucuuucauuuacgacggaaggcugguggauagcaucggcuccuggaguaaaaagauccuccggacgcaggaaucagagugcguauguauuaacggcacuugcacaguugugaugaccgacgggagcgccucuggacgcgcugauacuaaaauauuauuuaucgaggaagguaagauuguccacacauccaagcugucaggcagcgcccaacauguggaggaaugcaguuguuauccuagauacccaggggugaggugcgucugucgggacaauuggaaaggaucuaaccgcccgaucguugauauaaacgugaaggacuacuccauuguaagcucguaugugugcucuggccuugucggugacacccccagaaagaaugauuccucaaguagcucccacuguuugaacccuaauaacgaggaagggggacauggcgugaaaggcugggcguucgacgaugggaaugacguuuggaugggacgaacgaucucugagaaauuuaggagcgguuacgagaccuucaaggugaucgaaggcuggucaaaaccaaacaguaagcugcagauuaauuccaagagcuga

SEQ ID NO: 142177 - RNA, 1416 nt, Artificial Sequence
  derived and/or modified CDS sequence (opt3) from neuraminidase__InfluenzaA__AAR11366
augaaccccaaucagaagcuguucgcccucagcggcguggcuaucgcacuuuccguccugaacuuguuaauugggauaucuaauguuggacugaacgugucacuacaccucaaagagaaggguccuaaacaagaagagaaucugaccugcacaacuaucaaccagaauaacacgaccguaguggaaaauacauacgucaacaauacuaccauuaucacaaagggcaccgaccuuaaaacuccaaguuaucuguugcucaacaagagccuguguaauguggagggguggguugugauugccaaggauaacgcggucagauuuggagaauccgagcagaucauagugacaagggagccguacguaucuugcgaccccaccggcuguaaaauguaugcucugcaucaggguacgacuauccggaauaagcacucgaacgggaccauucaugaucgcacagccuuccgaggacucaucucaacuccuuuaggcaccccacccacaguuagcaacagugacuuuaugugcgugggcugguccucuaccacgugucacgaugggauugcacguaugacuaucugcauacaaggaaauaacgacaaugccacagcuaccgucuacuauaacagaaggcugacuacaaccauuaaaacgugggcacggaauauccuucgcacccaggaaagcgagugugugugccauaacgguacaugugccguggucaugacugauggcuccgcuucaagucaggccuacaccaagguuauguauuuccacaaaggguuggugguaaaggaagaggagcugagaggaagcgcgaggcacauugaagagugcucuuguuacggccauaaucagaaggugacaugcgucugccgggacaacuggcaaggugcaaaucgcccuaucaucgaaauugauaugaacacucuagagcacaccucccgauacguguguacagggauacucaccgacacuucaagaccaggagauaaaagcaguggcgacugcucuaaucccaucacgggcuccccuggggccccaggaguuaaggguuuuggcuuccugaacggggauaauacauggcuuggaaggaccauuagcccgcggucgcguucuggcuuugaaaugcugaaaauccccaacgcugguacugacccuaauucccgcauagccgagagacaggagauuguggacaacaacaauuggucaggguauaguggcagcuucaucgauuacuggaacgacaauuccgaauguuauaacccaugcuuuuacgucgaguugaucaggggacggcccgaagaggcaaaguaugugugguggaccucuaauagccucauugcucuguguggcucaccuuucccaguagggcccggaaguuuuccggauggugcccagauccaguacuucuccuga

SEQ ID NO: 142178 - RNA, 1350 nt, Artificial Sequence
  derived and/or modified CDS sequence (opt3) from neuraminidase__InfluenzaA__AAS89005
augaaccccaauaagaaaaucauuaccauaggcagcaucugcauggugacagggauggucucccugaugcuccagauuggaaaccuuaucucuauuuggguuucacacaguauccauacugguaaucaacagaaggccgagccuauaagcaacacgaauuuccugaccgaaaaagcuguggcauccguaaaguuggccggcaacucuucguuauguccaaucaaugggugggcgguguacucaaaagacaacagcauuagaaucggaaguaagggcgaugucuuugugauuagggagccguucaucuccugcucucaccuggaaugucggacauuuuuccuaacucagggugcucuccugaaugacaagcauagcaacgggaccguuaaagaucgcagcccccaccgaacacuuaugucaugcccugugggagaggccccaagucccuauaauagccguuuugaaucugucgcaugguccgccucagcuugucaugacggcaccagcuggcugacuauaggcauuagugggccugauucuggagcaguggccguauugaaguacaacgguaucauuacagacaccaucaaauccuggagaaauaacauccucaggacgcaggagagcgagugcgcuuguguuaauggcucgugcuucacugugaugaccgaugggccaucuaacggacaagccucccacaagauuuuuaaaauggaaaagggcaaggucgugaaaucaguggagcuggacgcgcccaacuaucacuacgaagaguguaguugcuauccugaugccggugagauaacaugugucugccgggacaauuggcaugggagcaaccgcccauggguuuccuucaaucagaaccuggaauaccagaucggauauauuugcucuggcguguuuggcgauaauccgagacccaacgacgggacuggaagcugugguccuguaucaaguaauggcgcauacggggugaagggauucuccuuuaaauacggcaacggugucuggaucgggaggaccaagagcacaaauucucggucaggcuucgagaugauaugggauccaaacggauggauugaaaccgacaguagcuuuuccgugaaacaggacaucguugcuaucacggauuggucuggcuauucggggagcuucgugcaacaccccgagcucacuggauuagacugcauucgcccuuguuucugggucgaacugauccgagguagaccaaaggaguccacaauuuggaccucaggcaguucuauauccuuuugcgggguaaauuccgauacugugggauggucauggcccgacggcgccgagcuuccguucacaaucgauaaauga

SEQ ID NO: 142179 - RNA, 1350 nt, Artificial Sequence
  derived and/or modified CDS sequence (opt3) from neuraminidase__InfluenzaA__AAS89006
augaaccccaauaagaaaaucauuaccauaggcagcaucugcauggugacagggauggucucccugaugcuccagauuggaaaccuuaucucuauuuggguuucacacaguauccauacugguaaucaacacaaggccgagccuauaagcaacacgaauuuccugaccgaaaaagcuguggcauccguaaaguuggccggcaacucuucguuauguccaaucaaugggugggcgguguacucaaaagacaacagcauuagaaucggaaguaagggcgaugucuuugugauuagggagccguucaucuccugcucucaucuggaaugucggacauuuuuccuaacucagggugcucuccugaaugacaagcacagcaacgggaccguuaaagaucgcucaccccaucgaacacuuauguccugcccugugggagaggccccaagucccuauaauagccguuuugaaucugucgcaugguccgccucagcuugucacgacggcaccagcuggcugacuauaggcauuagugggccugauaacggagcaguggccguauugaaguacaaugguaucauuacagacaccaucaaaucuuggagaaacaauauccucaggacgcaggaguccgagugcgcuuguguuaacggcagcugcuucacugugaugaccgaugggccaucgaacggacaggccucucacaagauuuuuaaaauggaaaagggcaaggucgugaaauccguggagcuggacgcgcccaauuaucauuacgaagaguguucaugcuauccugaugccggugagauaacaugugucugccgggacaacuggcacgggaguaaucgcccauggguuagcuucaaccaaaaucuggaauaccagaucggauauauuugcuccggcguguuuggcgauaacccgagacccaaugacgggacuggaucuugugguccuguaagcucaaacggcgcauacggggugaagggauucaguuuuaaauacggcaauggugucuggaucgggaggaccaaguccacaaacagccggucuggcuucgagaugauaugggauccaaauggauggaccgaaacggacucaaguuuuagcgugaaacaggacauuguugcuaucacugauugguccggcuauucugggucguucgugcagcaucccgagcucacaggauuagacugcauccgcccuuguuucugggucgaacugauucgagguagaccaaaggagagcaccaucuggacuuccggcucaaguauuucuuuuugcggggugaacagcgauacaguaggaugguccuggcccgacggcgccgagcuuccguucaccauagauaaauga

SEQ ID NO: 142180 - RNA, 1410 nt, Artificial Sequence
  derived and/or modified CDS sequence (opt3) from neuraminidase__InfluenzaA__AAT38822
augaaccccaaucagaagaucauuaccauaggcguggucaacacaacucugagcacgaucgcccucuucauugggguuggaaaucuuguguuuaacaccguaauccacgagaaaauuggugaccaucaaaucgugacacacccuacuauaaugaccccagaagucccgaauugcuccgauacaaucauuaccuacaacaauacugugaucaacaauauuacaaccacgaucauaacugaggcugaaagacccuucaagucuccucugccauugugucccuuuaggggcuucuuuccuuuccauaaagacaacgcaauucgguuaggggagaauaaggauguuaucgugacccgcgaaccauaugucucaugcgacaacgauaauuguuggaguuuugcccuggcgcagggagcucuacucggcacaaaacacagcaacgguacuauuaaggaccgaacccccuaccguucccugaucagauucccuaucgggacagccccagugcuuggaaauuauaaggagauuugcauagcauggucuucgucaagcuguuuugauggcaaagaguggaugcauguaugcaugaccggcaacgacaacgaugccagugcucagaucauuuacgggggaaggaugacggacuccaucaagucuuggcggaaagauauacugcgcacucaggaaagcgagugucaaugcauugacgguacauguguuguggcagucaccgauggcccggccgcuaauuccgccgaccacagaguguauuggaucagggaagggcggaucauuaaguacgagaacgugcccaaaacuaagauccagcacuuggaggaaugcucauguuaugucgacauugauguuuacugcauaugccgcgacaauuggaagggaaguaaccgaccuuggaugagaaucaauaacgagacaauucucgaaaccggcuacguguguagcaaauuccauucugauacgccaaggcccgcggacccuuccaucaugucaugcgauagcccaaguaauguaaacggugggcccggagugaagggcuuuggcuucaaagcagggaaugacgucuggcugggacggaccgugucuacauccggucguagcggcuuugagaucauuaagguuacugaaggguggauaaacucgccgaaucacgugaaaucuaucacccagacacuggucuccaacaaugauuggucaggauauaguggcagcuucauugugaaggccaaagacuguuuccagccuugcuuuuacguagagcucauccgcgguagacccaacaagaaugaugacguuuccuggacuucuaacagcauugugaccuucuguggguuagauaacgagccaggcucaggaaauuggccugacggcaguaacaucggguuuaugcccaaguga

SEQ ID NO: 142181 - RNA, 1350 nt, Artificial Sequence; identical to SEQ ID NO: 142179
  derived and/or modified CDS sequence (opt3) from neuraminidase__InfluenzaA__AAV65827

SEQ ID NO: 142182 - RNA, 1410 nt, Artificial Sequence
  derived and/or modified CDS sequence (opt3) from neuraminidase__InfluenzaA__AAX11488
augaaccccaaucagaagaucauuaccauaggcagcgugucccugacaaucgccgcuauuugcuuccucaugcagaucgcaauucuugucacuacgguuacccugcacuuuaaacagcaugaguguaacucuccuccaaauaaccaggugauguugugcgaaccgacaaucauagagagaaauaucacugaaauuguauacuuaaccaacacaaccaucgagaaggaaauuugucccaaacuggccgaguauaggaauuggucaaagccucagugcaacaucacuggguucgcgccauuuaguaaagacaauagcauacggcuauccgcuggaggugauauuugggugacacgcgagcccuacgucucuugugacccugauaagugcuaucaauucgcccucggccaggggaccacgcugaacaauggacacucgaacgacacugugcaugaucgaaccccauaccguacacuucugaugaaugaauugggcguucccuuucaccucgguacuagacagguguguaucgcauggucaagcaguuccugccaugacgggaaggccuggcugcacgucugugugaccggagaugacaaaaacgcuacagcaucuuucauuuauaauggcaggcugguagauagcaucggcuccuggucaaagaaaauccuccggacccaggagagugaaugcguuuguauuaacgggacgugcacuguggucaugacagacggaagcgccucugguaaggcugauaccaaaauauuauuuaucgaggagggcaagauugugcacaucuccgcccugucagggagcgcgcaacauguggaagagugcaguuguuacccucgcuauccaggagucagaugcguuuguagggacaacuggaagggcucuaaucggccgauaguggauauuaacguaaaagacuacuccaucgugagcucguacgucugcucuggucuugugggggacacuccccgcaagaaugauuccuucucaaguagccacuguuuggacccuaacaaugaagagggaggccauggcguuaaagggugggcauuugaugacggaaacgauguguggaugggucgaacaaucuccgaaaagcugagaucuggcuaugagaccuucaaagucauugagggguggagcaagccaaauucaaaacuacagaucaacaggcaagugauuguagaacggggaaaucguaguggcuacuccgguauauuuagcguugaggggaagucuugcaucaaccgcuguuucuauguggaacucauuagaggcaggaaggaggaaacggaggucugguggaccucaaauaguaucguggucuuuugcggaacaagcggcacuuacgggaccggauccuggcccgacggugccgauaucaaccugaugccuauuuga

SEQ ID NO: 142183 - RNA, 1410 nt, Artificial Sequence
  derived and/or modified CDS sequence (opt3) from neuraminidase__InfluenzaA__AAX11508
augaaccccaaucagaagaucauuaccauaggcagcgugucccugacaaucgccacuauuugcuuccucaugcaaaucgcuauucuugucacgaccguuacacugcacuuuaaacagcaugaguguaacucuccuccaaauaaccaggugauguugugcgaaccgacuaucauagagagaaauaucaccgaaauuguauacuuaacaaacaccacuaucgagaaggaaauuugucccaaacuggcagaguauaggaauuggucaaagccucagugcaacaucacaggguucgccccauuuaguaaagacaauagcauacggcuauccgcgggaggugauauuugggugacccgcgagcccuacgucucuugugacccugauaagugcuaucaauucgcucucggccaggggacgacucugaacaauggacacucgaacaauaccgugcaugaccgaacaccauaccguacucuucugaugaacgaauugggcguucccuuucaccucgguaccagacagguguguaucgccuggucaagcaguuccugccaugaugggaaggcauggcugcacgucugugugacaggagacgauaaaaaugccaccgcuucuuucauuuauaacggcaggcugguagacagcaucggcuccuggucaaagaaaauccuccggacgcaggagagugaaugcguuuguauuaacgggacuugcacaguggucaugaccgauggaagcgcaucugguaaggccgacacuaaaauauuauuuaucgaggagggcaagauugugcacaucuccacacugucagggagcgcucaacauguggaagagugcaguuguuacccucgcuauccaggagucagaugcguuuguagggauaauuggaagggcucuaaccggccgauaguggacauuaauguaaaagauuacuccaucgugagcucguacgucugcucuggucuugugggggacacccccaggaagaacgacuccuucucaaguagccacuguuuggauccuaauaacgaagagggaggccauggcguuaaagggugggccuuugacgauggaaaugacguguggaugggucgaacgaucuccgaaaagcugagaucuggcuaugagaccuucaaagucauugagggguggagcaagccaaacucaaaacuacagaucaaucgccaggugauuguagaacggggaaaccguaguggcuacuccgguauauuuagcguugaggggaagucuugcaucaaucgcuguuucuauguggaacucauuagaggcaggaaggaggaaacagaggucugguggacuucaaacaguaucguggucuuuugcggaaccagcggcacauacgggacuggauccuggcccgauggugcggacaucaaucugaugccuauuuga

SEQ ID NO: 142184 - RNA, 1410 nt, Artificial Sequence
  derived and/or modified CDS sequence (opt3) from neuraminidase__InfluenzaA__AAX11538
augaaccccaaucagaagaucauuaccauaggcagcgugucccugacaaucgccacuauuugcuuccucaugcaaaucgcuauucuugucacgaccguuacacugcacuuuaaacagcaugaguguaacucuccuccaaauaaccaggugauguugugcgaaccgacuaucauagagagaaauaucaccgaaauuguauacuuaacaaacaccacuaucgagaaggaaauuugucccaaacuggcagaguauaggaauuggucaaagccucagugcaacaucacaggguucgccccauuuaguaaagacaauagcauacggcuauccgcgggaggugauauuugggugacccgcgagcccuacgucucuugugacccugauaagugcuaucaauucgcucucggccaggggacgacucugaacaauggacacucgaacgacaccgugcaugaacgaacaccauaccguacucuucugaugaaugaguugggcguucccuuucaccucgguaccagacagguguguaucgccuggucaagcaguuccugccaugaugggaaggcauggcugcacgucugugugacaggagacgauaaaaacgccaccgcuucuuucauuuauaauggcaggcugguagacagcaucggcuccuggucaaagaaaauccuccggacgcaggaaagugagugcguuuguauuaacgggacuugcacaguggucaugaccgauggaagcgcaucugguaaggccgacacuaaaauauuauuuaucgaggaaggcaagauugugcacaucuccacacugucagggagcgcucaacauguggaggaaugcaguuguuacccucgcuauccaggagucagaugcguuuguagggauaacuggaagggcucuaaucggccgauaguggacauuaacguaaaagauuacuccaucgugagcucguacgucugcucuggucuugugggggacacccccaggaagaaugacuccucaaguagcucccacuguuuggauccuaacaaugaggaaggaggccauggcguuaaagggugggccuucgacgauggaaacgacguguggaugggucgaacgaucucugagaagcugagaagcggcuaugagaccuuuaaagucauugaaggguggucaaagccaaauaguaaacuacagaucaaccgccaggugauuguagagcggggaaaucguuccggcuacagcgguauauucucuguugaagggaagucaugcaucaaccgcuguuuuuauguggagcucauuagaggcaggaaggaagagacagaggucugguggaccaguaauagcaucguggucuucugcggaacuuccggcacauacgggacuggaucuuggcccgauggugcggacaucaaccugaugccuauuuga

SEQ ID NO: 142185 - RNA, 1410 nt, Artificial Sequence
  derived and/or modified CDS sequence (opt3) from neuraminidase__InfluenzaA__AAX11548
augaaccccaaucagaagaucauuaccauaggcagcgugucccugacaaucgccacuauuugcuuccucaugcaaaucgcuauucuugucacgaccguuacacugcacuuuaaacagcaugaguguaacucuccuccaaauaaccaggugauguugugcgaaccgacuaucauagagagaaauaucaccgaaauuguauacuuaacaaacaccacuaucgagaaggaaauuugucccaaacuggcagaguauaggaauuggucaaagccucagugcaacaucacaggguucgccccauuuaguaaagacaauagcauacggcuauccgcgggaggugauauuugggugacccgcgagcccuacgucucuugugacccugauaagugcuaucaauucgcucucggccaggggacgacucugaacaauggacacucgaacgacaccgugcaugaucgaacaccauaccguacucuucugaugaaugaauugggcguucccuuucaccucgguaccagacagguguguaucgccuggucaagcaguuccugccaugacgggaaggcauggcugcacgucugugugacaggagaugacaaaaacgccaccgcuucuuucauuuauaauggcaggcugguagauagcaucggcuccuggucaaagaaaauccuccggacgcaggagagugaaugcguuuguauuaacgggacuugcacaguggucaugaccgacggaagcgcaucugguaaggccgauacuaaaauauuauuuaucgaggagggcaagauugugcacaucuccacacugucagggagcgcucaacauguggaagagugcaguuguuacccucgcuauccaggagucagaugcguuuguagggacaacuggaagggcucuaaucggccgauaguggauauuaacguaaaagacuacuccaucgugagcucguacgucugcucuggucuugugggggacacccccaggaagaaugauuccucaaguagcucccacuguuuggacccuaacaaugaagagggaggccauggcguuaaagggugggccuucgaugacggaaacgauguguggaugggucgaacgaucucugaaaagcugagaagcggcuaugagaccuuuaaagucauugagggguggucaaagccaaauaguaaacuacagaucaaccgccaggugauuguagaacggggaaaucguuccggcuacagcgguauauucucuguugaggggaagucaugcaucaaccgcuguuuuuauguggaacucauuagaggcaggaaggaggaaacagaggucugguggaccaguaauagcaucguggucuucugcggaacuuccggcacauacgggacuggaucuuggcccgacggugcggauaucaaccugaugccuauuuga

SEQ ID NO: 142186 - RNA, 1410 nt, Artificial Sequence; identical to SEQ ID NO: 142183
  derived and/or modified CDS sequence (opt3) from neuraminidase__InfluenzaA__AAX11558

SEQ ID NO: 142187 - RNA, 1410 nt, Artificial Sequence
  derived and/or modified CDS sequence (opt3) from neuraminidase__InfluenzaA__AAX11568
augaaccccaaucagaagaucauuaccauaggcagcgugucccugacaaucgccacuauuugcuuccucaugcaaaucgcuauucuugucacgaccguuacacugcacuuuaaacagcaugaguguuacucuccuccaaacaaucaggugauguugugcgaaccgacuaucauagagagaaacaucaccgaaauuguauauuuaacaaauaccacuaucgagaaggaaauuugucccaaacuggcagaguacaggaacuggucaaagccucagugcaauaucacaggguucgccccauuuaguaaagacaacagcauacggcuauccgcgggaggugauauuugggugacccgcgagcccuaugucucuugugacccugauaagugcuaccaauucgcucucggccaggggacgacucugaauaacggacacucgaaugacaccgugcaugaucgaacaccauaucguacucuucugaugaacgaauugggcguucccuuucaccucgguaccagacagguguguaucgccuggucaagcaguuccugccaugacgggaaggcauggcugcacgucugugugacaggagaugacaaaaaugccaccgcuucuuucauuuacaacggcaggcugguagauagcaucggcuccuggucaaagaaaauccuccggacgcaggagagugaaugcguuuguauuaaugggacuugcacaguggucaugaccgacggaagcgcaucugguaaggccgauacuaaaauauuauuuaucgaggagggcaagauugugcacaucuccacacugucagggagcgcucaacauguggaagagugcaguuguuauccucgcuacccaggagucagaugcguuuguagggacaacuggaagggcucuaaccggccgauaguggauauuaauguaaaagacuacuccaucgugagcucguaugucugcucuggucuugugggggacacccccaggaagaacgauuccuucucaaguagccacuguuuggacccuaauaacgaagagggaggccauggcguuaaagggugggccuuugaugacggaaaugauguguggaugggucgaacgaucuccgaaaagcugagaucuggcuacgagaccuucaaagucauugagggguggagcaagccaaacucaaaacuacagaucaaucgccaggugauuguagaacggggaaaccguaguggcuauuccgguauauuuagcguugaggggaagucuugcaucaaucgcuguuucuacguggaacucauuagaggcaggaaggaggaaacagaggucugguggacuucaaacaguaucguggucuuuugcggaaccagcggcacauaugggacuggauccuggcccgacggugcggauaucaaucugaugccuauuuga

SEQ ID NO: 142188 - RNA, 1410 nt, Artificial Sequence; identical to SEQ ID NO: 142183
  derived and/or modified CDS sequence (opt3) from neuraminidase__InfluenzaA__AAX11578

SEQ ID NO: 142189 - RNA, 1410 nt, Artificial Sequence
  derived and/or modified CDS sequence (opt3) from neuraminidase__InfluenzaA__AAX11588
augaaccccaaucagaagaucauuaccauaggcagcgugucccugacaaucgccgcuauuugcuuccucaugcaaaucgcaauucuugucacuacgguuacccugcacuuuaaacagcaugaguguaacucuccuccaaauaaccaggugauguugugcgaaccgacaaucauagagagaaauaucacugaaauuguauacuuaaccaacacaaccaucgagaaggaaauuugucccaaacuggccgaguauaggaauuggucaaagccucagugcaacaucacuggguucgcgccauuuaguaaagacaauagcauacggcuauccgcuggaggugauauuugggugacacgcgagcccuacgucucuugugacccugauaagugcuaucaauucgcccucggccaggggaccacgcugaacaauggacacucgaacgacacugugcaugaucgaaccccauaccguacacuucugaugaaugaauugggcguucccuuucaccucgguacuagacagguguguaucgcauggucaagcaguuccugccaugacgggaaggccuggcugcacgucugugugaccggagaugacaaaaacgcuacagcaucuuucauuuauaauggcaggcugguagauagcaucggcuccuggucaaagaaaauccuccggacccaggagagugaaugcauuuguauaaacgggacgugcacuguugugaugacagacggaagcgccucugguaaggcugauaccaaaaucuuauuuauugaggagggcaagaucguccacauauccacucugucagggagcgcccaacauguggaagagugcaguuguuacccucgcuauccaggagugagaugcgucuguagggacaacuggaagggcucuaaucggccgauuguugauaucaacgugaaagacuacuccaucguaagcucguacgugugcucuggucuugucggggacacaccccgcaagaaugauuccuucucaaguagccacuguuuggacccuaacaaugaagagggaggccauggcgugaaagggugggcguuugaugacggaaacgauguuuggaugggucgaaccauuuccgaaaagcugagaucuggcuaugagacguucaaagugaucgagggguggagcaagccaaauucaaaacuacagauuaacaggcaggucauaguggaacggggaaaucguaguggcuacuccgguaucuuuagcguagaggggaagucuugcauuaaccgcuguuucuauguugaacucaucagaggcaggaaggagaaaaccgaagugugguggacaucaaauaguaucgucguguuuugcggaacuagcggcaccuacgggacaggauccuggcccgacggugcagauauuaaccugaugccuauauga

SEQ ID NO: 142190 - RNA, 1410 nt, Artificial Sequence; identical to SEQ ID NO: 142185
  derived and/or modified CDS sequence (opt3) from neuraminidase__InfluenzaA__AAX11598

SEQ ID NO: 142191 - RNA, 1410 nt, Artificial Sequence; identical to SEQ ID NO: 142185
  derived and/or modified CDS sequence (opt3) from neuraminidase__InfluenzaA__AAX11608

SEQ ID NO: 142192 - RNA, 1410 nt, Artificial Sequence
  derived and/or modified CDS sequence (opt3) from neuraminidase__InfluenzaA__AAX11618
augaaccccaaucagaagaucauuaccauaggcagcgugucccugacaaucgccacuauuugcuuccucaugcagaucgcuauucuugucacgaccguuacacugcacuuuaaacagcaugaguguaacucuccuccaaauaaccaggugauguugugcgaaccgacuaucauagagagaaauaucaccgaaauuguauacuuaacaaacaccacuaucgagaaggaaauuugucccaaacuggcagaguauaggaauuggucaaagccucagugcaacaucacaggguucgccccauuuaguaaagacaauagcauacggcuauccgcgggaggugauauuugggugacccgcgagcccuacgucucuugugacccugauaagugcuaucaauucgcucucggccaggggacgacucugaacaauggacacucgaacgacaccgugcaugaucgaacaccauaccguacucuucugaugaaugaauugggcguucccuuucaccucgguaccagacagguguguaucgccuggucaagcaguuccugccaugacgggaaggcauggcugcacgucugugugacaggagaugacaaaaacgccaccgcuucuuucauuuauaauggcaggcugguagauagcaucggcuccuggucaaagaaaauccuccggacgcaggagagugaaugcguuuguauuaacgggacuugcacaguggucaugaccgacggaagcgcaucugguaaggccgauacuaaaauauuauuuaucgaggagggcaagauugugcacaucuccgcucugucagggagcgcccaacauguggaagagugcaguuguuacccucgcuauccaggagucagaugcguuuguagggacaacuggaagggcucuaaucggccgauaguggauauuaacguaaaagacuacuccaucgugagcucguacgucugcucuggucuugugggggacacaccccgcaagaaugauuccucaaguagcucccacuguuuggacccuaacaaugaagagggaggccauggcguuaaagggugggcguucgaugacggaaacgauguguggaugggucgaaccaucucugaaaagcugagaagcggcuaugagacguuuaaagucauugagggguggucaaagccaaauaguaaacuacagaucaacaggcaagugauuguagaacggggaaaucguuccggcuacagcgguauauucucuguugaggggaagucaugcaucaaccgcuguuuuuauguggaacucauuagaggcaggaaggaggaaaccgaggucugguggacaaguaauagcaucguggucuucugcggaacuuccggcaccuacgggacaggaucuuggcccgacggugcagauaucaaccugaugccuauuuga

SEQ ID NO: 142193 - RNA, 1410 nt, Artificial Sequence
  derived and/or modified CDS sequence (opt3) from neuraminidase__InfluenzaA__AAX12744
augaaccccaaucagaagaucauuaccauaggcagcgugucccugacaaucgccacuauuugcuuccucaugcaaaucgcuauucuugucacgaccguuacacugcacuuuaaacagcaugaguguaacucuccuccaaauaaccaggugauguugugcgaaccgacuaucauagagagaaauaucaccgaaauuguauacuuaacaaacaccacuaucgagaaggaaauuugucccaaacuggcagaguauaggaauuggucaaagccucagugcaacaucacaggguucgccccauuuaguaaagacaauagcauacggcuauccgcgggaggugauauuugggugacccgcgagcccuacgucucuugugacccugauaagugcuaucaauucgcucucggccaggggacgacucugaacaauggacacucgaacgacaccgugcaugaucgaacaccauaccguacucuucugaugaaugaauugggcguucccuuucaccucgguaccagacagguguguaucgccuggucaagcaguuccugccaugacgggaaggcauggcugcacgucugugugacaggagaugacaaaaacgccaccgcuucuuucauuuauaauggcaggcugguagauagcaucggcuccuggucaaagaaaauccuccggacgcaggagagugaaugcguuuguauuaacgggacuugcacaguggucaugaccgacggaagcgcaucugguaaggccgauacuaaaauauuauuuaucgaggagggcaagauugugcacaucuccacacugucagggagcgcucaacauguggaagagugcaguuguuacccucgcuauccaggagucagaugcguuuguagggacaacuggaagggcucuaaucggccgauaguggauauuaacguaaaagacuacuccaucgugagcucguacgucugcucuggucuugugggggacacccccaggaagaaugauuccuucucaaguagccacuguuuggacccuaacaaugaagagggaggccauggcguuaaagggugggccuuugaugacggaaacgauguguggaugggucgaacgaucuccgaaaagcugagaucuggcuaugagaccuucaaagucauugagggguggagcaagccaaauucaaaacuacagaucaaccgccaggugauuguagaacggggaaaucguaguggcuacuccgguauauuuagcguugaggggaagucuugcaucaaccgcuguuucuauguggaacucauuagaggcaggaaggaggaaacagaggucugguggacuucaaauaguaucguggucuuuugcggaaccagcggcacauacgggacuggauccuggcccgacggugcggauaucaaccugaugccuauuuga

SEQ ID NO: 142194 - RNA, 1410 nt, Artificial Sequence; identical to SEQ ID NO: 142185
  derived and/or modified CDS sequence (opt3) from neuraminidase__InfluenzaA__AAX12754

SEQ ID NO: 142195 - RNA, 1410 nt, Artificial Sequence
  derived and/or modified CDS sequence (opt3) from neuraminidase__InfluenzaA__AAX12774
augaaccccaaucagaagaucauuaccauaggcagcgugucccugacaaucgccacuauuugcuuccucaugcagaucgcuauucuugucacgaccguuacacugcacuuuaaacaguacgaguguaacucuccuccaaauaaccaggugauguugugcgaaccggcaaucauagagagaaauaucacugaaauuguauauuuaaccaacacaaccaucgagaaggaaauuugucccaaacuggccgaguacaggaauuggucaaagccucagugcaacaucacuggguucgcgccauuuaguaaagacaauagcauacggcuauccgcuggaggugauauuugggugacacgcgagcccuaugucucuugugacccugauaagugcuaccaauucgcccucggccaggggaccacgcugaacaauggacauucgaacgacacugugcacgaucgaaccccauaucguacacuucugaugaaugaauugggcguucccuuucaucucgguacuagacagguguguaucgcauggucaagcaguuccugccacgacgggaaggccuggcugcaugucugugugaccggagaugacaaaaacgcuacagcaucuuucauuuacaauggcaggcugguagauagcaucggcuccuggucaaagaaaauccuccggacccaggagagugaaugcguuuguauuaacgggacgugcacuguggucaugacagacggaagcgccucugguaaggcugauaccaaaauauuauuuaucgaggagggcaagauugugaacaucuccacucugucagggagcgcccaacacguggaagagugcaguuguuauccucgcuacccaggagucagaugcguuuguagggacaauuggaagggcucuaaccggccgauaguggauauuaauguaaaagacuacuccaucgugagcucguaugucugcucuggucuugugggggacacaccccgcaagaacgauuccuucucaaguagccacuguuuggacccuaauaacgaagagggaggccauggcguuaaagggugggcguuugaugacggaaaugauguguggaugggucgaaccaucuccgaaaagcugagaucuggcuacgagacguucaaagucauugagggguggagcaagccaaacucaaaacuacagaucaauaggcaagugauuguagaacggggaaaccguaguggcuauuccgguauauuuagcguugaggggaagucuugcaucaaucgcuguuucuacguggaacucauuagaggcaggaaggaggaaaccgaggucugguggacaucaaacaguaucguggucuuuugcggaacuagcggcaccuaugggacaggauccuggcccgacggugcagauaucaaucugaugccuauuuga

SEQ ID NO: 142196 - RNA, 1410 nt, Artificial Sequence
  derived and/or modified CDS sequence (opt3) from neuraminidase__InfluenzaA__AAX12804
augaaccccaaucagaagaucauuaccauaggcagcgugucccugacaaucgccacuauuugcuuccucaugcaaaucgcuauucuugucacgaccguuacacugcacuuuaaacaguacgaguguaacucuccuccaaauaaccaggugauguugugcgaaccgacuaucauagagagaaauaucaccgaaauuguauauuuaacaaacaccacuaucgagaaggaaauuugucccaaacuggcagaguacaggaauuggucaaagccucagugcaacaucacaggguucgccccauuuaguaaagacaauagcauacggcuauccgcgggaggugauauuugggugacccgcgagcccuaugucucuugugacccugauaagugcuaccaauucgcucucggccaggggacgacucugaacaauggacauucgaacgacaccgugcacgaucgaacaccauaucguacucuucugaugaaugaauugggcguucccuuucaucucgguaccagacagguguguaucgccuggucaagcaguuccugccacgacgggaaggcauggcugcaugucugugugacaggagaugacgagaacgccaccgcuucuuucauuuacaauggcaggcugguagauagcaucggcuccuggaguaaaaagauccuccggacgcaggaaucagagugcguuuguauuaacgggacuugcacaguggucaugaccgacggaagcgcaucugguaaagccgauacuaagauauuauuuaucgaggaaggcaaaauugugcacaucuccacacugucagggagcgcucaacacguggaggaaugcaguuguuauccucgcuacccaggagucagaugcguuuguagggacaacuggaagggcucuaaucggccgauaguggauauuaacguaaaggacuacuccaucgugagcucguaugucugcucuggucuugugggggacacccccaggaaaaaugauaacuucuccucaagucauuguuuggacccuaauaacgaggaaggaggccacggcguuaaggggugggccuuugaugacggaaaugauguguggaugggucgaacgaucagcgagaaacugagauccggcuacgagaccuucaaggucauugaaggguggucuaaaccaaacagcaagcuacagacaaaucgccaggugaucguagagcggggaaaccguucaggcuauagugguauauuuuccguugaagggaaaagcugcauuaaucgcuguuucuacguggagcucaucagaggcaggaaggaagagacugaggucugguggaccucuaacucaauuguggucuuuugcggaacaaguggcacuuaugggaccggaagcuggcccgacggugcggauaucaaucugaugccuaucuga

SEQ ID NO: 142197 - RNA, 1410 nt, Artificial Sequence
  derived and/or modified CDS sequence (opt3) from neuraminidase__InfluenzaA__AAX12814
augaaccccaaucagaagaucauuaccauaggcagcgugucccugacaaucgccacuauuugcuuccucaugcagaucgcuauucuugucacgaccguuacacugcacuuuaaacaguacgaguguaacucuccuccaaauaaccaggugauguugugcgaaccggcaaucauagagagaaauaucacugaaauuguauauuuaaccaacacaaccaucgagaaggaaauuugucccaaacuggccgaguacaggaauuggucaaagccucagugcaacaucacuggguucgcgccauuuaguaaagacaauagcauacggcuauccgcuggaggugauauuugggugacacgcgagcccuaugucucuugugacccugauaagugcuaccaauucgcccucggccaggggaccacgcugaacaauggacauucgaacgacacugugcacgaucgaaccccauaucguacacuucugaugaaugaauugggcguucccuuucaucucgguacuagacagguguguaucgcauggucaagcaguuccugccacgacgggaaggccuggcugcaugucugugugaccggagaugacgagaacgcuacagcaucuuucauuuacaauggcaggcugguagauagcaucggcuccuggaguaaaaagauccuccggacccaggaaucagagugcguuuguauuaacgggacgugcacuguggucaugacagacggaagcgccucugguaaagcugauaccaagauauuauuuaucgaggaaggcaaaauugugaacaucuccacucugucagggagcgcccaacacguggaggaaugcaguuguuauccucgcuacccaggagucagaugcguuuguagggacaauuggaagggcucuaaccggccgauaguggauauuaauguaaaggacuacuccaucgugagcucguaugucugcucuggucuugugggggacacaccccgcaaaaacgauuccuucucaaguagccacuguuuggacccuaauaacgaggaaggaggccauggcguuaaggggugggcguuugaugacggaaaugauguguggaugggucgaaccaucuccgagaaacugagaucuggcuacgagacguucaaggucauugaaggguggagcaaaccaaacucaaagcuacagaucaauaggcaagugauuguagagcggggaaaccguaguggcuauuccgguauauuuagcguugaagggaaaucuugcaucaaucgcuguuucuacguggagcucauuagaggcaggaaggaagagaccgaggucugguggacaucaaacaguaucguggucuuuugcggaacuagcggcaccuaugggacaggauccuggcccgacggugcagauaucaaucugaugccuauuuga

SEQ ID NO: 142198 - RNA, 1410 nt, Artificial Sequence
  derived and/or modified CDS sequence (opt3) from neuraminidase__InfluenzaA__AAX34064
augaaccccaaucagaagaucauuaccauaggcagcgugucccugacaaucgccacuauuugcuuccucaugcaaaucgcuauucuugucacgaccguuacacugcacuuuaaacagcaugaguguaacucuccuccaaauaaccaggugauguugugcgaaccgacuaucauagagagaaauaucaccgaaauuguauacuuaacaaacaccacuaucgagagggaaauuugucccaagcuggcagaguaucggaauuggucaaaaccucagugcaacaucacaggguucgccccauuuaguaaggacaauagcauacgccuauccgcgggaggugauauuugggugacccgagagcccuacgucucuugugacccugauaaaugcuaucaauucgcucucggccaggggacgacucugaacaauggacacucgaacgacaccgugcaugaucguacaccauacagaacucuucugaugaaugaauugggcguucccuuucaccucgguacccgacagguguguaucgccuggucaagcaguuccugccaugacgggaaggcauggcugcacgucugugugacaggagaugacaagaacgccaccgcuucuuucauuuauaauggccggcugguagauagcaucggcuccuggaguaaaaagauccuccgcacgcaggagagugaaugcguuuguauuaacgggacuugcacaguggucaugaccgacggaagcgcaucugguaaagccgauacuaagauauuauuuaucgaggagggcaaaauugugcacaucuccacacugucagggagcgcucaacauguggaagagugcaguuguuacccuagauauccaggagucaggugcguuugucgggacaacuggaagggcucuaaucgcccgauaguggauauuaacguaaaggacuacuccaucgugagcucguacgucugcucuggucuugugggggacacccccaggaaaaaugauuccucaaguagcucccacuguuuggacccuaacaaugaagagggaggccauggcguuaaggggugggccuucgaugacggaaacgauguguggauggguagaacgaucucugaaaaacugaggagcggcuaugagaccuuuaaggucauugagggguggucaaaaccaaauaguaagcuacagaucaaccgucaggugauuguagaacggggaaaucgcuccggcuacagcgguauauucucuguugaggggaaaucaugcaucaacagauguuuuuauguggaacucauuaggggccggaaggaggaaacagaggucugguggacuucaaauagcaucguggucuucugcggaaccuccggcacauacgggacuggaucuuggcccgacggugcggauaucaaccugaugccuauuuga

SEQ ID NO: 142199 - RNA, 1410 nt, Artificial Sequence
  derived and/or modified CDS sequence (opt3) from neuraminidase__InfluenzaA__AAX35824
augaaccccaaucagaagaucauuaccauaggcagcgugucccugacaaucgccacuauuugcuuccucaugcaaaucgcuauucuugucacgaccguuacacugcacuuuaaacaguacgaguguaacucuccuccaaauaaccaggugauguugugcgaaccgacuaucauagagagaaauaucaccgaaauuguauauuuagcaaacacaaccaucgagaaggaaauuugucccaaacuggccgaguacaggaauuggucaaagccucagugcaacaucacuggguucgcgccauuuaguaaagacaauagcauacggcuauccgcuggaggugauauuugggugacacgcgagcccuaugucucuugugacccugauaagugcuaccaauucgcccucggccaggggaccacgcugaacaauggacauucgaacgacacugugcacgaucgaaccccauaucguacacuucugaugaaugaauugggcguucccuuucaucucgguacuagacagguguguaucgcauggucaagcaguuccugccacgacgggaaggccuggcugcaugucugugugaccggagaugacaaaaacgcuacagcaucuuucauuuacaauggcaggcugguagauagcaucggcuccuggucaaagaaaauccuccggacccaggagagugaaugcguuuguauuaacgggacgugcacuguggucaugacagacggaagcgccucugguaaggcugauaccaaaauauuauuuaucgaggagggcaagauuauccacauauccacucugucagggagcgcccaacacguggaagagugcaguuguuauccucgcuacccaggagugagaugcgucuguagggacaacuggaagggcucuaaucggccgauuguugauaucaacgugaaagacuacuccaucguaagcucguaugugugcucuggucuugucggggacacaccccgcaagaaugauuccucaaguagcucccauuguuuggacccuaacaaugaagagggaggccacggcgugaaagggugggcguucgaugacggaaacgauguuuggaugggucgaaccauuucugaaaagcugagaagcggcuacgagacguuuaaagugaucgagggguggucaaagccaaauaguaaacuacagauuaacaggcaggucauaguggaacggggaaaucguuccggcuauagcgguaucuucucuguagaggggaagucaugcauuaaccgcuguuuuuacguugaacucaucagaggcaggaaggaggaaaccgaggugugguggacaaguaauagcaucgucguguucugcggaacuuccggcaccuaugggacaggaucuuggcccgacggugcagauauuaaccugaugccuauauga

SEQ ID NO: 142200 - RNA, 1410 nt, Artificial Sequence; identical to SEQ ID NO: 142183
  derived and/or modified CDS sequence (opt3) from neuraminidase__InfluenzaA__AAX35834

SEQ ID NO: 142201 - RNA, 1410 nt, Artificial Sequence
  derived and/or modified CDS sequence (opt3) from neuraminidase__InfluenzaA__AAX35844
augaaccccaaucagaagaucauuaccauaggcagcgugucccugacaaucgccacuauuugcuuccucaugcaaaucgcuauucuugucacgaccguuacacugcacuuuaaacaguacgaguguaacucuccuccaaauaaccaggugauguugugcgaaccgacuaucauagagagaaauaucaccgaaauuguauauuuaacaaacaccacuaucgagaaggaaauuugucccaaacuggcagaguacaggaauuggucaaagccucagugcaacaucacaggguucgccccauuuaguaaagacaauagcauacggcuauccgcgggaggugauauuugggugacccgcgagcccuaugucucuugugacccugauaagugcuaccaauucgcucucggccaggggacgacucugaacaauggacauucgaacgacaccgugcacgaucgaacaccauaucguacucuucugaugaaugaauugggcguucccuuucaucucgguaccagacagguguguaucgccuggucaagcaguuccugccacgacgggaaggcauggcugcaugucugugugacaggagaugacgagaacgccaccgcuucuuucauuuacaauggcaggcugguagauagcaucggcuccuggaguaaaaagauccuccggacgcaggaaucagagugcguuuguauuaacgggacuugcacaguggucaugaccgacggaagcgcaucugguaaagccgauacuaagauauuauuuaucgaggaaggcaaaauugugcacaucuccacacugucagggagcgcucaacacguggaggaaugcaguuguuauccucgcuacccaggagucagaugcguuuguagggacaacuggaagggcucuaaucggccgauaguggauauuaacguaaaggacuacuccaucgugagcucguaugucugcucuggucuugugggggacacccccaggaaaaaugauuccuucucaaacagucauuguuuggacccuaauaacgaggaaggaggccacggcguuaaggggugggccuuugaugacggaaaugauguguggaugggucgaacgaucagcgagaaacugagauccggcuacgagaccuucaaggucauugaagggugguuuaaaccaaacucuaagcuacagaucaaucgccaggugauuguagagcggggaaaccguagcggcuauucagguauauucaguguugaagggaaauccugcaucaaucgcuguuuuuacguggagcucauuagaggcaggaaggaagagacagaggucugguggacuagcaacucuaucguggucuucugcggaaccucaggcacauaugggacuggaaguuggcccgacggugcggauaucaaucugaugccuauuuga

SEQ ID NO: 142202 - RNA, 1410 nt, Artificial Sequence
  derived and/or modified CDS sequence (opt3) from neuraminidase__InfluenzaA__AAX35854
augaaccccaaucagaagaucauuaccauaggcagcgugucccugacaaucgccacuauuugcuuccucaugcaaaucgcuauucuugucacgaccguuacacugcacuuuaaacaguacgaguguaacucuccuccaaauaaccaggugauguugugcgaaccgacuaucauagagagaaauaucaccgaaauuguauauuuaacaaacaccacuaucgagaaggaaauuugucccaaacuggcagaguacaggaauuggucaaagccucagugcaacaucacaggguucgccccauuuaguaaagacaauagcauacggcuauccgcgggaggugauauuugggugacccgcgagcccuaugucucuugugacccugauaagugcuaccaauucgcucucggccaggggacgacucugaacaauggacauucgaacgacaccgugcacgaucgaacaccauaucguacucuucugaugaaugaauugggcguucccuuucaucucgguaccagacagguguguaucgccuggucaagcaguuccugccacgacgggaaggcauggcugcaugucugugugacaggagaugacgagaacgccaccgcuucuuucauuuacaauggcaggcugguagauagcaucggcuccuggaguaaaaagauccuccggacgcaggaaucagagugcguuuguauuaacgggacuugcacaguggucaugaccgacggaagcgcaucugguaaagccgauacuaagauauuauuuaucgaggaaggcaaaauugugcacaucuccacacugucagggagcgcucaacacguggaggaaugcaguuguuauccucgcuacccaggagucagaugcguuuguagggacaacuggaagggcucuaaucggccgauaguggauauuaacguaaaggacuacuccaucgugagcucguaugucugcucuggucuugugggggacacccccaggaaaaaugauuccuucucaaguagccauuguuuggacccuaacaaugaggaaggaggccacggcguuaaggggugggccuuugaugacggaaacgauguguggaugggucgaacgaucuccgagaaacugagaucuggcuacgagaccuucaaggucauugaaggguggagcaaaccaaauucaaagcuacagaucaaccgccaggugauuguagagcggggaaaucguaguggcuauuccgguauauuuagcguugaagggaaaucuugcaucaaccgcuguuucuacguggagcucauuagaggcaggaaggaagagacagaggucugguggacuucaaauaguaucguggucuuuugcggaaccagcggcacauaugggacuggauccuggcccgacggugcggauaucaaccugaugccuauuuga

SEQ ID NO: 142203 - RNA, 1410 nt, Artificial Sequence
  derived and/or modified CDS sequence (opt3) from neuraminidase__InfluenzaA__AAX35864
augaaccccaaucagaagaucauuaccauaggcagcgugucccugacaaucgccacuauuugcuuccucaugcagaucgcuauucuugucacgaccguuacacugcacuuuaaacaguacgaguguaacucuccuccaaauaaccaggugauguugugcgaaccggcaaucauagagagaaauaucacugaaauuguauauuuaaccaacacaaccaucgagaaggaaauuugucccaaacuggccgaguacaggaauuggucaaagccucagugcaacaucacuggguucgcgccauuuaguaaagacaauagcauacggcuauccgcuggaggugauauuugggugacacgcgagcccuaugucucuugugacccugauaagugcuaccaauucgcccucggccaggggaccacgcugaacaauggacauucgaacgacacugugcacgaucgaaccccauaucguacacuucugaugaaugaauugggcguucccuuucaucucgguacuagacagguguguaucgcauggucaagcaguuccugccacgacgggaaggccuggcugcaugucugugugaccggagaugacgagaacgcuacagcaucuuucauuuacaauggcaggcugguagauagcaucggcuccuggaguaaaaacauccuccggacccaggaaucagagugcguuuguauuaacgggacgugcacuguggucaugacagacggaagcgccucugguaaggcugauaccaaaauauuauuuaucgaggaaggcaagauugugaauaucuccacucugucagggagcgcccaacacguggaggaaugcaguuguuauccucgcuacccaggagucagaugcguuuguagggacaacuggaaaggcucuaaucggccgauaguggauauuaacguaaaggacuacuccaucgugagcucguaugucugcucuggucuugugggggacacaccccgcaagaaugauuccuucucaaguagccacuguuuggacccuaacaaugaggaaggaggccauggcguuaaagggugggcguuugaugacggaaacgauguguggaugggucgaaccaucuccgagaagcugagaucuggcuacgagacguucaaagucauugaaggguggagcaagccaaauucaaaacuacagaucaacaggcaagugauuguagagcggggaaaucguaguggcuauuccgguauauuuagcguugaagggaagucuugcaucaaccgcuguuucuacguggagcucauuagaggcaggaaagaagagaccgaggucugguggacaucaaauaguaucguggucuuuugcggaacuagcggcaccuaugggacaggauccuggcccgacggugcagauaucaaccugaugccuauuuga

SEQ ID NO: 142204 - RNA, 1410 nt, Artificial Sequence
  derived and/or modified CDS sequence (opt3) from neuraminidase__InfluenzaA__AAX47538
augaaccccaaucagaagaucauuaccauaggcagcgugucccugacaaucgccacuauuugcuuccucaugcagaucgcuauucuugucacgaccguuacacugcacuuuaaacaguacgaguguaacucuccuccaaauaaccaggugauguugugcgaaccggcaaucauagagagaaauaucacugaaauuguauauuuaaccaacacaaccaucgaggaagagauuugucccaagcuggccgaguacaggaauuggucaaaaccucagugcaacaucacuggguucgcgccauuuaguaaggacaauagcauacggcuauccgcuggaggugauauuugggugacacgcgaacccuaugucucuugugacccugauaaaugcuaccaauucgcccucggccaggggaccacgcugaacaauggacauucgaacgacacugugcacgaucgaaccccauaucguacacuucugaugaaugaguugggcguucccuuucaucucgguacuagacagguguguaucgcauggucaagcaguuccugccacgacgggaaggccuggcugcaugucugugugaccggagaugacaagaacgcuacagcaucuuucauuuacaauggcaggcugguagauagcaucggcuccuggaguaaaaagauccuccggacccaggaaucagagugcguuuguauuaacgggacgugcacuguggucaugacagacggaagcgccucugguaaagcugauaccaagauauuauuuaucgaggaaggcaaaauugugaacaucuccacucugucagggagcgcccaacacguggaggaaugcaguuguuauccucgcuacccaggagucagaugcguuuguagggacaauuggaagggcucuaaccggccgauaguggauauuaauguaaaggacuacuccaucgugagcucguaugucugcucuggucuugugggggacacaccccgcaaaaacgauuccuucucaaguagccacuguuuggacccuaauaacgaggaaggaggccauggcguuaaggggugggcguuugaugacggaaaugauguguggaugggucgaaccaucuccgagaaacugagaucuggcuacgagacguucaaggucauugaaggguggagcaaaccaaacucaaagcuacagaucaauaggcaagugauuguagagcggggaaaccguaguggcuauuccgguauauuuagcguugaagggaaaucuugcaucaaucgcuguuucuacguggagcucauuagaggcaggaaggaagagaccgaggucugguggacaucaaacaguaucguggucuuuugcggaacuagcggcaccuaugggacaggauccuggcccgacggugcagauaucaaucugaugccuauuuga

SEQ ID NO: 142205 - RNA, 1410 nt, Artificial Sequence; identical to SEQ ID NO: 142183
  derived and/or modified CDS sequence (opt3) from neuraminidase__InfluenzaA__AAX56383

SEQ ID NO: 142206 - RNA, 1410 nt, Artificial Sequence
  derived and/or modified CDS sequence (opt3) from neuraminidase__InfluenzaA__AAX56393
augaaccccaaucagaagaucauuaccauaggcagcgugucccugacaaucgccacuauuugcuuccucaugcaaaucgcuauucuugucacgaccguuacacugcacuuuaaacagcaugaguguaacucuccuccaaauaaccaggugauguugugcgaaccgacuaucauagagagaaauaucaccgaaauuguauacuuaacaaacaccacuaucgagaaggaaauuugucccaaacuggcagaguauaggaauuggucaaagccucagugcaacaucacaggguucgccccauuuaguaaagacaauagcauacggcuauccgcgggaggugauauuugggugacccgcgagcccuacgucucuugugacccugauaagugcuaucaauucgcucucggcaaggggacgacucugaacaauggacacucgaacaauaccgugcaugaccgaacaccauaccguacucuucugaugaacgaauugggcguucccuuucaccucgguaccagacagguguguaucgccuggucaagcaguuccugccaugaugggaaagcauggcugcacgucugugugacaggagacgauaagaaugccaccgcuucuuucauuuauaacggcaggcugguagacagcaucggcuccuggaguaaaaagauccuccggacgcaggagucagaaugcguuuguauuaacgggacuugcacaguggucaugaccgauggaagcgcaucugguaaagccgacacuaagauauuauuuaucgaggagggcaagauugugcacaucuccacacugucagggagcgcucagcauguggaagagugcaguuguuacccucgcuauccaggagucagaugcguuuguagggauaauuggaaaggcucuaaccggccgauaguggacauuaauguaaaggauuacuccaucgugagcucguacgucugcucuggucuugugggggacacccccaggaaaaacgacuccuucucaaguagccacuguuuggauccuaauaacgaagagggaggccauggcguuaaggggugggccuuugacgauggaaaugacguguggaugggucgaacgaucuccgaaaaacugagaucuggcuaugagaccuucaaggucauugagggguggagcaaaccaaacucaaagcuacaaaucaaucgccaggugauuguagaacggggaaaccguaguggcuacuccgguauauuuagcguugaggggaagucuugcaucaaucgcuguuucuauguggaacucauuagaggcaggaaagaggaaacagaggucugguggacuucaaacaguaucguggucuuuugcggaaccagcggcacauacgggacuggauccuggcccgauggugcggacaucaaucugaugccuauuuga

SEQ ID NO: 142207 - RNA, 1410 nt, Artificial Sequence; identical to SEQ ID NO: 142183
  derived and/or modified CDS sequence (opt3) from neuraminidase__InfluenzaA__AAX56413

SEQ ID NO: 142208 - RNA, 1410 nt, Artificial Sequence; identical to SEQ ID NO: 142185
  derived and/or modified CDS sequence (opt3) from neuraminidase__InfluenzaA__AAX56423

SEQ ID NO: 142209 - RNA, 1410 nt, Artificial Sequence; identical to SEQ ID NO: 142183
  derived and/or modified CDS sequence (opt3) from neuraminidase__InfluenzaA__AAX56433

SEQ ID NO: 142210 - RNA, 1410 nt, Artificial Sequence; identical to SEQ ID NO: 142202
  derived and/or modified CDS sequence (opt3) from neuraminidase__InfluenzaA__AAX56443

SEQ ID NO: 142211 - RNA, 1410 nt, Artificial Sequence
  derived and/or modified CDS sequence (opt3) from neuraminidase__InfluenzaA__AAX56473
augaaccccaaucagaagaucauuaccauaggcagcgugucccugacaaucgccacuauuugcuuccucaugcaaaucgcuauucuugucacgaccguuacacugcacuuuaaacaguacgaguguaacucuccuccaaauaaccaggugauguugugcgaaccgacuaucauagagagaaauaucaccgaaauuguauauuuaacaaacaccacuaucgagaaggaaauuugucccaaacuggcagaguacaggaauuggucaaagccucagugcaacaucacaggguucgccccauuuaguaaagacaauagcauacggcuauccgcgggaggugauauuugggugacccgcgagcccuaugucucuugugacccugauaagugcuaccaauucgcucucggccaggggacgacucugaacaauggacauucgaacgacaccgugcacgaucgaacaccauaucguacucuucugaugaaugaauugggcguucccuuucaucucgguaccagacagguguguaucgccuggucaagcaguuccugccacgacgggaaggcauggcugcaugucugugugacaggagaugacgagaacgccaccgcuucuuucauuuacaauggcaggcugguagauagcaucggcuccuggaguaaaaagauccuccggacgcaggaaucagagugcguuuguauuaacgggacuugcacaguggucaugaccgacggaagcgcaucugguaaagccgauacuaagauauuauuuaucgaggaaggcaaaauugugcacaucuccacacugucagggagcgcucaacacguggaggaaugcaguuguuauccucgcuacccaggagucagaugcguuuguagggacaacuggaagggcucuaaucggccgauaguggauauuaacguaaaggacuacuccaucgugagcucguaugucugcucuggucuugugggggacacccccaggaaaaaugauuccuucucaaguagccauuguuuggacccuaacaaugaggaaggaggccacggcguuaaggggugggccuuugaugacggaaacgauguguggaugggucgaacgaucuccgagaaacugagaucuggcuacgagaccuucaaggucauugaaggguggagcaaaccaaauucaaagcuacagaucaaccgccaggugauuguagagcggggaaaucguaguggcuauuccgguauauuuagcguugaagggaaaaacugcaucaaucgcuguuucuacguggagcucauuagaggcaggaaggaagagacagaggucugguggacuucuaacucaaucguggucuuuugcggaaccaguggcacauaugggacuggaagcuggcccgacggugcggauaucaaucugaugccuauuuga

SEQ ID NO: 142212 - RNA, 1410 nt, Artificial Sequence
  derived and/or modified CDS sequence (opt3) from neuraminidase__InfluenzaA__AAX56483
augaaccccaaucagaagaucauuaccauaggcagcgugucccugacaaucgccacuauuugcuuccucaugcaaaucgcuauucuugucacgaccguuacacugcacuuuaaacaguacgagugugacucuccuccaaacaaucaggugauguugugcgaaccgacuaucauagagagaaacaucaccgaaauuguauauuuaacaaauaccacuaucgagaaggaaauuugucccaaacuggcagaguacaggaacuggucaaagccucagugcaauaucacaggguucgccccauuuaguaaagauaacagcauacggcuauccgcgggaggugacauuugggugacccgcgagcccuaugucucuugugauccugacaagugcuaccaauucgcucucggccaggggacgacucugaauaacggacauucgaaugauaccgugcacgaccgaacaccauaucguacucuucugaugaacgaauugggcguucccuuucaucucgguaccagacagguguguaucgccuggucaagcaguuccugccacgaugggaaggcauggcugcaugucugugugacaggagacgaugagaaugccaccgcuucuuucauuuacaacggcaggcugguagacagcaucggcuccuggaguaaaaagauccuccggacgcaggaaucagagugcguuuguauuaaugggacuugcacaguggucaugaccgauggaagcgcaucugguaaagccgacacuaagauauuauuuaucgaggaaggcaaaauugugcacaucuccacacugucagggagcgcucaacacguggaggaaugcaguuguuauccucgcuacccaggagucagaugcguuuguagggauaacuggaagggcucuaaccggccgauaguggacauuaauguaaaggacuacuccaucgugagcucguaugucugcucuggucuugugggggauacccccaggaaaaacgacuccuucucaaguagccauuguuuggauccuaauaacgaggaaggaggccacggcguuaaggggugggccuuugacgauggaaaugacguguggaugggucgaacgaucuccgagaaacugagaucuggcuacgagaccuucaaggucauugaaggguggagcaaaccaaacucaaagcuacagaucaaucgccaggugauuguagagcggggaaaccguaguggcuauuccgguauauuuagcguugaagggaaaucuugcaucaaucgcuguuucuacguggagcucauuagaggcaggaaggaagagacagaggucugguggacuucaaacaguaucguggucuuuugcggaaccagcggcacauaugggacuggauccuggcccgauggugcggacaucaaucugaugccuauuuga

SEQ ID NO: 142213 - RNA, 1410 nt, Artificial Sequence; identical to SEQ ID NO: 142212
  derived and/or modified CDS sequence (opt3) from neuraminidase__InfluenzaA__AAX56503

SEQ ID NO: 142214 - RNA, 1410 nt, Artificial Sequence
  derived and/or modified CDS sequence (opt3) from neuraminidase__InfluenzaA__AAX56513
augaaccccaaucagaagaucauuaccauaggcagcgugucccugacaaucgccacuauuugcuuccucaugcaaaucgcuauucuugucacgaccguuacacugcacuuuaaacaguacgaguguaacucuccuccaaauaaccaggugauguugugcgaaccgacuaucauagagagaaauaucaccgaaauuguauauuuaacaaacaccacuaucgagaaggaaauuugucccaaacuggcagaguacaggaauuggucaaagccucagugcaacaucacaggguucgccccauuuaguaaagacaauagcauacggcuauccgcgggaggugauauuugggugacccgcgagcccuaugucucuugugacccugauaagugcuaccaauucgcucucggccaggggacgacucugaacaauggacauucgaacgacaccgugcacgaucgaacaccauaucguacucuucugaugaaugaauugggcguucccuuucaucucgguaccagacagguguguaucgccuggucaagcaguuccugccacgacgggaaggcauggcugcaugucugugugacaggagaugacgagaacgccaccgcuucuuucauuuacaauggcaggcugguagauagcaucggcuccuggaguaaaaagauccuccggacgcaggaaucagagugcguuuguauuaacgggacuugcacaguggucaugaccgacggaagcgcaucugguaaagccgauacuaagauauuauuuaucgaggaaggcaaaauugugcacaucuccacacugucagggagcgcucaacacguggaggaaugcaguuguuauccucgcuacccaggagucagaugcguuuguagggacaacuggaagggcucuaaucggccgauaguggauauuaacguaaaggacuacuccaucgugagcucguaugucugcucuggucuugugggggacacccccaggaaaaaugauuccuucucaaguagccauuguuuggacccuaacaaugaggaaggaggccacggcguuaaggggugggccuuugaugacggaaacgauguguggaugggucgaacgaucuccgagaaacugagaucuggcuacgagaccuucaaggucauugaaggguggagcaaaccaaauucaaagcuacagacaaaccgccaggugaucguagagcggggaaaucguaguggcuauuccgguauuuuuagcguugaagggaaaucuugcauaaaccgcuguuucuacguggagcucaucagaggcaggaaggaagagacugaggucugguggaccucaaauaguauuguggucuuuugcggaacaagcggcacuuaugggaccggauccuggcccgacggugcggauaucaaccugaugccuaucuga

SEQ ID NO: 142215 - RNA, 1413 nt, Artificial Sequence
  derived and/or modified CDS sequence (opt3) from neuraminidase__InfluenzaA__AAX56533
augaaccccaaucagaagaucauuaccauaggcagcaucuccguggccauugggaucauuucucugauccuccaaauaggaaacaucauuucaaucugggcuagucacagcauucagacagguucccagaauuacacuggcaucugcaaccagagaauaauuacguaugagaauaggaccugggugaaccaaacauacguuaauaucaacaauacuaacgugguagcagggaaagacaagaccucuaugacacuugccggaaauucgucacuguguccuauucggggcugggcgaucuauaccaaagauaacagcauccgcauugguaguaagggggacguguucgucauacgagaaccauuuaucuccugcucucauuuggagugucguacuuucuuuuuaacacagggagcucugcuaaaugauaaacacagcaacggcaccauuaaggacagauccccguucagggcccucaugucaugcccccugggcgaagcaccuaguccauacaauagccgguuugagucuguggccugguccgcuucagcaugucaugaugggcuuggauggcugacgaucgguauaagcggccccgacaacggggccguugcuguguugaaguauaacggaauuaucacugaaaccaucaaaaguuggaagaaacagauucuccgcacacaggagucugagugcgucugugugaauggcuccugcuucacuaucaugaccgaugguccuagcaacagagccgcgucguacaggauuuuuaagauagaaaaagggcggguaacaaagucuaucgagcuggacgcaccaaauuaucacuacgaagaguguuccugcuaccccgauaccggaacgguuaugugugugugccgcgacaacuggcauggcucaaaucgaccuugggucaguuucaaccaaaaucuggauuaucagauuggcuacaucugcagcgggguguuuggagacaacccaagaccgaaggauggugagggcuccuguaaucccgugacugucgacggggccgacggaguuaaaggcuucucuuauagguacgguaacgggguguggaucggccggacaaagagcaaucgucuccgcaaaggauuugaaaugauuugggauccuaacggcuggaccgacacugauucagacuucaguaugaagcaggauguaguggcuaugaaugacugguccggguauagcggaucuuuuguccagcacccagaguuaacaggucuggauugcaugagacccuguuucuggguggaacuuguuaggggcuugccucgggagaacaccacgauauggaccucagggaguagcaucuccuucugcggagucaauucugaaacagccaacuggucguggccagacggcgcagagcugcccuuuacuauugauaaauga

SEQ ID NO: 142216 - RNA, 1410 nt, Artificial Sequence
  derived and/or modified CDS sequence (opt3) from neuraminidase__InfluenzaA__AAX56543
augaaccccaaucagaagaucauuaccauaggcagcgugucccugacaaucgccacuauuugcuuccucaugcaaaucgcuauucuugucacgaccguuacacugcacuuuaaacaguacgaguguaacucuccuccaaauaaccaggugauguugugcgaaccgacuaucauagagagaaauaucaccgaaauuguauauuuaacaaacaccacuaucgagaaggaaauuugucccaaacuggcagaguacaggaauuggucaaagccucagugcaacaucacaggguucgccccauuuaguaaagacaauagcauacggcuauccgcgucuggagauauuugggugacccgcgagcccuaugucucgugugacccugauaagugcuaccaauucgcucucggucagggcacgacucugaacaaugggcauucaaacgacaccgugcacgaucgaacaccauaucguacucuucugaugaaugaauugggaguucccuuucaucucggcaccaaacagguguguaucgccuggagcaguuccucuugccacgacgguaaggcauggcugcaugucugugugacaggggaugacgagaacgccaccgcuagcuucauuuacaauggaagacugguagauuccaucggcucauggaguaagaaaauccucaggacgcaggaaagcgagugcguuuguauuaacggcacuugcacaguggucaugaccgacgggucugcauccggaaaggccgauacuaaaauauuauuuaucgaggaagguaagauugugcacacaucaagccugaguggcucugcucaacacguggaggaaugcuccuguuauccucgguacccagggguccgcugcguuuguagagacaacuggaagggaagcaauaggccgaucguggauauaaacguaaaagacuacucgauugugucuuccuaugucugcucaggccuugugggugacacgccccggaagaaugauaguagcuccucuagccauuguuuggacccuaacaaugaggaagggggacacggcguuaaaggcugggccuucgaugacgggaacgauguguggaugggacgcaccaucucagaggagcugcgaagugguuacgaaaccuuuaaggucaucgagggcugguccaaaccaaauagcaagcuacagauuaacagacaggugaucguagacagggggaaucggucuggauauucaggcauuuucaguguugaagguaaaagcugcauaaaccguuguuuuuacguggagcucauccgcgggagaaagcaggaaacagagguccuguggacuuccaauucuauuguggucuucugcggcaccucgggaacauauggcacugggagcuggcccgauggagcggacaucaaccuuaugccuaucuga

SEQ ID NO: 142217 - RNA, 1410 nt, Artificial Sequence; identical to SEQ ID NO: 142109
  derived and/or modified CDS sequence (opt3) from neuraminidase__InfluenzaA__AAX56553

SEQ ID NO: 142218 - RNA, 1410 nt, Artificial Sequence
  derived and/or modified CDS sequence (opt3) from neuraminidase__InfluenzaA__AAX56563
augaaccccaaucagaagaucauuaccauaggcagcgugucccugacaaucgccgcuauuugcuuccucaugcagaucgcaauucuugucacuacgguuacccugcacuuuaaacagcaugaguguaacucuccuccaaauaaccaggugauguugugcgaaccgacaaucauagagagaaauaucacugaaauuguauacuuaaccaacacaaccaucgagaaggaaauuugucccaaacuggccgaguauaggaauuggucaaagccucagugcaacaucacuggguucgcgccauuuaguaaagacaauagcauacggcuauccgcuggaggugauauuugggugacacgcgagcccuacgucucuugugacccugauaagugcuaucaauucgcccucggccaggggaccacgcugaacaauggacacucgaacgacacugugcaugaucgaaccccauaccguacacuucugaugaaugaauugggcguucccuuucaccucgguacuagacagguguguaucgcauggucaagcaguuccugccaugacgggaaggccuggcugcacgucugugugaccggagaugacaaaaacgcuacagcaucuuucauuuauaauggcaggcugguagauagcaucggcuccuggucaaagaaaauccuccggacccaggagagugaaugcguuuguauuaacgggacgugcacuguggucaugacagacggaagcgccucugguaaggcugauaccaaaauauuauuuaucgaggagggcaagauugugcacaucuccgcccugucagggagcgcgcaacauguggaagagugcaguuguuacccucgcuauccaggagucagaugcguuuguagggacaacuggaagggcucuaaucggccgauaguggauauuaacguaaaagacuacuccaucgugagcucguacgucugcucuggucuugugggggacacuccccgcaagaaugauuccuucucaaguagccacuguuuggacccuaacaaugaagagggaggccauggcguuaaagggugggcauuugaugacggaaacgauguguggaugggucgaacaaucuccgaaaagcugagaucuggcuaugagaccuucaaagucauugagggguggagcaagccaaauucaaaacuacagaucaacaggcaagugauuguagaacgggacaaucguaguggauacuccggcauauuuagcguugaggguaagucuugcaucaaccgcuguuucuauguggaacucauuagagggaggaaggaggaaacggaggucugguggaccucaaauaguaucguggucuuuugcggcacaagcggaacuuacggcaccggguccuggcccgauggagccgacaucaaccugaugccuauuuga

SEQ ID NO: 142219 - RNA, 1410 nt, Artificial Sequence
  derived and/or modified CDS sequence (opt3) from neuraminidase__InfluenzaA__AAX56573
augaaccccaaucagaagaucauuaccauaggcagcgugucccugacaaucgccacuauuugcuuccucaugcagaucgcuauucuugucacgaccguuacacugcacuuuaaacaguacgaguguaacucuccuccaaauaaccaggugauguugugcgaaccggcaaucauagagagaaauaucacugaaauuguauauuuaaccaacacaaccaucgagaaggaaauuugucccaaacuggccgaguacaggaauuggucaaagccucagugcaacaucacuggguucgcgccauuuaguaaagacaauagcauacggcuauccgcuggaggugauauuugggugacacgcgagcccuaugucucuugugacccugauaagugcuaccaauucgcccucggccaggggaccacgcugaacaauggacauucgaacgacacugugcacgaucgaaccccauaucguacacuucugaugaaugaauugggcguucccuuucaucucgguacuagacagguguguaucgcauggucaagcaguuccugccacgacgggaaggccuggcugcaugucugugugaccggagaugacgagaacgcuacagcaucuuucauuuacaauggcaggcugguagauagcaucggcuccuggaguaaaaagauccuccggacccaggaaucagagugcguuuguauuaacgggacgugcacuguggucaugacagacggaagcgccucugguaaagcugauaccaagauauuauuuaucgaggaaggcaaaauugugcacaucuccacucugucagggagcgcccaacacguggaggaaugcaguuguuauccucgcuacccaggagucagaugcguuuguagggacaacuggaagggcucuaaucggccgauaguggauauuaacguaaaggacuacuccaucgugagcucguaugucugcucuggucuugugggggacacaccccgcaaaaaugauuccuucucaaguagccauuguuuggacccuaacaaugaggaaggaggccacggcguuaaggggugggcguuugaugacggaaacgauguguggaugggucgaaccaucuccgagaaacugagaucuggcuacgagacguucaaggucauugaaggguggagcaaaccaaauucaaagcuacagaucaacaggcaagugauuguagagcggggaaaucguaguggcuauuccgguauauuuagcguugaagggaaaucuugcaucaaccgcuguuucuacguggagcucauuagaggcaggaaggaagagaccgaggucugguggacaucaaauaguaucguggucuuuugcggaacuagcggcaccuaugggacaggauccuggcccgacggugcagauaucaaccugaugccuauuuga

SEQ ID NO: 142220 - RNA, 1410 nt, Artificial Sequence
  derived and/or modified CDS sequence (opt3) from neuraminidase__InfluenzaA__AAX56583
augaaccccaaucagaagaucauuaccauaggcagcgugucccugacaaucgccacuauuugcuuccucaugcaaaucgcuauucuugucacgaccguuacacugcacuuuaaacaguacgaguguaacucuccuccaaauaaccaggugauguugugcgaaccgacuaucauagagagaaauaucaccgaaauuguauauuuaacaaacaccacuaucgagaaggaaauuugucccaaacuggcagaguacaggaauuggucaaagccucagugcaacaucacaggguucgccccauuuaguaaagacaauagcauacggcuauccgcgggaggugauauuugggugacccgcgagcccuaugucucuugugacccugauaagugcuaccaauucgcucucggccaggggacgacucugaacaauggacauucgaacgacaccgugcacgaucgaacaccauaucguacucuucugaugaaugaauugggcguucccuuucaucucgguaccagacagguguguaucgccuggucaagcaguuccugccacgacgggaaggcauggcugcaugucugugugacaggagaugacgagaacgccaccgcuucuuucauuuacaauggcaggcugguagauagcaucggcuccuggaguaaaaagauccuccggacgcaggaaucagagugcguuuguauuaacgggacuugcacaguggucaugaccgacggaagcgcaucugguaaagccgauacuaagauauuauuuaucgaggaaggcaaaauugugcacaucuccacacugucagggagcgcucaacacguggaggaaugcaguuguuauccucgcuacccaggagucagaugcguuuguagggaccauuggaagggcucuaaccggccgauaguggauauuaauguaaaggacuacuccaucgugagcucguaugucugcucuggucuugugggggacacccccaggaaaaacgauuccuucucaaguagccacuguuuggacccuaauaacgaggaaggaggccauggcguuaaggggugggccuuugaugacggaaaugauguguggaugggucgaacgaucuccgagaaacugagaucuggcuacgagaccuucaaggucauugaaggguggagcaaaccaaacucaaagcuacagacaaaucgccaggugaucguagagcggggaaaccguaguggcuauuccgguauuuuuagcguugaagggaaaucuugcauaaaucgcuguuucuacguggagcucaucagaggcaggaaggaagagacugaggucugguggaccucaaacaguauuguggucuuuugcggaacaagcggcacuuaugggaccggauccuggcccgacggugcggauaucaaucugaugccuaucuga

SEQ ID NO: 142221 - RNA, 1410 nt, Artificial Sequence
  derived and/or modified CDS sequence (opt3) from neuraminidase__InfluenzaA__AAX56593
augaaccccaaucagaagaucauuaccauaggcagcgugucccugacaaucgccacuauuugcuuccucaugcagaucgcuauucuugucacgaccguuacacugcacuuuaaacaguacgaguguaacucuccuccaaauaaccaggugauguugugcgaaccggcaaucauagagagaaauaucacugaaauuguauauuuaaccaacacaaccaucgagaaggaaauuugucccaaacuggccgaguacaggaauuggucaaagccucagugcaacaucacuggguucgcgccauuuaguaaagacaauagcauacggcuauccgcuggaggugauauuugggugacacgcgagcccuaugucucuugugacccugauaagugcuaccaauucgcccucggccaggggaccacgcugaacaauggacauucgaacgacacugugcacgaucgaaccccauaucguacacuucugaugaaugaauugggcguucccuuucaucucgguacuagacagguguguaucgcauggucaagcaguuccugccacgacgggaaggccuggcugcaugucugugugaccggagaugacgagaacgcuacagcaucuuucauuuacaauggcaggcugguagauagcaucggcuccuggaguaaaaagauccuccggacccaggaaucagagugcguuuguauuaacgggacgugcacuguggucaugacagacggaagcgccucugguaaagcugauaccaagauauuauuuaucgaggaaggcaaaauugugaacaucuccacucugucagggagcgcccaacacguggaggaaugcaguuguuauccucgcuacccaggagucagaugcguuuguagggacaauuggaagggcucuaaccggccgauaguggauauuaauguaaaggacuacuccaucgugagcucguaugucugcucuggucuugugggggacacaccccgcaaaaacgauuccuucucaaguagccacuguuuggacccuaauaacgaggaaggaggccauggcguuaaggggugggcguuugaugacggaaaugauguguggaugggucgaaccaucuccgagaaauucagaucuggcuacgagacguuuaaggucauugaaggguggagcaaaccaaacucaaagcugcagaucaauaggcaagugauuguagagcggggaaaccguaguggcuauuccgguauauucagcguugaagggaaaucuugcaucaaucgcuguuuuuacguggagcuaauuagaggcaggaaggaagagaccgaggucugguggacaucaaacaguaucguggucuucugcggaacuagcggcaccuaugggacaggauccuggcccgacggugcagauaucaaucucaugccuauuuga

SEQ ID NO: 142222 - RNA, 1410 nt, Artificial Sequence
  derived and/or modified CDS sequence (opt3) from neuraminidase__InfluenzaA__AAX56603
augaaccccaaucagaagaucauuaccauaggcagcgugucccugacaaucgccgcuauuugcuuccucaugcaaaucgcaauucuugucacuacgguuacccugcacuuuaaacagcaugaguguaacucuccuccaaauaaccaggugauguugugcgaaccgacaaucauagagagaaauaucacugaaauuguauacuuaaccaacacaaccaucgagaaggaaauuugucccaaacuggccgaguauaggaauuggucaaagccucagugcaacaucacuggguucgcgccauuuaguaaagacaauagcauacggcuauccgcuggaggugauauuugggugacacgcgagcccuacgucucuugugacccugauaagugcuaucaauucgcccucggccaggggaccacgcugaacaauggacacucgaacgacacugcacaugaucgaaccccauaccguacacuucugaugaaugaauugggcgugcccuuucaccucgguacuagacagguuuguaucgccuggucaagcaguuccugccaugacgggaaggcuuggcugcacgugugugucaccggagaugacaaaaacgcaacagccucuuucauuuauaauggcaggcugguggauagcaucggcuccuggucaaagaaaauccuccggacccaggagagugaaugcguauguauuaacgggacgugcacuguugugaugacagacggaagcgcuucugguaaggccgauaccaaaauauuauuuaucgaggagggcaagauuguccacaucuccacucugucagggagcgcgcaacauguggaagagugcaguuguuacccucgcuauccaggagugagaugcgucuguagggacaacuggaagggcucuaaucggccgauaguugauauuaacgugaaagacuacuccaucguaagcucguacgugugcucuggucuugucggggacacaccccgcaagaaugauuccuucucaaguagccacuguuuggacccuaacaaugaagagggaggccauggcgugaaagggugggcauuugaugacggaaacgauguuuggaugggucgaaccaucuccgaaaagcugagaucuggcuaugagacguucaaagugauugagggguggagcaagccaaauucaaaacuacagaucaacaggcaggucauuguggaacggggaaaucguaguggcuacuccgguauauuuagcguagaggggaagucuugcaucaaccgcuguuucuauguugaacucauuagaggcaggaaggaggaaaccgaggugugguggacaucaaauaguaucgucguguuuugcggaacuagcggcaccuacgggacaggauccuggcccgacggugccgauaucaaccugaugccuauuuga

SEQ ID NO: 142223 - RNA, 1410 nt, Artificial Sequence; identical to SEQ ID NO: 142193
  derived and/or modified CDS sequence (opt3) from neuraminidase__InfluenzaA__AAX57647

SEQ ID NO: 142224 - RNA, 1410 nt, Artificial Sequence; identical to SEQ ID NO: 142183
  derived and/or modified CDS sequence (opt3) from neuraminidase__InfluenzaA__AAX57657

SEQ ID NO: 142225 - RNA, 1410 nt, Artificial Sequence; identical to SEQ ID NO: 142221
  derived and/or modified CDS sequence (opt3) from neuraminidase__InfluenzaA__AAX57667

SEQ ID NO: 142226 - RNA, 1410 nt, Artificial Sequence; identical to SEQ ID NO: 142202
  derived and/or modified CDS sequence (opt3) from neuraminidase__InfluenzaA__AAX57677

SEQ ID NO: 142227 - RNA, 1410 nt, Artificial Sequence
  derived and/or modified CDS sequence (opt3) from neuraminidase__InfluenzaA__AAX57687
augaaccccaaucagaagaucauuaccauaggcagcgugucccugacaaucgccacuauuugcuuccucaugcagaucgcuauucuugucacgaccguuacacugcacuuuaaacaguacgaguguaacucuccuccaaauaaccaggugauguugugcgaaccggcaaucauagagagaaauaucacugaaauuguauauuuaaccaacacaaccaucgagaaggaaauuugucccaaacuggccgaguacaggaauuggucaaagccucagugcaacaucacuggguucgcgccauuuaguaaagacaauagcauacggcuauccgcuggaggugauauuugggugacacgcgagcccuaugucucuugugacccugauaagugcuaccaauucgcccucggccaggggaccacgcugaacaauggacauucgaacgacacugugcacgaucgaaccccauaucguacacuucugaugaaugaauugggcguucccuuucaucucgguacuagacagguguguaucgcauggucaagcaguuccugccacgacgggaaggccuggcugcaugucugugugaccggagaugacgagaacgcuacagcaucuuucauuuacgauggcaggcugguagacagcaucggcuccuggaguaaaaagauccuccggacccaggaaucagagugcguuuguauuaaugggacgugcacuguggucaugacagauggaagcgccucugguaaagcugacaccaagauauuauuuaucgaggaaggcaaaauugugaacaucuccacucugucagggagcgcccaacacguggaggaaugcaguuguuauccucgcuacccaggagucagaugcguuuguagggauaacuggaagggcucuaaucggccgauaguggacauuaacguaaaggacuacuccaucgugagcucguaugucugcucuggucuugugggggauacaccccgcaaaaaugacuccuucucaaguagccacuguuuggauccuaacaaugaggaaggaggccauggcguuaaggggugggcguuugacgauggaaacgacguguggaugggucgaaccaucuccgagaaacugagaucuggcuacgagacguucaaggucauugaaggguggagcaaaccaaauucaaagcuacagaucaacaggcaagugauuguagagcggggaaaucguaguggcuauuccgguauauuuagcguugaagggaaaucuugcaucaaccgcuguuucuacguggagcucauuagaggcaggaaggaagagaccgaggucugguggacaucaaauaguaucguggucuuuugcggaacuagcggcaccuaugggacaggauccuggcccgauggugcagacaucaaccugaugccuauuuga

SEQ ID NO: 142228 - RNA, 1410 nt, Artificial Sequence
  derived and/or modified CDS sequence (opt3) from neuraminidase__InfluenzaA__AAX57697
augaaccccaaucagaagaucauuaccauaggcagcgugucccugacaaucgccacuauuugcuuccucaugcaaaucgcuauucuugucacgaccguuacacugcacuuuaaacaguacgaguguaacucuccuccaaauaaccaggugauguugugcgaaccgacuaucauagagagaaauaucaccgaaauuguauauuuaacaaacaccacuaucgagaaggaaauuugucccaaacuggcagaguacaggaauuggucaaagccucagugcaacaucacaggguucgccccauuuaguaaagacaauagcauacggcuauccgcgggaggugauauuugggugacccgcgagcccuaugucucuugugacccugauaagugcuaccaauucgcucucggccaggggacgacucugaacaauggacauucgaacgacaccgugcacgaucgaacaccauaucguacucuucugaugaaugaauugggcguucccuuucaucucgguaccagacagguguguaucgccuggucaagcaguuccugccacgacgggaaggcauggcugcaugucugugugacaggagaugacgagaacgccaccgcuucuuucauuuacaauggcaggcugguagauagcaucggcuccuggaguaaaaagauccuccggacgcaggaaucagagugcguuuguauuaacgggacuugcacaguggucaugaccgacggaagcgcaucugguaaagccgauacuaagauauuauuuaucgaggaaggcaaaauugugcacaucuccacacugucagggagcgcucaacacguggaggaaugcaguuguuauccucgcuacccaggagucagaugcguuuguagggacaacuggaagggcucuaaucggccgauaguggauauuaacguaaaggaccauuccaucgugagcucguacgucugcucuggucuugugggggacacccccaggaaaaaugauuccuucucaaguagccacuguuuggacccuaacaaugaggaaggaggccauggcguuaaggggugggccuuugaugacggaaacgauguguggaugggucgaacgaucuccgagaaacugagaucuggcuaugagaccuucaaggucauugaaggguggagcaaaccaaauucaaagcuacagaucaaccgccaggugauuguagagcggggaaaucguaguggcuacuccgguauauuuagcguugaagggaaaucuugcaucaaccgcuguuucuauguggagcucauuagaggcaggaaggaagagacagaggucugguggacuucaaauaguaucguggucuuuugcggaaccagcggcacauacgggacuggauccuggcccgacggugcggauaucaaccugaugccuauuuga

SEQ ID NO: 142229 - RNA, 1410 nt, Artificial Sequence
  derived and/or modified CDS sequence (opt3) from neuraminidase__InfluenzaA__AAX57707
augaaccccaaucagaagaucauuaccauaggcagcgugucccugacaaucgccgcuauuugcuuccucaugcaaaucgcaauucuugucacuacgguuacccugcacuuuaaacagcaugaguguaacucuccuccaaauaaccaggugauguugugcgaaccgacaaucauagagagaaauaucacugaaauuguauacuuaaccaacacaaccaucgagaaggaaauuugucccaaacuggccgaguauaggaauuggucaaagccucagugcaacaucacuggguucgcgccauuuaguaaagacaauagcauacggcuauccgcuggaggugauauuugggugacacgcgagcccuacgucucuugugacccugauaagugcuaucaauucgcccucggccaggggaccacgcugaacaauggacacucgaacgacacugugcaugaucgaaccccauaccguacacuucugaugaaugaauugggcguucccuuucaccucgguacuagacagguguguaucgcauggucaagcaguuccugccaugacgggaaggccuggcugcacgucugugugaccggagaugacaaaaacgcuacagcaucuuucauuuauaauggcaggcugguagauagcaucggcuccuggucaaagaaaauccuccggacccaggagagugaaugcguuuguauuaacgggacgugcacuguggucaugacagacggaagcgccucugguaaggcugauaccaaaauauuauuuaucgaggagggcaagauugugcacaucuccacucugucagggagcgcccaacauguggaagagugcaguuguuacccucgcuauccaggagucagaugcguuuguagggacaacuggaagggcucuaaucggccgauaguggauauuaacguaaaagacuacuccaucgugagcucguacgucugcucuggucuugugggggacacaccccgcaagaaugaucgauucuccucaagucacuguuuggacccuaacaaugaagagggaggccauggcguuaaagggugggcguuugaugacggaaacgauguguggauggguagaaccaucagcgaaaagcugagguccggcuaugagacguucaaagucauugagggguggucuaagccaaauagcaaacuacagaucaaccgucaggugauuguagaacggggaaaucgcucaggcuacagugguauauuuuccguugaggggaagaguugcaucaacagauguuucuauguggaacucauuaggggccggaaggaggaaaccgaggucugguggacaucuaauucaaucguggucuuuugcggaacuagcggcaccuacgggacaggaagcuggcccgacggugcagauaucaaccugaugccuauuuga

SEQ ID NO: 142230 - RNA, 1410 nt, Artificial Sequence; identical to SEQ ID NO: 142202
  derived and/or modified CDS sequence (opt3) from neuraminidase__InfluenzaA__AAX57717

SEQ ID NO: 142231 - RNA, 1410 nt, Artificial Sequence; identical to SEQ ID NO: 142221
  derived and/or modified CDS sequence (opt3) from neuraminidase__InfluenzaA__AAX57726

SEQ ID NO: 142232 - RNA, 1410 nt, Artificial Sequence; identical to SEQ ID NO: 142221
  derived and/or modified CDS sequence (opt3) from neuraminidase__InfluenzaA__AAX57737

SEQ ID NO: 142233 - RNA, 1410 nt, Artificial Sequence; identical to SEQ ID NO: 142109
  derived and/or modified CDS sequence (opt3) from neuraminidase__InfluenzaA__AAX57747

SEQ ID NO: 142234 - RNA, 1410 nt, Artificial Sequence; identical to SEQ ID NO: 142109
  derived and/or modified CDS sequence (opt3) from neuraminidase__InfluenzaA__AAX57757

SEQ ID NO: 142235 - RNA, 1410 nt, Artificial Sequence
  derived and/or modified CDS sequence (opt3) from neuraminidase__InfluenzaA__AAX57767
augaaccccaaucagaagaucauuaccauaggcagcgugucccugacaaucgccacuauuugcuuccucaugcaaaucgcuauucuugucacgaccguuacacugcacuuuaaacaguacgaguguaacccuccaccgaauaaccaggugauguugugcgaacccacuaucauagagagaaauaucaccgaaauuguauauuuaacaaacaccacuaucgagaaggaaauuuguccuaaacuggcagaguacaggaauuggucuaagccacagugcaacaucacaggguucgcccccuuuucaaaagacaauaguauacggcuaagcgcgggaggugauauuugggugacccgcgagccuuaugucuccugugacccagauaagugcuaccaauucgcucucggccaggggacgacucugaacaauggacauucuaacgacaccgugcacgaucgaacacccuaucguacucuucugaugaaugaauugggcguuccuuuucaucucgguaccaaacagguguguaucgccuggucgucaagcaguugccacgacgggaaggcauggcugcaugucugugugacaggagaugacgagaacgccaccgcuuccuucauuuacaauggcagacugguagauucuaucggcagcugguccaagaaaauccucaggacgcaggaaucagagugcguuuguauuaacgggacuugcacaguggucaugaccgacggaagugcaagcgguaaggccgauacuaaaauauuauuuaucgaggaaggcaagauugugcacacaucucugcuuuccgggucagcucaacacguggaggaaugcagcuguuauccacgguacccgggaguccgcugcguuuguagagacaacuggaagggcaguaauaggcccaucguggauauaaacguaaaagacuacucuauuguguccagcuaugucugcucggguuuggugggggacaccccucggaagaaugauucuuccucaaguagccauugucuggacccaaacaaugaggaaggaggccacggcguuaaagggugggccuucgaugacggaaacgauguguggaugggucgcacgaucuccgagaagcuacgaucuggcuacgagaccuuuaaagucaucgaaggguggagcaagcccaauucaaaacuccagauuaacagacaggugaucguagacaggggaaaucggaguggcuauuccgguauuuucagcguugaggggaagucuugcauaaaccguuguuuuuacguggaacugauccgcggcagaaagcaggagacagaaguccuuuggacuucaaauaguauuguggucuucugcggaaccagcggcacauaugggacuggauccuggccugauggugcggacaucaaccugaugccaaucuga

SEQ ID NO: 142236 - RNA, 1410 nt, Artificial Sequence
  derived and/or modified CDS sequence (opt3) from neuraminidase__InfluenzaA__AAX57777
augaaccccaaucagaagaucauuaccauaggcagcgugucccugaucauugccacaaucugcuuccucaugcaaauugcuauccuugucacuacgguuacccugcacuuuaaacaguacgaguguaacucuccuccaaauaaccaggugauguugugcgaaccgacaauaaucgagagaaauauuacugaaaucguauauuuaaccaacacaaccauugagaaggaaaucugucccaaacuggcagaguacaggaauuggucaaagccucagugcaacauaacuggguucgccccauuuaguaaagacaauagcauucggcuauccgcgggaggugauaucugggugacacgcgagcccuaugucucuugugacccugauaagugcuaccaauucgcucucggccaggggaccacgcugaacaauggacauucgaacgacacugugcacgaucgaaccccauaucguacacuucugaugaaugaauugggcguucccuuucaucucgguacuaaacagguguguauugccuggucaagcaguuccugccacgacgggaaggcauggcugcaugucugugugaccggagaugacgagaacgccacagcuucuuucaucuacaauggcagacugguagauagcaucggcuccuggucaaagaaaauucucaggacccaggaaagugagugcguuuguauaaacgggacgugcacuguggucaugacagacggaagcgcaucugguaaggccgauaccaaaaucuuauuuauugaggaaggcaagaucgugcacacuuccucacugagcgggagugcucaacacguggaggaaugcucuuguuauccucgguacccaggaguccgcugcguuuguagagacaacuggaagggcuccaauaggccgauaguggauauuaacguaaaagacuacagcaucgugucgucuuaugucugcuccggucuugugggggacacaccccggaagaaugauucaaguagcuccucucauuguuuggacccuaacaaugaggaaggaggccacggcguuaaagggugggccuucgaugacggaaacgauguguggaugggucgcaccaucagcgagaagcugcgaucaggcuacgagacguuuaaagucauugaaggguggaguaagccaaauuccaaacuacagaucaacagacaggugauuguagacaggggaaaucggagcggcuauucugguauauucucaguugaggggaagaguugcaucaaccguuguuuuuacguggaacucauucgcggcagaaagcaggagaccgaaguccuguggacaagcaauuccaucguggucuucugcggaacuucuggcaccuaugggacaggaucguggcccgauggugcggacaucaaccuuaugccuauuuga

SEQ ID NO: 142237 - RNA, 1410 nt, Artificial Sequence
  derived and/or modified CDS sequence (opt3) from neuraminidase__InfluenzaA__AAX57787
augaaccccaaucagaagaucauuaccauaggcagcgugucccugacaaucgccacuauuugcuuccucaugcagaucgcuauucuugucacgaccguuacacugcacuuuaaacaguacgaguguaacucuccuccaaauaaccaggugauguugugcgaaccggcaaucauagagagaaauaucacugaaauuguauauuuaaccaacacaaccaucgagaaggaaauuugucccaaacuggccgaguacaggaauuggucaaagccucagugcaacaucacuggguucgcgccauuuaguaaagacaauagcauacggcuauccgcuggaggugauauuugggugacacgcgagcccuaugucucuugugacccugauaagugcuaccaauucgcccucggccaggggaccacgcugaacaauggacauucgaacgacacugugcacgaucgaaccccauaucguacacuucugaugaaugaauugggcguucccuuucaucucgguacuagacagguguguaucgcauggucaagcaguuccugccacgacgggaaggccuggcugcaugucugugugaccggagaugacgagaacgcuacagcaucuuucauuuacaauggcaggcugguagauagcaucggcuccuggaguaaaaagauccuccggacccaggaaucagagugcguuuguauuaacgggacgugcacuguggucaugacagacggaagcgccucugguaaagcuaacaccaagauauuauuuaucgaggaaggcaaaauugugaauaucuccacucugucagggagcgcccaacacguggaggaaugcaguuguuauccucgcuacccaggagucagaugcguuuguagggauaacuggaagggcucuaaucggccgauaguggacauuaacguaaaggauuacuccaucgugagcucguaugucugcucuggucuugugggggacacaccccgcaaaaaugacuccuucucaaguagccacuguuuggauccuaacaaugaggaaggaggccauggcguuaaggggugggcguuugacgauggaaacgacguguggaugggucgaaccaucuccgagaaauucagaucuggcuacgagacguuuaaggucauugaaggguggagcaaaccaaauucaaagcugcagaucaacaggcaagugauuguagagcggggaaaucguaguggcuauuccgguauauucagcguugaagggaaaucuugcaucaaccgcuguuuuuacguggagcuaauuagaggcaggaaggaagagaccgaggucugguggacaucaaauaguaucguggucuucugcggaacuagcggcaccuaugggacaggauccuggcccgauggugcagacaucaaccucaugccuauuuga

SEQ ID NO: 142238 - RNA, 1410 nt, Artificial Sequence; identical to SEQ ID NO: 142109
  derived and/or modified CDS sequence (opt3) from neuraminidase__InfluenzaA__AAX57797

SEQ ID NO: 142239 - RNA, 1410 nt, Artificial Sequence; identical to SEQ ID NO: 142109
  derived and/or modified CDS sequence (opt3) from neuraminidase__InfluenzaA__AAX57807

SEQ ID NO: 142240 - RNA, 1410 nt, Artificial Sequence
  derived and/or modified CDS sequence (opt3) from neuraminidase__InfluenzaA__AAX57817
augaaccccaaucagaagaucauuaccauaggcagcgugucccugacaaucgccacuauuugcuuccucaugcaaaucgcuauucuugucacgaccguuacacugcacuuuaaacaguacgaguguaacucuccuccaaauaaccaggugauguugugcgaaccgacuaucauagagagaaauaucaccgaaauuguauauuuaacaaacaccacuaucgagaaggaaauuugucccaaacuggcagaguacaggaauuggucaaagccucagugcaacaucacaggguucgccccauuuaguaaagacaauagcauacggcuauccgcgggaggugauauuugggugacccgcgagcccuaugucucuugugacccugauaagugcuaccaauucgcucucggccaggggacgacucugaacaauggacauucgaacgacaccgugcacgaucgaacaccauaucguacucuucugaugaaugaauugggcguucccuuucaucucgguaccaaacagguguguaucgccuggucaagcaguuccugccacgacgggaaggcauggcugcaugucugugugacaggagaugacgagaacgccaccgcuucuuucauuuacaauggcagacugguagauagcaucuccucauggaguaagaaaauccucaggacgcaggaaagcgagugcguuuguauuaacggcacuugcacaguggucaugaccgacgggucugcauccggaaaggccgauacuaaaauauuauuuaucgaggaagguaagauugugcacacaucaagccugaguggcucugcucaacacguggaggaaugcuccuguuauccucgguacccagggguccgcugcguuuguagagacaacuggaagggaagcaauaggccgaucguggauauaaacguaaaagacuacucgauugugucuuccuaugucugcucaggccuugugggugacacgccccggaagaaugauaguagcuccucuagccauuguuuggacccuaacaaugaggaagggggacacggcguuaaaggcugggccuucgaugacgggaacgauguguggaugggacgcaccaucucagagaagcugcgaagugguuacgagaccuuuaaagucaucgaaggcugguccaagccaaauagcaaacuacagauuaacagacaggugaucguagacagggggaaucggucuggauauucaggcauuuucaguguugaggguaagagcugcauaaaccguuguuuuuacguggaacucauccgcgggagaaagcaggagacagaaguccuguggacuuccaauucuauuguggucuucugcggcaccucgggaacauauggcacugggagcuggcccgauggagcggacaucaaccuuaugccuaucuga

SEQ ID NO: 142241 - RNA, 1410 nt, Artificial Sequence; identical to SEQ ID NO: 142109
  derived and/or modified CDS sequence (opt3) from neuraminidase__InfluenzaA__AAX57837

SEQ ID NO: 142242 - RNA, 1410 nt, Artificial Sequence
  derived and/or modified CDS sequence (opt3) from neuraminidase__InfluenzaA__AAX57847
augaaccccaaucagaagaucauuaccauaggcagcgugucccugacaaucgccacuauuugcuuccucaugcaaaucgcuauucuugucacgaccguuacacugcacuuuaaacaguacgaguguaacucuccuccaaauaaccaggugauguugugcgaaccgacuaucauagagagaaauaucaccgaaauuguauauuuaacaaacaccacuaucgagaaggaaauuugucccaaacuggcagaguacaggaauuggucaaagccucagugcaacaucacaggguucgccccauuuaguaaagacaauagcauacggcuauccgcgggaggugauauuugggugacccgcgagcccuaugucucuugugacccugauaagugcuaccaauucgcucucggccaggggacgacucugaacaauggacauucgaacgacaccgugcacgaucgaacaccauaucguacucuucugaugaaugaauugggcguucccuuucaucucgguaccaaacagguguguaucgccuggucaagcaguuccugccacgacgggaaggcauggcugcaugucugugugacaggagaugacgagaacgccaccgcuucuuucauuuacaauggcagacugguagauagcaucggcuccuggucaaagaaaauccucaggacgcaggaaagugagugcguuuguauuaacgggacuugcacaguggucaugaccgacggaagcgcaucugguaaggccgauacuaaaauauuauuuaucgaggaaggcaagauugugcacacaucccugcuuucagggagcgcucaacacguggaggaaugcaguuguuauccucgguacccaggaguccgcugcguuuguagagacaacuggaagggcucuaauaggccgaucguggauauaaacguaaaagacuacuccauugugagcucguaugucugcucugguuuggugggggacacgccccggaagaaugauuccucaaguagcucccauugucuggacccuaacaaugaggaaggaggccacggcguuaaagggugggccuucgaugacggaaacgauguguggaugggucgcaccaucucugagaagcuacgaagcggcuacgagaccuuuaaagucaucgaaggguggucaaagccaaauaguaaacuccagauuaacagacaggugaucguagacaggggaaaucgguccggcuauagcgguauuuucucuguugagucaaagaguugcauaaaccguuguuuuuacguggaacugauccgcgggagaaagcaggagacagaaguccuuuggacuagcaauuccauuguggucuucugcggcaccucuggaacauauggcacugggucguggcccgauggagcggacaucaaccugaugccuaucuga

SEQ ID NO: 142243 - RNA, 1410 nt, Artificial Sequence
  derived and/or modified CDS sequence (opt3) from neuraminidase__InfluenzaA__AAX57857
augaaccccaaucagaagaucauuaccauaggcagcgugucccugacaaucgccacuauuugcuuccucaugcaaaucgcuauucuugucacgaccguuacacugcacuuuaaacaguacgaguguaacucuccuccaaauaaccaggugauguugugcgaaccgacuaccaucgagagaaauauaacagaaaucguauauuuaaccaacacuacaauugagaaggaaaucugucccaaacuggcagaguacaggaauuggucaaagccucagugcaacauuaccggguucgccccauuuaguaaagacaauagcauccggcuauccgcgggaggugauauaugggugacgcgcgagcccuaugucucuugugacccugauaagugcuaccaauucgcucucggccaggggacuacccugaacaauggacauucgaacgacacagugcacgaucgaacuccauaucguacccuucugaugaaugaauugggcguucccuuucaucucgguacaaaacagguguguauugccuggucaagcaguuccugccacgacgggaaggcauggcugcaugucugugugaccggagaugacgagaacgccacggcuucuuucaucuacaauggcagacugguagauagcauuggcuccuggucaaagaaaauccucaggacucaggaaagugagugcguuuguaucaacgggacaugcaccguggucaugacugacggaagcgcaucugguaaggccgauacaaaaauuuuauuuauagaggaaggcaagaucgugcacaccuccucacugagcgggagugcucaacacguggaggaaugcucuuguuauccucgguacccaggaguccgcugcguuuguagagacaacuggaagggcuccaauaggccgauuguggauaucaacguaaaagacuacagcauagugucgucuuaugucugcuccggucuugugggggacacgccccggaagaaugauucaaguagcuccucucauuguuuggacccuaacaaugaggaaggaggccacggcguuaaagggugggccuucgaugacggaaacgauguguggaugggucgcaccauuagcgagaagcugcgaucaggcuacgagacauuuaaagucaucgaaggguggaguaagccaaauuccaaacuacagaucaacagacaggugauuguagacaggggaaaucggagcggcuauucugguaucuucucaguugaggggaagaguugcauuaaccguuguuuuuacguggaacucauacgcggcagaaagcaggagacugaaguccuguggaccagcaauuccaucguggucuucugcggaacaucuggcacuuaugggaccggaucguggcccgauggugcggacauuaaccuuaugccuaucuga

SEQ ID NO: 142244 - RNA, 1410 nt, Artificial Sequence; identical to SEQ ID NO: 142109
  derived and/or modified CDS sequence (opt3) from neuraminidase__InfluenzaA__AAX57867

SEQ ID NO: 142245 - RNA, 1410 nt, Artificial Sequence
  derived and/or modified CDS sequence (opt3) from neuraminidase__InfluenzaA__AAX57877
augaaccccaaucagaagaucauuaccauaggcagcgugucccugacaaucgccacuauuugcuuccucaugcaaaucgcuauucuugucacgaccguuacacugcacuuuaaacaguacgaguguaacucuccuccaaauaaccaggugauguugugcgaaccgacuaucauagagagaaauaucaccgaaauuguauauuuaacaaacaccacuaucgagaaggaaauuugucccaaacuggcagaguacaggaauuggucaaagccucagugcaacaucacaggguucgccccauuuaguaaagacaauagcauacggcuauccgcgggaggugauauuugggugacccgcgagcccuaugucucuugugacccugauaagugcuaccaauucgcucucggccaggggacgacucugaacaauggacauucgaacgacaccgugcacgaucgaacaccauaucguacucuucugaugaaugaauugggcguucccuuucaucucgguaccaaacagguguguaucgccuggucaagcaguuccugccacgacgggaaggcauggcugcaugucugugugacaggagaugacgagaacgccaccgcuucuuucauuuacaauggcagacugguagauagcaucggcuccuggucaaagaaaauccucaggacgcaggaaagugagugcguuuguauuaacgggacuugcacaguggucaugaccgacggaagcgcaucugguaaggccgauacuaaaauauuauuuaucgaggaaggcaagauugugcacacauccucacugagcgggagugcucaacacguggaggaaugcucuuguuauccucgguacccaggaguccgcugcguuuguagagacaacuggaagggcuccaauaggccgaucguggauauaaacguaaaagacuacagcauugugucgucuuaugucugcuccggucuugugggggacacgccccggaagaaugauucaaguagcuccucucauuguuuggacccuaacaaugaggaaggaggccacggcguuaaagggugggccuucgaugacggaaacgauguguggaugggucgcaccaucagcgagaagcugcgaucaggcuacgagaccuuuaaagucaucgaaggguggaguaagccaaauuccaaacuacagauuaacagacaggugaucguagacaggggaaaucggagcggcuauucugguauuuucucaguugaggggaagaguugcauaaaccguuguuuuuacguggaacucauccgcggcagaaagcaggagacagaaguccuguggacuagcaauuccauuguggucuucugcggaaccucuggcacauaugggacuggaucguggcccgauggugcggacaucaaccuuaugcauaucuga

SEQ ID NO: 142246 - RNA, 1410 nt, Artificial Sequence; identical to SEQ ID NO: 142109
  derived and/or modified CDS sequence (opt3) from neuraminidase__InfluenzaA__AAX57887

SEQ ID NO: 142247 - RNA, 1410 nt, Artificial Sequence
  derived and/or modified CDS sequence (opt3) from neuraminidase__InfluenzaA__AAX57897
augaaccccaaucagaagaucauuaccauaggcagcgugucccugacaaucgccacuauuugcuuccucaugcaaaucgcuauucuugucacgaccguuacacugcacuuuaaacaguacgaguguaacucuccuccaaauaaccaggugauguugugcgaaccgacuaucauagagagaaauaucaccgaaauuguauauuuaacaaacaccacuaucgagaaggaaauuugucccaaacuggcagaguacaggaauuggucaaagccucagugcaacaucacaggguucgccccauuuaguaaagacaauagcauacggcuauccgcgggaggugauauuugggugacccgcgagcccuaugucucuugugacccugauaagugcuaccaauucgcucucggccaggggacgacucugaacaauggacauucgaacgacaccgugcacgaucgaacaccauaucguacucuucugaugaaugaauugggcguucccuuucaucucgguaccaaacagguguguaucgccuggucaagcaguuccugccacgacgggaaggcauggcugcaugucugugugacaggagaugacgagaacgccaccgcuucuuucauuuacaauggcagacugguagauagcaucggcuccuggucaaagaaaauccucaggacgcaggaaagugagugcguuuguauuaacgggacuugcacaguggucaugaccgacggaagcgcaucugguaaggccgauacuaaaauauuauuuaucgaggaaggcaagauugugcacacauccucacugagcgggagugcucaacacguggaggaaugcucuuguuauccucgguacccaggaguccgcugcguuuguagagacaacuggaagggcuccaauaggccgaucguggauauaaacguaaaagacuacagcauugugucgucuuaugucugcuccggucuugugggggacacgccccggaagaaugauucaaguagcuccucucauuguuuggacccuaacaaugaggaaggaggccacggcguuaaagggugggccuucgauagcggaaacgacguguggaugggucgcaccaucucagagaagcugcgaaguggcuacgagaccuuuaaagucaucgaagggugguccaagccaaauagcaaacuacagauuaacagacaggugaucguagauaggggaaaucggucuggcuauucagguauuuucaguguugagggcaagagcugcauaaaccguuguuuuuacguggaacucauccgcgggagaaagcaggagacagaaguccuguggacuuccaauucuauuguggucuucugcggaaccucgggcacauaugggacuggaagcuggcccgacggugcggauaucaaccuuaugccuaucuga

SEQ ID NO: 142248 - RNA, 1410 nt, Artificial Sequence
  derived and/or modified CDS sequence (opt3) from neuraminidase__InfluenzaA__AAX57907
augaaccccaaucagaagaucauuaccauaggcagcgugucccugacaaucgccacuauuugcuuccucaugcaaaucgcuauucuugucacgaccguuacacugcacuuuaaacaguacgaguguaacucuccuccaaauaaccaggugauguugugcgaaccgacuaucauagagagaaauaucaccgaaauuguauauuuaacaaacaccacuaucgagaaggaaauuugucccaaacuggcagaguacaggaauuggucaaagccucagugcaacaucacaggguucgccccauuuaguaaagacaauagcauacggcuauccgcgggaggugauauuugggugacccgcgagcccuaugucucuugugacccugauaagugcuaccaauucgcucucggccaggggacgacucugaacaauggacauucgaacgacaccgugcacgaucgaacaccauaucguacucuucugaugaaugaauugggcguucccuuucaucucgguaccaaacagguguguaucgccuggucaagcaguuccugccacgacgggaaggcauggcugcaugucugugugacaggagaugacgagaacgccaccgcuucuuucauuuacaauggcagacugguagauagcaucggcuccuggucaaagaaaauccucaggacgcaggaaagugagugcguuuguauuaacgggacuugcacaguggucaugaccgacggaagcgcaucugguaaggccgauacuaaaauauuauuuaucgaggaaggcaagauugugcacacauccucacugagcgggagugcucaacacguggaggaaugcucuuguuauccucgguacccaggaguccgcugcguuuguagagacaacuggaagggcuccaauaggccgaucguggauauaaacguaaaagacuacagcauugugucgucuuaugucugcuccggucuugugggggacacgccccggaagaaugauucaaguagcuccucucauuguuuggacccuaacaaugaggaaggaggccacggcguuaaagggugggccuucgaugacggaaacgauguguggaugggucgcaccaucagcgagaagcugcgaucaggcuacgagaccuuuaaagucaucgaaggguggaguaagccaaauuccaaacuacagaugaacagacaggugauuguagacaggggaaaucggagcggcuauucugguaucuucucaguugaggggaagaguugcauuaaccguuguuuuuacguggaacucauacgcggcagaaagcaggagacagaaguccuguggacuagcaauuccaucguggucuucugcggaaccucuggcacauaugggacuggaucguggcccgauggugcggacauuaaccuuaugccuaucuga

SEQ ID NO: 142249 - RNA, 1410 nt, Artificial Sequence; identical to SEQ ID NO: 142109
  derived and/or modified CDS sequence (opt3) from neuraminidase__InfluenzaA__AAX57917

SEQ ID NO: 142250 - RNA, 1410 nt, Artificial Sequence; identical to SEQ ID NO: 142109
  derived and/or modified CDS sequence (opt3) from neuraminidase__InfluenzaA__AAX57927

SEQ ID NO: 142251 - RNA, 1410 nt, Artificial Sequence
  derived and/or modified CDS sequence (opt3) from neuraminidase__InfluenzaA__AAX57937
augaaccccaaucagaagaucauuaccauaggcagcgugucccugacaaucgccacuauuugcuuccucaugcaaaucgcuauucuugucacgaccguuacacugcacuuuaaacaguacgaguguaacucuccuccaaauaaccaggugauguugugcgaaccgacuaucauagagagaaauaucaccgaaaugguauauuuaacaaacaccacuauugagaaggaaaucugucccaaacuggcagaguacaggaauuggucaaagccucagugcaacauuacaggguucgccccauuuaguaaagacaauagcauccggcuauccgcgggaggugauauaugggugacccgcgagcccuaugucucuugugacccugauaagugcuaccaauucgcucucggccaggggacgacucugaacaauggacauucgaacgacaccgugcacgaucgaacaccauaucguacucuucugaugaaugaauugggcguucccuuucaucucgguaccaaacagguguguauugccuggucaagcaguuccugccacgacgggaaggcauggcugcaugucugugugacaggagaugacgagaacgccaccgcuucuuucaucuacaauggcagacugguagauagcauuggcuccuggucaaagaaaauccucaggacgcaggaaagugagugcguuuguaucaacgggacuugcacaguggucaugaccgacggaagcgcaucugguaaggccgauacuaaaauuuuauuuauagaggaaggcaagaucgugcacacaucccugcuuucagggagcgcucaacacguggaggaaugcaguuguuauccucgguacccaggaguccgcugcguuuguagagacaacuggaagggcucuaauaggccgauuguggauaucaacguaaaagacuacuccauagugagcucguaugucugcucugguuuggugggggacacuccccggaagaaugauuccucaaguagcucccauugucuggacccuaacaaugaggaaggaggccacggcguuaaagggugggccuucgaugacggaaacgauguguggaugggucgcacgauuucugagaagcuacgaagcggcuacgagaccuuuaaagucaucgaaggguggucaaagccaaauaguaaacuccagaucaacagacaggugauuguagacaggggaaaucgguccggcuauagcgguaucuucucuguugaggggaagucaugcauuaaccguuguuuuuacguggaacugauacgcggcagaaagcaggagacagaaguccuuuggaccaguaauagcaucguggucuucugcggaaccuccggcacauaugggacuggaucuuggcccgauggugcggacauuaaccugaugaggaucuga

SEQ ID NO: 142252 - RNA, 1410 nt, Artificial Sequence
  derived and/or modified CDS sequence (opt3) from neuraminidase__InfluenzaA__AAX57947
augaaccccaaucagaagaucauuaccauaggcagcgugucccugacaaucgccacuauuugcuuccucaugcaaaucgcuauucuugucacgaccguuacacugcacuuuaaacaguacgaguguaacucuccuccaaauaaccaggugauguugugcgaaccgacuaucauagagagaaauaucaccgaaauuguauauuuaacaaacaccacuaucgagaaggaaauuugucccaaacuggcagaguacaggaauuggucaaagccucagugcaacaucacaggguucgccccauuuaguaaagacaauagcauacggcuauccgcgggaggugauauuugggugacccgcgagcccuaugucucuugugacccugauaagugcuaccaauucgcucucggccaggggacgacucugaacaauggacauucgaacgacaccgugcacgaucgaacaccauaucguacucuucugaugaaugaauugggcguucccuuucaucucgguaccagacagguguguaucgccuggucaagcaguuccugccacgacgggaaggcauggcugcaugucugugugacaggagaugacgagaacgccaccgcuucuuucauuuacaauggcaggcugguagauagcaucggcuccuggucacggaaaauccuccgcacgcaggaaagugagugcguuuguauuaacgggacuugcacaguggucaugaccgacggaagcgcaucugguaaggccgauacuaaaauauuauuuaucgaggaaggcaagauugugcacaucuccacacugucagggagcgcucaacacguggaggaaugcaguuguuauccuagauacccaggagucaggugcguuugucgggacaacuggaaaggcucuaaucgcccgauaguggauauuaacguaaaggacuacuccaucgccagcucguauaugugcucuggucuugugggggacacgccccgaaagaaugauuccuucucaaguagccauuguuuggacccuaacaaugaggaaggaggccacggcgucaaagggugggcguuugaugacggaaacgauguguggauggguagaaccaucuccgagaagcugaggucuggcuacgagaccuucaaaguuauugaaggguggagcaagccaaauucaaaacuacagaucaaccgucaggugauugucgagcggggaaaucgcaguggcuauuccgguauauuuagcguggaagggaagucuugcaucaacagauguuucuacguagagcucauuaggggccggaaagaagagacagagguuugguggacuucaaauaguaucguggucuuuugcggaaccagcggcacauaugggacuggauccuggcccgacggugcagauaucaaccugaugccuauuuga

SEQ ID NO: 142253 - RNA, 1410 nt, Artificial Sequence; identical to SEQ ID NO: 142193
  derived and/or modified CDS sequence (opt3) from neuraminidase__InfluenzaA__AAX76626

SEQ ID NO: 142254 - RNA, 1410 nt, Artificial Sequence
  derived and/or modified CDS sequence (opt3) from neuraminidase__InfluenzaA__AAX76646
augaaccccaaucagaagaucauuaccauaggcagcgugucccugacaaucgccacuauuugcuuccucaugcaaaucgcuauucuugucacgaccguuacacugcacuuuaaacagcaugaguguaacucuccuccaaauaaccaggugauguugugcgaaccgacuaucauagagagaaauaucaccgaaauuguauacuuaacaaacaccacuaucgagaaggaaauuugucccaaacuggcagaguauaggaauuggucaaagccucagugcaacaucacaggguucgccccauuuaguaaagacaauagcauacggcuauccgcgggaggugauauuugggugacccgcgagcccuacgucucuugugacccugauaagugcuaucaauucgcucucggccaggggacgacucugaacaauggacacucgaacaauaccgugcaugaccgaacaccauaccguacucuucugaugaacgaauugggcguucccuuucaccucgguaccagacagguguguaucgccuggucaagcagugggugccaugauggaaaggcauggcugcacgucugugugacaggcgacgauaaaaaugccaccgcuuccuucauuuauaacggcaggcugguagacucuaucgggagcugguccaagaaaauccuccggacgcaggagucagaaugcguuuguauuaacggaacuugcacaguggucaugaccgaugguagugcaagcggcaaggccgacacuaaaauauuauuuaucgaggaggggaagauugugcacaucucuacacuguccggaucagcucaacauguggaagagugcagcuguuacccucgcuauccaggcgucagaugcguuuguagggauaauuggaaggguaguaaccggccgauaguggacauuaauguaaaagauuacucuaucguguccagcuacgucugcucggggcuugugggagacacccccaggaagaacgacucuuucuccucaagucacuguuuggauccuaauaacgaagagggcggccaugggguuaaaggaugggccuuugacgaugguaaugacguguggaugggccgaacgaucagcgaaaagcugagauccggguaugagaccuucaaagucauugagggauggucuaagccaaacagcaaacuacagaucaaucgccaggugauuguagaacggggcaaccguucagguuacagugggauauuuuccguugagggcaagagcugcaucaaucgcuguuucuauguggaacucauuagaggaaggaaggaggaaacagaggucugguggacuucuaacucaaucguggucuuuugcggcaccagugggacauacggaacugguagcuggcccgauggcgcggacaucaaucugaugccuauuuga

SEQ ID NO: 142255 - RNA, 1410 nt, Artificial Sequence; identical to SEQ ID NO: 142183
  derived and/or modified CDS sequence (opt3) from neuraminidase__InfluenzaA__AAX76656

SEQ ID NO: 142256 - RNA, 1410 nt, Artificial Sequence; identical to SEQ ID NO: 142228
  derived and/or modified CDS sequence (opt3) from neuraminidase__InfluenzaA__AAX76666

SEQ ID NO: 142257 - RNA, 1410 nt, Artificial Sequence; identical to SEQ ID NO: 142109
  derived and/or modified CDS sequence (opt3) from neuraminidase__InfluenzaA__AAX76696

SEQ ID NO: 142258 - RNA, 1410 nt, Artificial Sequence
  derived and/or modified CDS sequence (opt3) from neuraminidase__InfluenzaA__AAX76736
augaaccccaaucagaagaucauuaccauaggcagcgugucccugacaaucgccacuauuugcuuccucaugcaaaucgcuauucuugucacgaccguuacacugcacuuuaaacaguacgaguguaacucuccuccaaauaaccaggugauguugugcgaaccgacuaucauagagagaaauaucaccgaaauuguauauuuaacaaacaccacuaucgagaaggaaauuugucccaaacugucagaguacaggaauuggaguaagccucagugcaacaucacaggguucgcaccauuuagcaaagacaauuccauacggcuaucugccggaggugauauuugggugacccgcgagcccuaugucucgugugacccugauaagugcuaccaauucgcgcucggccaggggacgacucugaacaauggacauucaaacgacaccgugcacgaucgaacaccauaucguacucuucugaugaaugaauugggcguucccuuucaucucgguaccaaacagguguguaucgcuuggagcaguuccucuugccacgacgggaaggccuggcugcaugucugugugacaggagaugacgagaacgcaaccgccagcuucauuuacaauggcagacugguagauuccaucggcucauggaguaagaaaauccucaggacgcaggaaagcgagugcguuuguauuaacgggacuugcacaguggucaugaccgacggaucugcuuccgguaaggcagauacuaaaauauuauuuaucgaggaaggcaagauugugcacaucucaacacugagccggagugcccaacacguggaggaaugcucuuguuauccucgcuacccaggggucagaugcguuuguagggacaacuggaagggauccaaucggccgauaguggauauuaacguaaaagaccauagcaucgugucgucuuacgucugcuccggccuugugggugacacccccaggaagaaugauucauucaguagcucccacuguuuggacccuaacaaugaggaagggggacauggcguuaaaggcugggcuuuugaugacgggaacgauguguggaugggacgaacgaucucugagaagcugagaagcgguuaugagaccuucaaagucauugaaggcuggucaaagccaaauaguaaacuacagaucaaccgccaggugauuguagagcgggggaaucguuccggauacagcggcauauuuucuguugaagguaagucaugcaucaaccgcuguuucuauguggagcucauuagagggaggaaggaagagacagaggucugguggaccaguaauagcaucguggucuuuugcggcacuuccggaacauacggcacugggucuuggcccgacggagccgauaucaaccugaugccuauuuga

SEQ ID NO: 142259 - RNA, 1410 nt, Artificial Sequence
  derived and/or modified CDS sequence (opt3) from neuraminidase__InfluenzaA__AAX76766
augaaccccaaucagaagaucauuaccauaggcagcgugucccugacaaucgccacuauuugcuuccucaugcaaaucgcuauucuugucacgaccguuacacugcacuuuaaacagcaugaguguaacucuccuccaaauaaccaggugauguugugcgaaccgacuaucauagagagaaauaucaccgaaauuguauacuuaacaaacaccacuaucgagaaggaaauuugucccaaacuggcagaguauaggaauuggucaaagccucagugcaacaucacaggguucgccccauuuaguaaagacaauagcauacggcuauccgugggaggugauauuugggucacccgcgagcccuacgugucuugugacccugauaagugcuaucaauucgcgcucggccaggggacgacucugaacaauggacacucgaacgacaccguucaugaucgaacaccauaccguacucuucugaugaaugaauugggcgugcccuuucaccucgguaccagacaggucuguaucgcuuggucaagcaguuccugccaugacgggaaggccuggcugcacguguguguaacaggagaugacaaaaacgcaaccgccucuuucauuuauaauggcaggcugguugauagcaucggcuccuggucaaagaaaauccuccggacgcaggagagugaaugcguguguauuaacgggacuugcacagucgugaugaccgacggaagcgcuucugguaaggcagauacuaaaauauuauuuaucgaggagggcaagauugugcacaucuccacacugucagggagcgcccaacaugucgaagagugcaguuguuacccucgcuauccaggaguuagaugcguguguagggacaacuggaagggcucuaaucggccgauaguagauauuaacgugaaagacuacuccaucgucagcucguacgugugcucuggucuuguuggggacacgccccgcaagaaugauuccuucucaaguagccacuguuuggacccuaacaaugaagagggaggccauggcgugaaagggugggcuuuugaugacggaaacgaugucuggaugggucgaaccaucuccgaaaagcugagaucuggcuaugagaccuucaaagugauugagggguggagcaagccaaauucaaaacuacagaucaacaggcagguaauuguugaacggggaaaucguaguggcuacuccgguauauuuagcguggaggggaagucuugcaucaaccgcuguuucuaugucgaacucauuagaggcaggaaggaggaaacagaggugugguggacuucaaauaguaucgucguguuuugcggaaccagcggcacauacgggacuggauccuggcccgacggugccgauaucaaccugaugccuauuuga

SEQ ID NO: 142260 - RNA, 1410 nt, Artificial Sequence; identical to SEQ ID NO: 142185
  derived and/or modified CDS sequence (opt3) from neuraminidase__InfluenzaA__AAY18089

SEQ ID NO: 142261 - RNA, 1410 nt, Artificial Sequence
  derived and/or modified CDS sequence (opt3) from neuraminidase__InfluenzaA__AAY18099
augaaccccaaucagaagaucauuaccauaggcagcgugucccugacaaucgccacuauuugcuuccucaugcaaaucgcuauucuugucacgaccguuacacugcacuuuaaacagcaugaguguaacucuccuccaaauaaccaggugauguugugcgaaccgacuaucauagagagaaauaucaccgaaauuguauacuuaacaaacaccacuaucgagaaggaaauuugucccaaacuggcagaguauaggaauuggucaaagccucagugcaacaucacaggguucgccccauuuaguaaagacaauagcauacggcuauccgcgggaggugauauuugggugacccgcgagcccuacgucucuugugacccugauaagugcuaucaauucgcucucggccaggggacgacucugaacaauggacacucgaacaauaccgugcaugaccgaacaccauaccguacucuucugaugaacgaauugggcguucccuuucaccucgguaccagacagguguguaucgccuggucaagcaguuccugccaugaugggaaggcauggcugcacgucugugugacaggagacgauaaaaaugccaccgcuucuuucauuuauaacggcaggcugguagacagcaucggcuccuggucaaagaaaauccuccggacgcaggagagugaaugcguuuguauuaacgggacuugcacaguggucaugaccgauggaagcgcaucugguaaggccgacacuaaaauauuauuuguggaggagggcaagaucgugcacauuuccacacugucagggagcgcucaacaugucgaagagugcaguuguuacccucgcuauccaggaguuagaugcguguguagggauaauuggaagggcucuaaccggccgaucguagacauaaaugugaaagauuacuccauugucagcucguacgugugcucuggucuuguuggggacacgccccgcaagaacgacuccuucucaaguagccacuguuuggauccuaauaacgaagagggaggccauggcgugaaagggugggccuuugacgauggaaaugacgucuggaugggucgaaccaucuccgaaaagcugagaucuggcuaugagaccuucaaagugaucgagggguggagcaagccaaacucaaaacuacagauuaauaggcagguaaucguugaacggggaaaccguaguggcuacuccgguauuuuuagcguggaggggaagucuugcauaaaucgcuguuucuaugucgaacucaucagaggcaggaaggaggaaacagaggugugguggacuucaaacaguauugucguguuuugcggaaccagcggcacauacgggacuggauccuggcccgauggugcggacaucaaucugaugccuaucuga

SEQ ID NO: 142262 - RNA, 1410 nt, Artificial Sequence
  derived and/or modified CDS sequence (opt3) from neuraminidase__InfluenzaA__AAY18109
augaaccccaaucagaagaucauuaccauaggcagcgugucccugacaaucgccacuauuugcuuccucaugcaaaucgcuauucuugucacgacccugacauugcacuuuaaacaguacgaguguaacucuccuccaaauaaccagguuauguuaugcgaaccggcaaucauagagagaaauaucacugaaauuguguaucugaccaacacaaccaucgagaaggaaaaaugucccaagcuagccgaguacaggaauuggucaaaaccucagugcaacauuacuggguucgcgccauuuaguaaggacaauagcauccggcucuccgcuggaggugauauauggguaacacgcgagcccuaugugucuugugacccugauaagugcuaccaauucgcccugggccaggggaccacgcuuaacaauggacauucgaacgacacuguccacgaucgaaccccauaucguacacuguugaugaaugaacucggcgugcccuuucaucuggguacuagacagguuuguauugcauggucaagcaguuccugccacgacgggaaagccuggcugcaugugugugucaccggagaugacgagaacgcuacagcaucuuucaucuacaauggcaggcucguggauagcauuggcuccuggucaaagaaaaucuuacggacccaggaaagugagugcguauguaucaacgggacgugcacuguugugaugacagacggaagcgccucugguaaggcugauaccaaaauucuguuuauagaggaaggcaagaucgucaacauuuccacucuuucagggagcgcccaacacguggaggaaugcaguuguuauccucgcuacccaggagugagaugcgucuguagggacaauuggaagggcucuaaccggccgaucguugauauaaaugugaaagacuacuccauuguaagcucguaugugugcucugguuuggucggggacacaccccgcaagaacgauuccuucucaaguagccacugucuggacccuaauaacgaggaaggaggccauggcgugaaagggugggcguuugaugacggaaaugauguuuggaugggucgaaccaucuccgagaagcuaagaucuggcuacgagacguucaaagugaucgaaggguggagcaagccaaacucaaaacuccagauuaauaggcaggucaucguggagcggggaaaccguaguggcuauuccgguauuuuuagcguagaagggaagucuugcauaaaucgcuguuucuacguugagcugaucagaggcaggaaggaagagaccgaggugugguggacaucaaacaguauugucguguuuugcggaacuagcggcaccuaugggacaggauccuggcccgacggugcagauaucaaucuuaugccuaucuga

SEQ ID NO: 142263 - RNA, 1410 nt, Artificial Sequence; identical to SEQ ID NO: 142221
  derived and/or modified CDS sequence (opt3) from neuraminidase__InfluenzaA__AAY18119

SEQ ID NO: 142264 - RNA, 1410 nt, Artificial Sequence
  derived and/or modified CDS sequence (opt3) from neuraminidase__InfluenzaA__AAY18129
augaaccccaaucagaagaucauuaccauaggcagcgugucccugacaaucgccacuauuugcuuccucaugcaaaucacgauucuugucaccacaguuacucugcacuuuaaacaguacgaguguaacucuccuccaaauaaccaggugauguugugcgaaccgaccaucauagagagaaauaucacagaaauuguauauuuaaccaacacuacaaucgagaaggaaauuugucccaaacuggcugaguacaggaauuggucaaagccucagugcaacaucaccggguucgcaccauuuaguaaagacaauagcauacggcuauccgccggaggugauauuugggugacgcgcgagcccuaugucucuugugacccugauaagugcuaccaauucgcgcucggccaggggacuacccugaacaauggacauucgaacgacacagugcacgaucgaacuccauaucguacccuucugaugaaugaauugggcguucccuuucaucucgguacaagacagguguguaucgcuuggucaagcaguuccugccacgacgggaaggccuggcugcaugucugugugaccggagaugacaaaaacgcaacggccucuuucauuuacaauggcaggcugguagauagcaucggcuccuggucaaagaaaauccuccggacucaggagagugaaugcguuuguauuaacgggacaugcaccguggucaugacugacggaagcgcuucugguaaggcagauacaaaaauauuauuuaucgaggagggcaagauuauccacauauccacccugucagggagcgcccaacacguggaagagugcaguuguuauccucgcuacccaggagugagaugcgucuguagggacaacuggaagggcucuaaucggccgauuguugauaucaacgugaaagacuacuccaucguaagcucguaugugugcucuggucuugucggggacacgccccgcaagaaugauuccucaaguagcucccauuguuuggacccuaacaaugaagagggaggccacggcgugaaagggugggcuuucgaugacggaaacgauguuuggaugggucgaaccauuucugaaaagcugagaagcggcuacgagacauuuaaagugaucgagggguggucaaagaguaauuccaaacuacagauuaacaggcaggucauaguggaacggggaaaucguagcggcuauucugguaucuucucaguagaggggaagaguugcauuaaccgcuguuuuuacguugaacucaucagaggcaggaaggaggaaacugaggugugguggaccagcaauuccaucgucguguucugcggaacaucuggcacuuaugggaccggaucguggccagacggugccgauauuaaccugaugcccauauga

SEQ ID NO: 142265 - RNA, 1410 nt, Artificial Sequence
  derived and/or modified CDS sequence (opt3) from neuraminidase__InfluenzaA__AAY18139
augaaccccaaucagaagaucauuaccauaggcagcgugucccugacaaucgccacuauuugcuuccucaugcaaaucgcuauucuugucacgaccguuacacugcacuuuaaacagcaugaguguaacucuccuccaaauaaccaggugauguugugcgaaccgacuaucauagagagaaauaucaccgaaauuguauacuuaacaaacaccacuaucgagagggaaauuugucccaagcuggcagaguaucggaauuggucaaaaccucagugcaacaucacaggguucgccccauuuaguaaggacaauagcauacgccuauccgcgggaggugauauuugggugacccgagagcccuacgucucuugugacccugauaaaugcuaucaauucgcucucggccaggggacgacucugaacaaucgucacucgaacgacaccgugcaugauagaacaccauacaggacucuucugaugaaugaauugggaguucccuuucaccucggcacccgccagguguguaucgccuggucaagcaguuccugccaugacgguaaggcauggcugcacgucugugugacaggggaugacaagaacgccaccgcuucuuucauuuauaauggacggcugguagauagcaucggcuccuggaguaaaaagauccucagaacgcaggagagugaaugcguuuguauuaacggcacuugcacaguggucaugaccgacgggagcgcaucuggaaaagccgauacuaagauauuauuuaucgaggaggguaaaauugugcacaucuccacacugucaggcagcgcucaacauguggaagagugcaguuguuacccuagguauccagggguccggugcguuugucgcgacaacuggaagggaucuaaucgaccgauaguggauauuaacguaaaggacuacuccaucgugagcucguacgucugcucuggccuugugggugacacccccagaaagaaugauuccucaaguagcucccacuguuuggacccuaacaaugaagaagggggacauggcguuaaaggcugggccuucgaugacgggaacgauguguggaugggaaggacgaucucugagaaacugcggagcgguuaugagaccuuuaaggucauugagggcuggucaaaaccaaauaguaagcuacagaucaaccgucaggugauuguagaacgcgggaauagauccggauacagcggcauauucucuguugaggguaaaucaugcaucaacagguguuuuuauguggaacucauucgggggcgaaaggaggaaacagaggucugguggacuucaaauagcaucguggucuucugcggcaccuccggaacauacggcacugggucuuggcccgacggagcggauaucaaccugaugccuauuuga

SEQ ID NO: 142266 - RNA, 1410 nt, Artificial Sequence
  derived and/or modified CDS sequence (opt3) from neuraminidase__InfluenzaA__AAY18149
augaaccccaaucagaagaucauuaccauaggcagcgugucccugacaaucgccacuauuugcuuccucaugcagaucgcuauucuugucacgaccguuacacugcacuuuaaacagcaugaguguaacucuccuccaaauaaccaggugauguugugcgaaccgacuaucauagagagaaauaucaccgaaauuguauacuuaacaaacaccacuaucgagaaggaaauuugucccaaacuggcagaguauaggaauuggucaaagccucagugcaacaucacaggguucgccccauuuaguaaagacaauagcauacggcuauccgcgggaggugauauuugggugacccgcgagcccuacgucucuugugacccugauaagugcuaucaauucgcucucggccaggggacgacucugaacaauggacacucgaacgacaccgugcaugaucgaacaccauaccguacucuucugaugaaugaauugggcguucccuuucaccucgguaccagacagguguguaucgccuggucaagcaguuccugccaugacgggaaggcauggcugcacgucugugugacaggagaugacaaaaacgccaccgcuucuuucauuuauaauggcaggcugguagauagcaucggcuccuggucaaagaaaauccuccggacgcaggagagugaaugcguuuguauuaacgggacuugcacaguggucaugaccgacggaagcgcaucugguaaggccgauacuaaaauauuauuuaucgaggagggcaagauugugcacaucuccacacugucagggagcgcucaacauguggaagagugcaguuguuacccucgcuauccaggagucagaugcguuuguagggacaacuggaagggcucuaaucggccgaccguggauauaaacguaaaagacuacuccauugugagcucguacgucugcucuggucuugugggggacacgccccgcaagaaugauuccucaaguagcucccacuguuuggacccuaacaaugaagagggaggccauggcguuaaagggugggccuucgaugacggaaacgauguguggaugggucgaaccaucucugaaaagcugagaagcggcuaugagacauuuaaagucaucgagggguggucaaagccaaauaguaaacuacagauuaacaggcaagugaucguagaacggggaaaucguuccggcuacagcgguauuuucucuguugaggggaagucaugcauaaaccgcuguuuuuauguggaacucaucagaggcaggaaggaggaaacugaggucugguggaccaguaauagcauuguggucuucugcggaacauccggcacuuacgggaccggaucuuggcccgacggugcggauaucaaccugaugccuaucuga

SEQ ID NO: 142267 - RNA, 1410 nt, Artificial Sequence
  derived and/or modified CDS sequence (opt3) from neuraminidase__InfluenzaA__AAY18159
augaaccccaaucagaagaucauuaccauaggcagcgugucccugaucauugccacaaucugcuuccucaugcaaauugcuauccuugucacuacgguuacccugcacuuuaaacaguacgaguguaacucuccuccaaauaaccaggugauguugugcgaaccgacaauaaucgagagaaauauuacugaaaucguauauuuaaccaacacaaccauugagaaggaaaucugucccaaacuggcagaguacaggaauuggucaaagccucagugcaacauaacuggguucgccccauuuaguaaagacaauagcauucggcuauccgcgggaggugauaucugggugacacgcgagcccuaugucucuugugacccugauaagugcuaccaauucgcucucggccaggggaccacgcugaacaauggacauucgaacgacacugugcacgaucgaaccccauaucguacacuucugaugaaugaauugggcguucccuuucaucucgguacuaaacagguguguauugccuggucaagcaguuccugccacgacgggaaggcauggcugcaugucugugugaccggagaugacgagaacgccacagcuucuuucaucuacaauggcagacugguagauagcaucggcuccuggucaaagaaaauucucaggacccaggaaagugagugcguuuguauaaacgggacgugcacuguggucaugacagacggaagcgcaucugguaaggccgauaccaaaaucuuauuuauugaggaaggcaagaucgugcacacuuccucacugagcgggagugcucaacacguggaggaaugcucuuguuauccucgguacccaggaguccgcugcguuuguagagacaacuggaagggcuccaauaggccgauaguggauauuaacguaaaagacuacagcaucgugucgucuuaugucugcuccggucuugugggggacacaccccggaagaaugauucaaguagcuccucucauuguuuggacccuaacaaugaggaaggaggccacggcguuaaagggugggccuucgaugacggaaacgauguguggaugggucgcaccaucagcgagaagcugcgaucaggcuacgagacguuuaaagucauugaaggguggaguaagccaaauuccaaacuacagaucaacagacaggugauuguagacaggggaaaucggagcggcuauucugguauauucucaguugaggggaagaacugcaucaaucguuguuuuuacguggaacucauucgcggcagaaagcaggagaccgaaguccuguggacaaguaacagcaucguggucuucugcggaacuuccggcaccuaugggacaggaucuuggcccgauggugcggacaucaaucuuaugccuauuuga

SEQ ID NO: 142268 - RNA, 1410 nt, Artificial Sequence; identical to SEQ ID NO: 142109
  derived and/or modified CDS sequence (opt3) from neuraminidase__InfluenzaA__AAY18179

SEQ ID NO: 142269 - RNA, 1410 nt, Artificial Sequence; identical to SEQ ID NO: 142109
  derived and/or modified CDS sequence (opt3) from neuraminidase__InfluenzaA__AAY18189

SEQ ID NO: 142270 - RNA, 1410 nt, Artificial Sequence
  derived and/or modified CDS sequence (opt3) from neuraminidase__InfluenzaA__AAY18199
augaaccccaaucagaagaucauuaccauaggcagcgugucccugacaaucucuacuauuugcuucuuuaugcaaaucgccauucucaucacgaccgucacacuucacuucaaacaguacgaguuuaacucaccuccaaauaaccagguuaugcugugugaaccgacuauaaucgagagaaauauuaccgaaaucguguauuugacaaacaccacuauugagaaggaaaucugccccaaauuagcugaguacaggaauuggaguaagccucaguguaacauaacaggguucgcaccauuuagcaaagacaauuccauucggcugucugccggaggugauaucuggguaacccgcgagcccuaugugucgugcgacccugauaaguguuaccaauucgcgcuaggccaggggacgacucucaacaauguccauucaaacgacaccgugcacgaucgaacaccauaucguacucugcuuaugaaugaacugggaguucccuuucauuugggcaccaaacaggugugcauugcuuggagcaguuccucuugucacgacgguaaggccuggcuccaugucugcgugacaggggaugacgagaacgcaaccgccagcuucaucuacaauggaagacugguagauuccaucguuucauggaguaagaaaauucugaggacgcaggaaagcgagugugugugcauaaacggcacuuguacagucgugaugaccgacggcucugcuuccgggaaggcagauacuaaaauccucuuuauugaggaaggaaagaucgugcacacaucaaccuuaagcgguagugcccaacacgucgaggaaugcucuugcuauccucgguacccaggcguucgcugugugugcagagacaacuggaagggguccaauaggccgauaguagauauuaacaucaaagacuacagcaucgugucgucuuaugucuguuccggacuggugggcgacacgccccggaagaaugauucaaguagcuccucucauugccuugacccuaacaaugaggaaggugggcagggaguuaaaggcugggcuuucgaugacggcaacgauguguggauggggcgcaccauuagcgagaaguugcacucaggauacgagacauuuaaagucaucgaagguuggaguaauccaaacuccaagcugcagauuaaucgacaggugauaguagacagaggcaacaggagcggguauucuggaaucuucucaguugagggcaaaaguuguauuaaucggugcuuuuacguggaacuaauccguggucgcaagcaagagacugaaguccucuggaccagcaacuccaucguggucuucugugggacaucuggcacuuauggaaccggcucguggcccgauggggccgacauuaaucugaugccuauauga

SEQ ID NO: 142271 - RNA, 1410 nt, Artificial Sequence; identical to SEQ ID NO: 142212
  derived and/or modified CDS sequence (opt3) from neuraminidase__InfluenzaA__AAY18588

SEQ ID NO: 142272 - RNA, 1410 nt, Artificial Sequence; identical to SEQ ID NO: 142193
  derived and/or modified CDS sequence (opt3) from neuraminidase__InfluenzaA__AAY18614

SEQ ID NO: 142273 - RNA, 1410 nt, Artificial Sequence
  derived and/or modified CDS sequence (opt3) from neuraminidase__InfluenzaA__AAY27846
augaaccccaaucagaagaucauuaccauaggcagcgugucccugacaaucgccgcuauuugcuuccucaugcagaucgcaauucuugucacuacgguuacccugcacuuuaaacagcaugaguguaacucuccuccaaauaaccaggugauguugugcgaaccgacaaucauagagagaaauaucacugaaauuguauacuuaaccaacacaaccaucgagaaggaaauuugucccaaacuggccgaguauaggaauuggucaaagccucagugcaacaucacuggguucgcgccauuuaguaaagacaauagcauacggcuauccgcuggaggugauauuugggugacacgcgagcccuacgucucuugugacccugauaagugcuaucaauucgcccucggccaggggaccacgcugaacaauggacacucgaacgacacugugcaugaucgaaccccauaccguacacuucugaugaaugaauugggcguucccuuucaccucgguacuagacagguguguaucgcauggucaagcaguuccugccaugacgggaaggccuggcugcacgucugugugaccggagaugacaaaaacgcuacagcaucuuucauuuauaauggcaggcugguagauagcaucggcuccuggucaaagaaaauccuccggacccaggagagugaaugcguuuguauuaacgggacgugcacuguggucaugacagacggaagcgccucugguaaggcugauaccaaaauauuauuuaucgaggagggcaagauugugcacaucuccacucugucagggagcgcccaacauguggaagagugcaguuguuacccucgcuauccaggagucagaugcguuuguagggacaacuggaagggcucuaaucggccgauaguggauauuaacguaaaagacuacuccaucgugagcucguacgucugcucuggucuugugggggacacaccccgcaagaaugauuccuucucaaguagccacuguuuggacccuaacaaugaagagggaggccauggcguuaaagggugggcguuugaugacggaaacgauguguggaugggucgaaccaucuccgaaaagcugagaucuggcuaugagacguucaaagucauugagggguggagcaagccaaauucaaaacuacagaucaacaggcaagugauuguagaacggggaaaucguaguggcuacuccgguauauuuagcguugaggggaagucuugcaucaaccgcuguuucuauguggaacucauuagaggcaggaaggaggaaaccgaggucugguggacaucaaauaguaucguggucuuuugcggaacuagcggcaccuacgggacaggauccuggcccgacggugcagauaucaaccugaugccuauuuga

SEQ ID NO: 142274 - RNA, 1410 nt, Artificial Sequence
  derived and/or modified CDS sequence (opt3) from neuraminidase__InfluenzaA__AAY27856
augaaccccaaucagaagaucauuaccauaggcagcgugucccugacaaucgccacuauuugcuuccucaugcaaaucgcuauucuugucacgaccguuacacugcacuuuaaacagcaugaguguaacucuccuccaaauaaccaggugauguugugcgaaccgacuaucauagagagaaauaucaccgaaauuguauacuuaacaaacaccacuaucgagaaggaaauuugucccaaacuggcagaguauaggaauuggucaaagccucagugcaacaucacaggguucgccccauuuaguaaagacaauagcauacggcuauccgcgggaggugauauuugggugacccgcgagcccuacgucucuugugacccuggcaagugcuaucaauucgcucucgggcagggaacgacucugaacaauggccacucgaacgauaccgugcaugaccgaacaccauaccguacucuucugaugaaugaauuggguguucccuuucaccucgggaccagacagguguguaucgccuggucaagcaguuccugccaugauggaaaggcauggcugcacgucugugugacaggcgacgauaaaaacgccaccgcuucuuucauuuauaauggcaggcugguagacagcaucggguccuggucaaagaaaauccuccggacgcaggagagugaaugcguuuguauuaacggaacuugcacaguggucaugaccgaugguagcgcaucuggcaaggccgacacuaaaauauuauuuaucgaggaggggaagauugugcacaucuccacacugucaggaagcgcucaacauguggaagagugcaguuguuacccucgcuauccaggcgucagaugcguuuguagggauaacuggaaggguucuaaucggccgauaguggacauuaacguaaaagauuacuccaucgugagcucguacgucugcucugggcuugugggagacacccccaggaagaaugacuccucaaguagcucccacuguuuggauccuaacaaugaagagggcggccaugggguuaaaggaugggccuucgacgaugguaacgacguguggaugggccgaacgaucucugaaaagcugagaagcggguaugagaccuuuaaagucauugagggauggucaaagccaaauaguaaacuacagaucaaccgccaggugauuguagaacggggcaaucguuccgguuacagcgggauauucucuguugagggcaagucaugcaucaaccgcuguuuuuauguggaacucauuagaggaaggaaggaggaaacagaggucugguggaccaguaauagcaucguggucuucugcggcacuuccgggacauacggaacugguucuuggcccgauggcgcggacaucaaccugaugccuauuuga

SEQ ID NO: 142275 - RNA, 1410 nt, Artificial Sequence; identical to SEQ ID NO: 142185
  derived and/or modified CDS sequence (opt3) from neuraminidase__InfluenzaA__AAY27866

SEQ ID NO: 142276 - RNA, 1410 nt, Artificial Sequence
  derived and/or modified CDS sequence (opt3) from neuraminidase__InfluenzaA__AAY27962
augaaccccaaucagaagaucauuaccauaggcagcgugucccugacaaucgccacuauuugcuuccucaugcaaaucgcuauucuugucacgaccguuacacugcacuuuaaacaguacgaguguaacucuccuccaaauaaccaggugauguugugcgaaccgacuaucauagagagaaauaucaccgaaauuguauauuuaacaaacaccacuaucgagaaggaaauuugucccaaacuggcagaguacaggaauuggucaaagccucagugcaacaucacaggguucgccccauuuaguaaagacaauagcauacggcuauccgcgggaggugauauuugggugacccgcgagcccuaugucucuugugacccugauaagugcuaccaauucgcucucggccaggggacgacucugaacaauggacauucgaacgacaccgugcacgaucgaacaccauaucguacucuucugaugaaugaauugggcguucccuuucaucucgguaccagacagguguguaucgccuggucaagcaguuccugccacgacgggaaggcauggcugcaugucugugugacaggagaugacgagaacgccaccgcuucuuucauuuacaauggcaggcugguagauagcaucggcuccuggaguaaaaagauccuccggacgcaggaaucagagugcguuuguauuaacgggacuugcacaguggucaugaccgacggaagcgcaucugguaaagccgauacuaagauauuauuuaucgaggaaggcaaaauugugcacaucuccacacugucagggagcgcucaacacguggaggaaugcaguuguuauccucgcuacccaggagucagaugcguuuguagggacaacuggaagggcucuaaucggccgauaguggauauuaacguaaaggacuacuccaucgugagcucguaugucugcucuggucuugugggggacacccccaggaaaaaugauuccuucucaaguagccauuguuuggacccuaacaaugaggaaggaggccacggcguuaaggggugggccuuugaugacggaaacaauguguggaugggucgaacgaucuccgagaaacugagaucuggcuacgagaccuucaaggucauugaaggguggagcaaaccaaacucaaagcuacagacaaaucgccaggugaucguagagcggggaaaccguaguggcuauuccgguauuuuuagcguugaagggaaaucuugcauaaaucgcuguuucuacguggagcucaucagaggcaggaaggaagagacugaggucugguggaccucaaacaguauuguggucuuuugcggaacaagcggcacuuaugggaccggauccuggcccgauggugcggacaucaaucugaugccuaucuga

SEQ ID NO: 142277 - RNA, 1410 nt, Artificial Sequence
  derived and/or modified CDS sequence (opt3) from neuraminidase__InfluenzaA__AAY27997
augaaccccaaucagaagaucauuaccauaggcagcgugucccugacaaucgccacuauuugcuuccucaugcaaaucgcuauucuugucacgaccguuacacugcacuuuaaacagcaugaguguaacucuccuccaaauaaccaggugauguugugcgaaccgacuaucauagagagaaauaucaccgaaauuguauacuuaacaaacaccacuaucgagaaggaaauuugucccaaacuggcagaguauaggaauuggucaaagccucagugcaacaucacaggguucgccccauuuaguaaagacaauagcauacggcuauccgcgggaggugauauuugggugacccgcgagcccuacgucucuugugacccugauaagugcuaucaauucgcucucggccaggggacgacucugaacaauggacacucgaacaauaccgugcaugaccgaacaccauaccguacucuucugaugaacgaaaugggcguucccuuucacuuggguaccagacagguguguaucgccuggucaagcaguuccugccaugaugggaaggcauggcuccacgucugugugacaggagacgauaaaaaugccaccgcuucuuucauuuauaacggcaggcugguagacagcaucggcuccuggucaaagaaaauccugcggacgcaggagagugaaugcguuuguauuaacgggacuugcacaguggucaugaccgauggaagcgcaucugguaaggccgacacuaaaauacucuuuaucgaggagggcaagauugugcacaucuccacauuaucagggagcgcucaacauguggaagagugcaguuguuacccucgcuauccaggagucagaugcguuuguagggauaauuggaagggcucuaaccggccgauaguggacauuaauguaaaagauuacuccaucgugagcucguacgucugcucuggucuggugggggacacccccaggaagaacgacuccuucucaaguagccacugucuugauccuaauaacgaagagggaggccauggcguuaaagggugggccuuugacgauggaaaugacguguggaugggucgaacgaucuccgaaaaguugagaucuggcuaugagaccuucaaagucauugagggguggagcaagccaaacucaaaacugcagaucaaucgccaggugauuguagaacggggaaaccguaguggcuacuccgguauauuuagcguugaggggaagucuugcaucaaucgcuguuucuauguggaacuaauuagaggcaggaaggaggaaacagaggucugguggacuucaaacaguaucguggucuuuugcggaaccagcggcacauacgggacuggauccuggcccgauggugcggacaucaaucucaugccuauuuga

SEQ ID NO: 142278 - RNA, 1410 nt, Artificial Sequence; identical to SEQ ID NO: 142183
  derived and/or modified CDS sequence (opt3) from neuraminidase__InfluenzaA__AAY28007

SEQ ID NO: 142279 - RNA, 1410 nt, Artificial Sequence; identical to SEQ ID NO: 142228
  derived and/or modified CDS sequence (opt3) from neuraminidase__InfluenzaA__AAY28017

SEQ ID NO: 142280 - RNA, 1410 nt, Artificial Sequence; identical to SEQ ID NO: 142183
  derived and/or modified CDS sequence (opt3) from neuraminidase__InfluenzaA__AAY28268

SEQ ID NO: 142281 - RNA, 1410 nt, Artificial Sequence
  derived and/or modified CDS sequence (opt3) from neuraminidase__InfluenzaA__AAY28278
augaaccccaaucagaagaucauuaccauaggcagcgugucccugacaaucgccacuauuugcuuccucaugcaaaucgcuauucuugucacgaccguuacacugcacuuuaaacaguacgaguguaacucuccuccaaauaaccaggugauguugugcgaaccgacuaucauagagagaaauaucaccgaaauuguauauuuaacaaacaccacuaucgagaaggaaauuugucccaaacuggcagaguacaggaauuggucaaagccucagugcaaaaucacaggguucgccccauuuaguaaggacaacagcauacggcuauccgcgggaggugauauuugggugacccgcgagcccuaugucucuugugacccugauaagugcuaccaauucgcucucggccaggggacgacucugaauaaccgacauucgaaugacaccgugcacgaucguacaccauauagaacucuucugaugaacgaauugggaguucccuuucaucucggcaccaaacagguguguaucgccuggucaagcaguuccugccacgacgguaaggcauggcugcaugucugugugacagggcacgaugagaaugccaccgcuucuuucauuuacgacggaaggcugguagauagcaucggcuccuggaguaaaaagauccuccggacgcaggaaucagagugcguuuguauuaacggcacuugcacaguggucaugaccgacgggagcgcaucuggacgcgccgauacuaaaauauuauuuaucgaggaagguaagauugugcacacauccaagcugucaggcagcgcucaacauguggaggaaugcaguuguuauccuagauacccaggggucaggugcguuugucgggacaauuggaaaggaucuaaccgcccgaucguggauauaaacguaaaggacuacuccauugugagcucguaugucugcucuggccuugugggugacacgccccggaaaaaugauuccucaaguagcucccacuguuuggacccuaacaaugaggaagggggacauggcguuaagggcugggccuucgaugacgggaacgauguguggaugggaagaaccaucucugagaaaagcaggucagguuacgagaccuuuaaggucaucgaaggcuggaguaaaccaaauuccaagcugcagauuaaccgacaggugaucguagagcgugggaaucgcagcggauauucuggcauuuucucaguugaagguaagaguugcauaaacagauguuuuuacguggagcuaaucagggggcggaaacccgaaacagaggucugguggacuagcaauuccauuguggucuucugcggcaccucuggaacauauggcacugggucguggccugacggagcggauaucaaccucaugccaaucuga

SEQ ID NO: 142282 - RNA, 1410 nt, Artificial Sequence; identical to SEQ ID NO: 142197
  derived and/or modified CDS sequence (opt3) from neuraminidase__InfluenzaA__AAY28288

SEQ ID NO: 142283 - RNA, 1410 nt, Artificial Sequence
  derived and/or modified CDS sequence (opt3) from neuraminidase__InfluenzaA__AAY28298
augaaccccaaucagaagaucauuaccauaggcagcgugucccugacaaucgccacuauuugcuuccucaugcaaaucgcuauucuugucacgaccguuacacugcacuuuaaacagcaugaguguaacucuccuccaaauaaccaggugauguugugcgaaccgacuaucauagagagaaauaucaccgaaauuguauacuuaacaaacaccacuaucgagaaggaaauuugucccaaacuggcagaguauaggaauuggucaaagccucagugcaacaucacaggguucgccccauuuaguaaagacaauagcauacggcuauccgcgggaggugauauuugggugacccgcgagcccuacgucucuugugacccugauaagugcuaucaauucgcucucggccaggggacgacucugaacaauggacacucgaacgacaccgugcaugaucgaacaccauaccguacucuucugaugaaugaauugggcguucccuuucaccucgguaccagacagguguguaucgccuggucaagcaguuccugccaugacgggaaggcauggcugcacgucugugugacaggagaugacaaaaacgccaccgcuucuuucauuuauaauggcaggcugguagauagcaucggcuccuggucaaagaaaauccuccggacgcaggagagugaaugcguuuguauuaacgggacuugcacaguggucaugaccgacggaagcgcaucugguaaggccgauacuaaaauauuauuuaucgaggagggcaagauugugcacaucuccacacugucagggagcgcucaacauguggaagagugcaguuguuacccucgcuauccaggagucagaugcguuuguagggacaacuggaagggcucuaaucggccgauaguggauauuaacguaaaagacuacuccaucgugagcucguacgucugcucuggucuugugggggacacuccccgcaagaaugauuccucaaguagcucccacuguuuggacccuaacaaugaagagggaggccauggcguuaaagggugggccuucgaugacggaaacgauguguggaugggucgaacgaucucugaaaagcugagaagcggcuaugagaccuuuaaagucauugagggguggucaaggccaaauaguaagcuacagaucaaccgucaggugauuguagaacggggaaaucgcuccggcuacagcgguauauucucuguugaggggaaaucaugcaucaacagauguuuuuauguggaacucauuaggggccggaaggaggaaacagaggucugguggaccaguaauagcaucguggucuucugcggaaccuccggcacauacgggacuggaucuuggcccgacggugcggauaucaaccugaugccuauuuga

SEQ ID NO: 142284 - RNA, 1410 nt, Artificial Sequence; identical to SEQ ID NO: 142214
  derived and/or modified CDS sequence (opt3) from neuraminidase__InfluenzaA__AAY28308

SEQ ID NO: 142285 - RNA, 1410 nt, Artificial Sequence
  derived and/or modified CDS sequence (opt3) from neuraminidase__InfluenzaA__AAY28318
augaaccccaaucagaagaucauuaccauaggcagcgugucccugacaaucgccacuauuugcuuccucaugcagaucgcuauucuugucacgaccguuacacugcacuuuaaacaguacgaguguaacucuccuccaaauaaccaggugauguugugcgaaccgacuaucauagagagaaauaucaccgaaauuguauauuuaacaaacaccacuaucgagaaggaaauuugucccaaacuggcagaguacaggaauuggucaaagccucagugcaacaucacaggguucgccccauuuaguaaagacaauagcauacggcuauccgcgggaggugauauuugggugacccgcgagcccuaugucucuugugacccugauaagugcuaccaauucgcucucggccaggggacgacucugaacaauggacauucgaacgacaccgugcacgaucgaacaccauaucguacucuucugaugaaugaauugggcguucccuuucaucucgguaccagacagguguguaucgccuggucaagcaguuccugccacgacgggaaggcauggcugcaugucugugugacaggagaugacgagaacgccaccgcuucuuucauuuacaauggcaggcugguagauagcaucggcuccuggaguaaaaagauccuccggacgcaggaaucagagugcguuuguauuaacgggacuugcgcaguggucaugacagacggaagcgccucugguaaagcugauaccaagauauuauuuaucgaggaaggcaaaauugugcacaucuccacucugucagggagcgcccaacacguggaggaaugcaguuguuauccucgcuacccaggagucagaugcguuuguagggacaacuggaagggcucuaaucggccgauaguggauauuaacguaaaggacuacuccaucgugagcucguaugucugcucuggucuugugggggacacaccccgcaaaaaugauuccuucucaaguagccauuguuuggacccuaacaaugaggaaggaggccacggcguuaaggggugggcguuugaugacggaaacgauguguggaugggucgaaccaucuccgagaaacugagaucuggcuacgagacguucaaggucauugaaggguggagcaaaccaaauucaaagcuacagaccaacaggcaagugaucguagagcggggaaaucguaguggcuauuccgguauuuuuagcguugaagggaaaucuugcauaaaccgcuguuucuacguggagcucaucagaggcaggaaggaagagacagaggucugguggacuucaaauaguauuguggucuuuugcggaaccagcggcacauaugggacuggauccuggcccgacggugcagauaucaaccugaugccuaucuga

SEQ ID NO: 142286 - RNA, 1410 nt, Artificial Sequence
  derived and/or modified CDS sequence (opt3) from neuraminidase__InfluenzaA__AAY28338
augaaccccaaucagaagaucauuaccauaggcagcgugucccugacaaucgccacuauuugcuuccucaugcaaaucgcuauucuugucacgaccguuacacugcacuuuaaacaguacgaguguaacucuccuccaaauaaccaggugauguugugcgaaccggcaaucauagagagaaauaucacugaaauuguauauuuaaccaacacaaccaucgagaaggaaauuaggcccaaacuggccgaguaccggaauuggucaaagccucaguguaacaucacuggguucgcgccauuuaguaaagacaauagcauacgccuauccgcuggaggugauauuugggugacacgagagcccuaugucucuugcgacccugauaaguguuaccaauucgcccucggccaggggaccacgcugaacaauggacauucgaacgacacugugcacgaucguaccccauauagaacacuucugaugaaugaauugggcguucccuuucaucucgguacucgacaggugugcaucgcauggucaagcaguuccugucacgacgggaaggccuggcugcaugucugcgugaccggagaugacgagaacgcuacagcaucuuucauuuacaauggccggcugguagauagcaucggcuccuggaguaaaaagauccuccgcacccaggaaucagaguguguuugcauuaacgggacguguacuguggucaugacagacggaagcgccucugguaaagcugauaccaagauauuauuuaucgaggaaggcaaaauugugaacaucuccacucugucagggagcgcccaacacguggaggaaugcaguugcuauccuagauacccaggagucagguguguuugccgggacaauuggaagggcucuaaccgcccgauaguggauauuaauguaaaggacuacuccaucgugagcucguaugucuguucuggucuugugggggacacacccaggaaaaacgauuccuucucaaguagccacugcuuggacccuaauaacgaggaaggaggccauggcguuaaggggugggcguuugaugacggaaaugauguguggauggguagaaccaucuccgagaaacugaggucuggcuacgagacguucaaggucauugaaggguggagcaaaccaaacucaaagcuacagaucaaucgucaggugauuguagagcggggaaaccgcaguggcuauuccgguauauuuagcguugaagggaaaucuuguaucaauagaugcuucuacguggagcucauuaggggccggaaggaagagaccgaggucugguggacaucaaacaguaucguggucuuuuguggaacuagcggcaccuaugggacaggauccuggcccgacggugcagauaucaaucugaugccuauuuga

SEQ ID NO: 142287 - RNA, 1410 nt, Artificial Sequence; identical to SEQ ID NO: 142193
  derived and/or modified CDS sequence (opt3) from neuraminidase__InfluenzaA__AAY28348

SEQ ID NO: 142288 - RNA, 1410 nt, Artificial Sequence; identical to SEQ ID NO: 142109
  derived and/or modified CDS sequence (opt3) from neuraminidase__InfluenzaA__AAY28358

SEQ ID NO: 142289 - RNA, 1410 nt, Artificial Sequence; identical to SEQ ID NO: 142193
  derived and/or modified CDS sequence (opt3) from neuraminidase__InfluenzaA__AAY28388

SEQ ID NO: 142290 - RNA, 1410 nt, Artificial Sequence; identical to SEQ ID NO: 142198
  derived and/or modified CDS sequence (opt3) from neuraminidase__InfluenzaA__AAY28398

SEQ ID NO: 142291 - RNA, 1410 nt, Artificial Sequence; identical to SEQ ID NO: 142212
  derived and/or modified CDS sequence (opt3) from neuraminidase__InfluenzaA__AAY28408

SEQ ID NO: 142292 - RNA, 1410 nt, Artificial Sequence; identical to SEQ ID NO: 142185
  derived and/or modified CDS sequence (opt3) from neuraminidase__InfluenzaA__AAY28505

SEQ ID NO: 142293 - RNA, 1410 nt, Artificial Sequence
  derived and/or modified CDS sequence (opt3) from neuraminidase__InfluenzaA__AAY28524
augaaccccaaucagaagaucauuaccauaggcagcgugucccugacaaucgccacuauuugcuuccucaugcaaaucgcuauucuugucacgaccguuacacugcacuuuaaacagcaugaguguaacucuccuccaaauaaccaggugauguugugcgaaccgacuaucauagagagaaauaucaccgaaauuguauacuuaacaaacaccacuaucgagaaggaaauuugucccaaacuggcagaguauaggaauuggucaaagccucagugcaacaucacaggguucgccccauuuaguaaagacaauagcauacggcuauccgcgggaggugauauuugggugacccgcgagcccuacgucucuugugacccugauaagugcuaucaauucgcucucggccaggggacgacucugaacaauggacacucgaacuacaccgugcaugaccgaacaccauaucguacucuucugaugaaugaauugggcguucccuuucaccucgguaccagacagguguguaucgccuggucaagcaguuccugccaugaugggaaggcauggcugcacgucugugugacaggagacgauaaaaacgccaccgcuucuuucauuuacaauggcaggcugguagacagcaucggcuccuggucaaagaaaauccuccggacgcaggagagugaaugcguuuguauuaacgggacuugcacaguggucaugaccgauggaagcgcaucugguaaggccgacacuaaaauauuauuuaucgaggagggcaagauugugcacaucuccacacugucagggagcgcucaacauguggaagagugcaguuguuauccucgcuacccaggagucagaugcguuuguagggauaacuggaagggcucuaaucggccgauaguggacauuaacguaaaagauuacuccaucgugagcucguaugucugcucuggucuugugggggacacccccaggaagaaugacuccucaaguagcucccacuguuuggauccuaacaaugaagagggaggccauggcguuaaagggugggccuucgacgauggaaacgacguguggaugggucgaacgaucucugaaaagcugagaagcggcuacgagaccuuuaaagucauugagggguggucaaagccaaauaguaaacuacagaucaaccgccaggugauuguagaacggggaaaucguuccggcuauagcgguauauucucuguugaggggaagucaugcaucaaccgcuguuuuuacguggaacucauuagaggcaggaaggaggaaacagaggucugguggaccaguaauagcaucguggucuucugcggaacuuccggcacauaugggacuggaucuuggcccgauggugcggacaucaaccugaugccuauuuga

SEQ ID NO: 142294 - RNA, 1410 nt, Artificial Sequence; identical to SEQ ID NO: 142183
  derived and/or modified CDS sequence (opt3) from neuraminidase__InfluenzaA__AAY28534

SEQ ID NO: 142295 - RNA, 1410 nt, Artificial Sequence
  derived and/or modified CDS sequence (opt3) from neuraminidase__InfluenzaA__AAY28544
augaaccccaaucagaagaucauuaccauaggcagcgugucccugacaaucgccacuauuugcuuccucaugcaaaucgcuauucuugucacgaccguuacacugcacuuuaaacagcaugaguguaacucuccuccaaauaaccaggugauguugugcgaaccgacuaucauagagagaaauaucaccgaaauuguauacuuaacaaacaccacuaucgagaaggaaauuugucccaaacuggcagaguauaggaauuggucaaagccucagugcaacaucacaggguucgccccauuuaguaaagacaauagcauacggcuauccgcgggaggugauauuugggugacccgcgagcccuacgucucuugugacccuaacaagugcuaucaauucgcucucggccaggggacgacucugaauaacggacacucgaaugauaccgugcaugaccgaacaccauaccguacucuucugaugaacgaauugggcguucccuuucaccucgguaccagacagguguguaucgccuggucaagcaguuccugccaugaugggaaggcauggcugcacgucugugugacaggagacgauaaaaaugccaccgcuucuuucauuuauaacggcaggcugguagacagcaucggcuccuggucaaagaaaauccuccggacgcaggagagugaaugcguuuguauuaacgggacuugcacaguggucaugaccgauggaagcgcaucugguaaggccgacacuaaaauauuauuuaucgaggagggcaagauugugcacaucuccacacugucagggagcgcucaacauguggaagagugcaguuguuacccucgcuauccaggagucagaugcguuuguagggauaauuggaagggcucuaaccggccgauaguggacauuaauguaaaagauuacuccaucgugagcucguacgucugcucuggucuugugggggacacccccaggaagaacgacuccuucucaaguagccacuguuuggauccuaauaacgaagagggaggccauggcguuaaagggugggccuuugacgauggaaaugacguguggaugggucgaacgaucuccgaaaagcugagaucuggcuaugagaccuucaaagucauugagggguggagcaagccaaacucaaaacuacagaucaaucgccaggugauuguagaacggggaaaccguaguggcuacuccgguauauuuagcguugaggggaagucuugcaucaaucgcuguuucuauguggaacucauuagaggcaggaaggaggaaacagaggucugguggacuucaaacaguaucguggucuuuugcggaaccagcggcacauacgggacuggauccuggcccgauggugcggacaucaaucugaugccuauuuga

SEQ ID NO: 142296 - RNA, 1410 nt, Artificial Sequence; identical to SEQ ID NO: 142109
  derived and/or modified CDS sequence (opt3) from neuraminidase__InfluenzaA__AAY28554

SEQ ID NO: 142297 - RNA, 1410 nt, Artificial Sequence
  derived and/or modified CDS sequence (opt3) from neuraminidase__InfluenzaA__AAY28564
augaaccccaaucagaagaucauuaccauaggcagcgugucccugacaaucgccacuauuugcuuccucaugcaaaucgcuauucuugucacgaccguuacacugcacuuuaaacagcaugaguguaacucuccuccaaauaaccaggugauguugugcgaaccgacuaucauagagagaaauaucaccgaaauuguauacuuaacaaacaccacuaucgagaaggaaauuugucccaaacuggcagaguauaggaauuggucaaagccucagugcaacaucacaggguucgccccauuuaguaaagacaauagcauacggcuauccgcgggaggugauauuugggugacccgcgagcccuacgucucuugugacccugauaagugcuaucaauucgcucucggccaggggacgacucugaacaauggacacucgaacgacaccgugcaugaucgaacaccauaccguacucuucugaugaaugaauugggcguucccuuucaccucgguaccagacagguguguaucgccuggucaagcaguuccugccaugacgggaaggcauggcugcacgucugugugacaggagaugacaaaaacgccaccgcuucuuucauuuauaauggcaggcugguagauagcaucggcuccuggucaaagaaaauccuccggacgcaggagagugaaugcguuuguauuaacgggacuugcacaguggucaugaccgacggaagcgcaucugguaaggccgauacuaaaauauuauuuaucgaggagggcaagauugugcacaucuccacacugucagggagcgcucaacauguggaagagugcaguuguuacccucgcuauccaggagucagaugcguuuguagggacaacuggaagggcucuaaucggccgauaguggauauuaacguaaaagacuacuccaucgugagcucguacgucugcucuggucuugugggggacacgccccgcaagaaugauuccucaaguagcucccacuguuuggacccuaacaaugaagagggaggccauggcguuaaagggugggccuucgaugacggaaacgauguguggaugggucgaaccaucucugaaaagcugagaagcggcuaugagaccuuuaaagucauugagggguggucaaggccaaauaguaagcuacagaucaaccgucaggugauuguagaacggggaaaucgcuccggcuacagcgguauauucucuguugagucaaaaaguugcaucaacagauguuuuuauguggaacucauuagggggcggaaggaggaaacagaggucugguggacuagcaauuccaucguggucuucugcggcaccucuggaacauacggcacugggucguggcccgacggagcggauaucaaccugaugccuauuuga

SEQ ID NO: 142298 - RNA, 1410 nt, Artificial Sequence; identical to SEQ ID NO: 142183
  derived and/or modified CDS sequence (opt3) from neuraminidase__InfluenzaA__AAY28574

SEQ ID NO: 142299 - RNA, 1410 nt, Artificial Sequence; identical to SEQ ID NO: 142197
  derived and/or modified CDS sequence (opt3) from neuraminidase__InfluenzaA__AAY28584

SEQ ID NO: 142300 - RNA, 1410 nt, Artificial Sequence; identical to SEQ ID NO: 142109
  derived and/or modified CDS sequence (opt3) from neuraminidase__InfluenzaA__AAY28594

SEQ ID NO: 142301 - RNA, 1410 nt, Artificial Sequence
  derived and/or modified CDS sequence (opt3) from neuraminidase__InfluenzaA__AAY28611
augaaccccaaucagaagaucauuaccauaggcagcgugucccugacaaucgccacuauuugcuuccucaugcaaaucgcuauucuugucacgaccguuacacugcacuuuaaacaguacgaguguaacucuccuccaaauaaccaggugauguugugcgaaccgacuaucauagagagaaauaucaccgaaauuguauauuuaacaaacaccacuaucgagaaggaaauuugucccaaacuggcagaguacaggaauuggucaaagccucagugcaacaucacaggguucgccccauuuaguaaagacaauagcauacggcuauccgcgggaggugauauuugggugacccgcgagcccuaugucucuugugacccugauaagugcuaccaauucgcucucggccaggggacgacucugaacaauggacauucgaacgacaccgugcacgaucgaacaccauaucguacucuucugaugaaugaauugggcguucccuuucaucucgguaccaaacagguguguaucgccuggucaagcaguuccugccacgacgggaaggcauggcugcaugucugugugacaggagaugacgagaacgccaccgcuucuuucauuuacaauggcagacugguagauagcaucggcuccuggucaaagaaaauccucaggacgcaggaaagugagugcguuuguauuaacgggacuugcacaguggucaugaccgacggaagcgcaucugguaaggccgauacuaaaauauuauuuaucgaggaaggcaagauugugcacacauccucacugagcgggagugcucaacacguggaggaaugcucuuguuauccucgguacccaggaguccgcugcguuuguagagacaacuggaagggcuccaauaggccgaucguggauauaaacguaaaagacuacagcauugugucgucuuaugucugcuccggucuugugggggacacgccccggaagaaugauucaaguagcuccucucauuguuuggacccuaacaaugaggaaggaggccacggcguuaaagggugggccuucgaugacggaaacgauguguggaugggucgcaccaucagcgagaagcugcgaucaggcuacgagaccuuuaaagucaucgaaggguggaguaagccaaauuccaaacuacagauuaacagacaggugaucguagacaggggaaaucggagcggcuauucugguauuuucucaguugaggggaagaguugcauaaaccguuguuuuuacguggaacucauccgcggcagaaagcaggagacagaaguccuguggacuagcaauuccauuguggucuucugcggaaccucuggcacauaugggacuggaucguggcccgauggugcggacaucaaccuuaugccuaucuga

SEQ ID NO: 142302 - RNA, 1410 nt, Artificial Sequence; identical to SEQ ID NO: 142214
  derived and/or modified CDS sequence (opt3) from neuraminidase__InfluenzaA__AAY28651

SEQ ID NO: 142303 - RNA, 1410 nt, Artificial Sequence
  derived and/or modified CDS sequence (opt3) from neuraminidase__InfluenzaA__AAY44613
augaaccccaaucagaagaucauuaccauaggcagcgugucccugacaaucgccacuauuugcuuccucaugcaaaucgcuauucuugucacgaccguuacacugcacuuuaaacagcaugaguguaacucuccuccaaauaaccaggugauguugugcgaaccgacuaucauagagagaaauaucaccgaaauuguauacuuaacaaacaccacuaucgagaaggaaauuugucccaaaaucgcagaguauaggaauuggucaaagccucagugcaacauaacaggguucgccccauuuaguaaagacaauagcauucggcuguccgcgggaggugauaucugggugacccgcgagcccuacgucucuugugacccugauaagugcuaucaauucgcucuaggccaggggacgacucucaacaauggacacucgaacgacaccgugcaugaucgaacaccauaccguacucugcuuaugaaugaacugggcguucccuuucacuuggguaccagacagguguguauugccuggucaagcaguuccugccaugacgggaaggcauggcuccacgucugugugacaggagaugacaaaaacgccaccgcuucuuucaucuauaauggcaggcugguagauagcaucggcuccuggucaaagaaaauucugcggacgcaggagagugaaugcguuuguauaaacgggacuugcacaguggucaugaccgacggaagcgcaucugguaaggccgauacuaaaauccucuuuauugaggagggcaagaucgugcacauauccacauuaucagggagcgcucaacauguggaagagugcaguuguuacccucgcuauccaggagucagaugcguuuguagggacaacuggaagggcucuaaucggccgauuguggauaucaacguaaaagacuacuccaucgugagcucguacgucugcucuggucuggugggggacacccccaggaagaaugauuccucaaguagcucccacugucuugacccuaacaaugaagagggaggccauggcguuaaagggugggccuucgaugacggaaacgauguguggaugggucgaacgauuucugaaaaguugagaagcggcuaugagaccuuuaaagucaucgagggguggucaaagccaaauaguaaacugcagauuaaccgccaggugauaguagaacggggaaaucguuccggcuacagcgguaucuucucuguugaggggaagucaugcauuaaccgcuguuuuuauguggaacuaaucagaggcaggaaggaggaaacagaggucugguggaccaguaauagcaucguggucuucugcggaacuuccggcacauacgggacuggaucuuggcccgacggugcggauauuaaccucaugccuauauga

SEQ ID NO: 142304 - RNA, 1410 nt, Artificial Sequence; identical to SEQ ID NO: 142197
  derived and/or modified CDS sequence (opt3) from neuraminidase__InfluenzaA__AAY44624

SEQ ID NO: 142305 - RNA, 1410 nt, Artificial Sequence; identical to SEQ ID NO: 142219
  derived and/or modified CDS sequence (opt3) from neuraminidase__InfluenzaA__AAY44634

SEQ ID NO: 142306 - RNA, 1410 nt, Artificial Sequence; identical to SEQ ID NO: 142212
  derived and/or modified CDS sequence (opt3) from neuraminidase__InfluenzaA__AAY44644

SEQ ID NO: 142307 - RNA, 1410 nt, Artificial Sequence
  derived and/or modified CDS sequence (opt3) from neuraminidase__InfluenzaA__AAY44654
augaaccccaaucagaagaucauuaccauaggcagcgugucccugacaaucgccacuauuugcuuccucaugcaaaucgcuauucuugucacgaccguuacacugcacuuuaaacaguacgaguguaacucuccuccaaauaaccaggugauguugugcgaaccgacuaucauagagagaaauaucaccgaaauuguauauuuaacaaacaccacuaucgagaaggaaauuugucccaaacuggcagaguacaggaauuggucaaagccucagugcaacaucacaggguucgccccauuuaguaaagacaauagcauacggcuauccgcgggaggugauauuugggugacccgcgagcccuaugucucuugugacccugauaagugcuaccaauucgcucucggccaggggacgacucugaacaauggacauucgaacgacaccgugcacgaucgaacaccauaucguacucuucugaugaaugaauugggcguucccuuucaucucgguaccaaacagguguguaucgccuggucaagcaguuccugccacgacgggaaggcauggcugcaugucugugugacaggagaugacgagaacgccaccgcuucuuucauuuacaauggcagacugguagauagcaucggcuccuggucaaagaaaauccucaggacgcaggaaagugagugcguuuguauuaacgggacuugcacaguggucaugaccgacggaagcgcaucugguaaggccgauacuaaaauauuauuuaucgaggaaggcaagauugugcacacauccucacugagcgggagugcucaacacguggaggaaugcucuuguuauccucgguacccaggaguccgcugcguuuguagagacaacuggaagggcuccaauaggccgaucguggauauaaacguaaaagacuacagcauugugucgucuuaugucugcuccggucuugugggggacacgccccggaagaaugauucaaguagcuccucucauuguuuggacccuaacaaugaggaaggaggccacggcguuaaagggugggccuucgaugacggaaacgauguguggaugggucgcaccaucagcgagaagcugcgaucaggcuacgagaccuuuaaagucaucgaaggguggaguaagccaaauuccaaacuacagauucauagacaggugaucguagacaggggaaaccggagcggcuauucugguauuuucucaguugaggggaagaguugcauaaaucguuguuuuuacguggaacucauccgcggcagaaagcaggagacagaaguccuguggacuagcaacuccauuguggucuucugcggaaccucuggcacauaugggacuggaucguggcccgauggugcggacaucaaucuuaugccuaucuga

SEQ ID NO: 142308 - RNA, 1410 nt, Artificial Sequence
  derived and/or modified CDS sequence (opt3) from neuraminidase__InfluenzaA__AAY44758
augaaccccaaucagaagaucauuaccauaggcagcgugucccugacaaucgccacuauuugcuuccucaugcaaaucgcuauucuugucacgaccguuacacugcacuuuaaacaguacgaguguaacucuccuucaaauaaccaggugauguugugcgaaccaacuaucauagagagaaauaucaccgaaauuguauauuuaacaaacaccacuaucgagaaggaaauuuguccgaaacuggcagaguacaggaauuggaguaagccccagugcaaaaucacaggguucgccccuuuuagcaaggacaacuccauacggcuaucugcgggaggugauauuugggugacccgcgagccauaugucucgugugaccccgauaagugcuaccaauucgcucucggccaggggacgacucugaauaaccgacauucaaaugacaccgugcacgaucguacaccuuauagaacucuucugaugaacgaauugggaguuccauuucaucucggcaccaaacagguguguaucgccuggagcaguuccucuugccacgacgguaaggcauggcugcaugucugugugacagggcacgaugagaaugccaccgcuagcuucauuuacgacggaaggcugguagauuccaucggcucauggaguaaaaagauccuccggacgcaggaaagcgagugcguuuguauuaacggcacuugcacaguggucaugaccgacgggucugcauccggacgcgccgauacuaaaauauuauuuaucgaggaagguaagauugugcacacaucaaagcugagcggcagugcucaacauguggaggaaugcucuuguuaucccagauacccuggggucaggugcguuugucgggacaauuggaaaggauccaaccgcccaaucguggauauaaacguaaaggacuacagcauugugucgucuuaugucugcuccggccuugugggugacaccccgcggaaaaaugauucaaguagcuccucucacuguuuggaccccaacaaugaggaagggggacauggcguuaagggcugggccuucgaugacgggaacgauguguggaugggaagaacgaucagcgagaaaucaaggagugguuacgagaccuuuaaggucaucgaaggcugguccaaaccuaauagcaagcugcagauuaaccgacaggugaucguagagcgugggaaucgcucuggauauucaggcauuuucaguguugaagguaagagcugcauaaacagauguuuuuacguggagcuaaucagggggcggaaaccagaaacagaggucugguggacuuccaauucuauuguggucuucugcggcaccucgggaacauauggcacugggagcuggcccgacggagcggauaucaaccucaugccuaucuga

SEQ ID NO: 142309 - RNA, 1410 nt, Artificial Sequence; identical to SEQ ID NO: 142109
  derived and/or modified CDS sequence (opt3) from neuraminidase__InfluenzaA__AAY44778

SEQ ID NO: 142310 - RNA, 1410 nt, Artificial Sequence
  derived and/or modified CDS sequence (opt3) from neuraminidase__InfluenzaA__AAY44788
augaaccccaaucagaagaucauuaccauaggcagcgugucccugacaaucgccacuauuugcuuccucaugcaaaucgcuauucuugucacgaccguuacacugcacuuuaaacaguacgaguguaacucuccuccaaauaaccaggugauguugugcgaaccgacuaucauagagagaaauaucaccgaaauuguauauuuaacaaacaccacuaucgagaaggaaauuugucccaaacuggcagaguacaggaauuggucaaagccucagugcaacaucacaggguucgccccauuuaguaaagacaauagcauacggcuauccgcgggaggugauauuugggugacccgcgagcccuaugucucuugugacccugauaagugcuaccaauucgcucucggccaggggacgacucugaacaauggacauucgaacgacaccgugcacgaucgaacaccauaucguacucuucugaugaaugaauugggcguucccuuucaucucgguaccaaacagguguguaucgccuggucaagcaguuccugccacgacgggaaggcauggcugcaugucugugugacaggagaugacgagaacgccaccgcuucuuucauuuacaauggcagacugguagauagcaucggcuccuggucaaagaaaauccucaggacgcaggaaagugagugcguuuguauuaacgggacuugcacaguggucaugaccgacggaagcgcaucugguaaggccgauacuaaaauauuauuuaucgaggaaggcaagauugugcacacaucccugcuuucagggagcgcucaacacguggaggaaugcaguuguuauccucgguacccaggaguccgcugcguuuguagagacaacuggaagggcucuaauaggccgaucguggauauaaacguaaaagacuacuccauugugagcucguaugucugcucugguuuggugggggacacgccccggaagaaugauuccucaaguagcucccauugucuggacccuaacaaugaggaaggaggccacggcguuaaagggugggccuucgaugacggaaacgauguguggaugggucgcaccaucucugagaagcuacgaagcggcuacgagaucuuuaaagucauugaaggguggucaaagccaaauaguaaacuccagaucaacagacaggugauuguagacaggggaaaucgguccggcuauagcgguauauucucuguugaggggaagucaugcaucaaccguuguuuuuacguggaacugauucgcggcagaaagcaggagaccgaaguccuuuggacaaguaauagcaucguggucuucugcggaacuuccggcaccuaugggacaggaucuuggcccgauggugcggacaucaaccugaugccuauuuga

SEQ ID NO: 142311 - RNA, 1410 nt, Artificial Sequence; identical to SEQ ID NO: 142185
  derived and/or modified CDS sequence (opt3) from neuraminidase__InfluenzaA__AAY44909

SEQ ID NO: 142312 - RNA, 1410 nt, Artificial Sequence; identical to SEQ ID NO: 142212
  derived and/or modified CDS sequence (opt3) from neuraminidase__InfluenzaA__AAY45649

SEQ ID NO: 142313 - RNA, 1410 nt, Artificial Sequence
  derived and/or modified CDS sequence (opt3) from neuraminidase__InfluenzaA__AAY46374
augaaccccaaucagaagaucauuaccauaggcagcgugucccugacaaucgccacuauuugcuuccucaugcaaaucgcuauucuugucacgaccguuacacugcacuuuaaacaguacgaguguaacucuccuccaaauaaccaggugauguugugcgaaccgacuaucauagagagaaauaucaccgaaauuguauauuuaacaaacaccacuaucgagaaggaaauuugucccaaacuggcagaguacaggaauuggucaaagccucagugcaaaaucacaggguucgccccauuuaguaaggacaacagcauacggcuauccgcgggaggugauauuugggugacccgcgagcccuaugucucuugugacccuuacaagugcuaucaauucgcucucggccaggggacgacucugaauaaccgacauucgaaugauaccgugcacgaccguacaccauacagaacucuucugaugaacgaauugggaguucccuuucaucucggcaccaaacagguguguaucgccuggucaagcaguuccugccacgaugguaaggcauggcugcaugucugugugacagggcacgacgagaaugccaccgcuucuuucauuuaugauggaaggcugguagacagcaucggcuccuggaguaaaaagauccuccggacgcaggaaucagagugcguuuguauuaacggcacuugcacaguggucaugaccgaugggagcgcaucuggacgcgccgacacuaaaauauuauuuaucgaggaagguaagauugugcacacauccaagcugucaggcagcgcucaacauguggaggaaugcaguuguuacccuagauacccaggggucaggugcguuugucgggauaauuggaaaggaucuaaccgcccgaucguggacauaaacguaaaggauuauuccauugugagcucguacgucugcucuggccuugugggugacacgccccggaaaaaugacuccucaaguagcucccacuguuuggauccuaacaaugaggaagggggacauggcguuaagggcugggccuucgacgaugggaacgacguguggaugggaagaaccaucucugagaaaagcaggucagguuaugagaccuuuaaggucaucgaaggcuggaguaaaccaaauuccaagcugcagauuaaccgacaggugaucguagagcgugggaauaugagcggauacucuggcauuuucucaguugaagguaagaguugcauaaaccgcuguuuuuauguggagcuaaucagagggaggaaacaggaaacagaggucugguggacuagcaauuccauuguggucuucugcggcaccucuggaacauacggcacugggucguggcccgauggagcggacaucaaccucaugccuaucuga

SEQ ID NO: 142314 - RNA, 1410 nt, Artificial Sequence
  derived and/or modified CDS sequence (opt3) from neuraminidase__InfluenzaA__AAY46384
augaaccccaaucagaagaucauuaccauaggcagcgugucccugacaaucgccacuauuugcuuccucaugcagaucgcuauucuugucacgaccguuacacugcacuuuaaacagcaugaguguaacucuccuccaaauaaccaggugauguugugcgaaccgacuaucauagagagaaauaucaccgaaauuguauacuuaacaaacaccacuaucgagaaggaaauuugucccaaacuggcagaguauaggaauuggucaaagccucagugcaacaucacaggguucgccccauuuaguaaagacaauagcauacggcuauccgcgggaggugauauuugggugacccgcgagcccuacgucucuugugacccugauaagugcuaucaauucgcucucggccaggggacgacucugaacaauggacacucgaacgacgccgugcaugaucgaaccccauaccguacacuucugaugaaugaauugggcguucccuuucaccucgguacuagacagguguguaucgcauggucaagcaguuccugccaugacgggaaggccuggcugcacgucugugugaccggagaugacaaaaacgcuacagcaucuuucauuuauaauggcaggcugguagauagcaucggcuccuggucaaagaaaauccuccggacccaggagagugaaugcguuuguauuaacgggacgugcacuguggucaugacagacggaagcgccucugguaaggcugauaccaaaauauuauuuaucgaggagggcaagauugugcacaucuccacucugucagggagcgcccaacauguggaagagugcaguuguuacccucgcuauccaggagucagaugcguuuguagggacaacuggaagggcucuaaucggccgauaguggauauuaacguaaaagacuacuccaucgugagcucguacgucugcucuggucuugugggggacacaccccgcaagaaugauuccuucucaaguagccacuguuuggacccuaacaaugaagagggaggccauggcguuaaagggugggcguuugaugacggaaacgauguguggaugggucgaaccaucuccgaaaagcugagaucuggcuaugagacguucaaagucauugagggguggagcaagccaaauucaaaacuacagaucaacaggcaagugauuguagaacggggaaaucguaguggcuacuccgguauauuuagcguugaggggaagucuugcaucaaccgcuguuucuauguggaacucauuagaggcaggaaggaggaaaccgaggucugguggacaucaaauaguaucguggucuuuugcggaacuagcggcaccuacgggacaggauccuggcccgacggugcagauaucaaccugaugccuauuuga

SEQ ID NO: 142315 - RNA, 1410 nt, Artificial Sequence
  derived and/or modified CDS sequence (opt3) from neuraminidase__InfluenzaA__AAY46394
augaaccccaaucagaagaucauuaccauaggcagcgugucccugacaaucgccacuauuugcuuccucaugcaaaucgcuauucuuaucacgaccgucacacugcacuuuaaacaguacgaguguaacucuccuccaaauaaccagguuauguugugcgaaccgacuauaaucgagagaaauauuaccgaaaucguguauuuaacaaacaccacuauugagaaggaaaucugucccaaacuggcagaguacaggaauuggucaaagccucagugcaacauaacaggguucgccccauuuaguaaagacaauagcauucggcuauccgcgggaggugauaucuggguaacccgcgagcccuaugugucuugugacccugauaagugcuaccaauucgcucucggccaggggacgacucugaacaauggacauucgaacgacaccguccacgaucgaacaccauaucguacucuucugaugaaugaauugggcgugcccuuucaucucgguaccaagcagguuuguauugccuggucaagcaguuccugccacgacgggaaagcauggcugcaugugugugucacaggagaugacgagaacgccaccgcuucuuucaucuacaauggcagacugguggauagcaucggcuccuggucaaagaaaauucucaggacgcaggaaagugagugcguauguauaaacgggacuugcacaguugugaugaccgacggaagcgcaucugguaaggccgauacuaaaaucuuauuuauugaggaaggcaagaucguccacacauccucacugagcgggagugcucaacacguggaggaaugcucuuguuauccucgguacccaggagugcgcugcgucuguagagacaacuggaagggcuccaauaggccgauaguugauauuaacgugaaagacuacagcaucguaucgucuuaugugugcuccggucuugucggggacacgccccggaagaaugauucaaguagcuccucucauuguuuggacccuaacaaugaggaaggaggccacggcgugaaagggugggccuucgaugacggaaacgauguuuggaugggucgcaccaucagcgagaagcugcgaucaggcuacgagaccuuuaaagugauugaaggguggaguaagccaaauuccaaacuacagaucaacagacaggucauuguggacaggggaaaucggagcggcuauucugguauauucucaguagaggggaagaguugcaucaaccguuguuuuuacguugaacucauucgcggcagaaagcaggagacagaagugcuguggacuagcaauuccaucgucguguucugcggaaccucuggcacauaugggacuggaucguggcccgauggugcggacaucgaucuuaugccuauuuga

SEQ ID NO: 142316 - RNA, 1410 nt, Artificial Sequence
  derived and/or modified CDS sequence (opt3) from neuraminidase__InfluenzaA__AAY46419
augaaccccaaucagaagaucauuaccauaggcagcgugucccugacaaucgccacuauuugcuuccucaugcaaaucgcuauucuugucacgaccguuacacugcacuuuaaacaguacgaguguaacucuuugccuaauaaccaggugauguuaugcgaaccaacuauccuggagagaaauauaaccgaaaucguauaucuaacaaacaccacuauugagaaggaaaucuguccgaaacucgcagaguacaggaauuggucaaagccccagugcaaaauuacaggguucgccccuuuuaguaaggacaacagcauccggcuguccgcgggaggugauauaugggugacccgcgagccauaugucucuugugaccccgauaagugcuaccaauucgcucuuggccaggggacgacucugaauaaccgacauucgaaugacaccgugcacgaucguacaccuuauagaacuuugcucaugaacgaacugggaguuccauuucaucugggcaccaaacagguguguauugccuggucaagcaguuccugccacgacgguaaggcauggcuccaugucugugugacagggcacaaugagaacgccaccgcuucuuucaucuacggaggcagguuaguagauagcauuggcuccuggaguaaaaagauccugcggacgcaggaaucagagugcguuuguaucaaugggacuugcacaguggucaugaccgacggaagcgcaucuggucgcgccgauacuaaaauucuuuuuauagaggaaggcaagaucauucacaucucccaauugucagggagcgcucagcauguggaggaaugcaguuguuaucccagauacccuggagugaggugcgucugucgggacaacuggaagggcucuaaccgcccaauaguugauauuaaugugaaagacuacuccaucguaagcucguaugugugcucuggucuggucggggauacaccgcgaaagaacgacuccucaaguagcucccacugucuaaaucccaacaaugaggaaggaggccauggcgugaaagggugggccuucgacgauggaaacgacguuuggauggguagaaccaucucugagaaguuuaggagcggcuacgagacguucaaagugauugaaggguggucaaagccuaauaguaaacuccagaucaaccggcaggucauuguggaucgugacaaucgcuccggauauagcggcauauuuucuguagaggguaagucaugcaucaacagauguuucuacguugaacugauuagggggcggaagcaagagaccgaagugugguggacaaguaauagcaucgucguguuuugcggcacuuccggaaccuauggcacagggucuuggccagauggagcggacaucaaccuuaugcccauuuga

SEQ ID NO: 142317 - RNA, 1410 nt, Artificial Sequence
  derived and/or modified CDS sequence (opt3) from neuraminidase__InfluenzaA__AAY47016
augaaccccaaucagaagaucauuaccauaggcagcgugucccugacaaucgccacuauuugcuuccucaugcaaaucgcuauucuugucacgaccguuacacugcacuuuaaacaguacgaguguaacucuccuccaaauaaccaggugauguugugcgaaccgacuaucauagagagaaauaucaccgaaauuguauauuuaacaaacaccacuaucgagaaggaaauuugucccaaacuggcagaguacaggaauuggucaaagccucagugcaacaucacaggguucgccccauuuaguaaagacaauagcauacggcuauccgcgggaggugauauuugggugacccgcgagcccuaugucucuugugacccugauaagugcuaccaauucgcucucggccaggggacgacucugaacaauggacauucgaacgacaccgugcacgaucgaacaccauaucguacucuucugaugaaugaauugggcguucccuuucaucucgguaccagacagguguguaucgccuggucaagcaguuccugccacgacgggaaggcauggcugcaugucugugugacaggagaugacgagaacgccaccgcuucuuucauuuacaauggcaggcugguagauagcaucggcuccuggaguaaaaagauccuccggacgcaggaaucagagugcguuuguauuaacgggacuugcacaguggucaugaccgacggaagcgcaucugguaaagccgauacuaagauauuauuuaucgaggaaggcaaaauugugcacaucuccacacugucagggaacgcucaacacguggaggaaugcagcuguuauccucgcuacccaggagucagaugcguuuguagggacaauuggaagggcaguaaccggccgauaguggauauuaauguaaaggacuacucuaucguguccagcuaugucugcucgggucuugugggggacacccccaggaaaaacgauucuuucuccucaagucauuguuuggacccuaauagcgaggaaggaggccacggcguuaaggggugggccuuugaugacggaaacgauguguggaugggucgaacgaucuccgagaaacugagaucuggcuacgagaccuucaaggucauugaaggguggagcaaaccaaauucaaagcuacagaucaaccgccaggugauuguagagcggggaaaucguaguggcuauuccgguauauuuagcguugaagggaaaucuugcaucaaccgcuguuucuacguggagcucauuagaggcaggaaggaagagacagaggucugguggacuucaaauaguaucguggucuuuugcggaaccagcggcacauaugggacuggauccuggcccgacggugcggauaucaaccugaugccuauuuga

SEQ ID NO: 142318 - RNA, 1410 nt, Artificial Sequence
  derived and/or modified CDS sequence (opt3) from neuraminidase__InfluenzaA__AAY47055
augaaccccaaucagaagaucauuaccauaggcagcgugucccugacaaucgccacuauuugcuuccucaugcaaaucgcuauucuugucacgaccguuacacugcacuuuaaacaguacgaguguaacucuccuccaaauaaccaggugauguugugcgaaccgacuaucauagagagaaauaucaccgaaauuguauauuuaacaaacaccacuaucgagaaggaaauuugucccaaacuggcagaguacaggaauuggucaaagccucagugcaacaucacaggguucgccccauuuaguaaagacaauagcauacggcuauccgcgggaggugauauuugggugacccgcgagcccuaugucucuugugacccugauaagugcuaccaauucgcucucggccaggggacgacucugaacaauggacauucgaacgacaccgugcacgaucgaacaccauaucguacucuucugaugaaugaauugggcguucccuuucaucucgguaccaaacagguguguaucgccuggucaagcaguuccugccacgacgggaaggcauggcugcaugucugugugacaggagaugacgagaacgccaccgcuucuuucauuuacaauggcagacugguagauagcaucggcuccuggucaaagaaaauccucaggacgcaggaaagugagugcguuuguauuaacgggacuugcacaguggucaugaccgacggaagcgcaucugguaaggccgauacuaaaauauuauuuaucgaggaaggcaagauugugcacacaucccugcuuucagggagcgcucaacacguggaggaaugcaguuguuauccucgguacccaggaguccgcugcguuuguagagacaacuggaagggcucuaauaggccgaucguggauauaaacguaaaagacuacuccauugugagcucguaugucugcucugguuuggugggggacacuccccggaagaaugauuccucaaguagcucccauugucuggacccuaacaaugaggaaggaggccacggcguuaaagggugggccuucgaugacggaaacgauguguggaugggucgcacgaucucugagaagcuacgaagcggcuacgagaccuuuaaagucaucgaaggguggucaaagccaaauaguaaacuccagauuaacagacaggugaucguagacaggggaaaucgguccggcuauagcgguauuuucucuguugaggggaagucaugcauaaaccguuguuuuuacguggaacugauccgcggcagaaagcaggagacagaaguccuuuggaccaguaauagcauuguggucuucugcggaaccuccggcacauaugggacuggaucuuggcccgauggugcggacaucaaccuguuuccuaucuga

SEQ ID NO: 142319 - RNA, 1410 nt, Artificial Sequence
  derived and/or modified CDS sequence (opt3) from neuraminidase__InfluenzaA__AAY47078
augaaccccaaucagaagaucauuaccauaggcagcgugucccugacaaucgccacuauuugcuuccucaugcaaaucgcuauucuugucacgaccguuacacugcacuuuaaacaguacgaguguaacucuccuccaaauaaccaggugauguugugcgaaccgacuaucauagagagaaauaucaccgaaauuguauauuuaacaaacaccacuaucgagaaggaaauuugucccaaacuggcagaguacaggaauuggucaaagccucagugcaacaucacaggguucgccccauuuaguaaagacaauagcauacggcuauccgcgggaggugauauuugggugacccgcgagcccuaugucucuugugaccaugauaagugcuaccaauucgcucucggccaggggacgacucugaacaauggacacucgaacgacaccgugcaugaucgaacaccuuaucguacucuucugaugaaugaauugggcguuccauuucaccucgguaccaaacagguguguaucgccuggucaagcaguuccugccaugacgggaaggcauggcugcacgucugugugacaggagaugacgagaacgccaccgcuucuuucauuuacaauggcagacugguagauagcaucggcuccuggucaaagaaaauccucaggacgcaggaaagugagugcguuuguauuaacgggacuugcacaguggucaugaccgacggaagcgcaucugguaaggccgauacuaaaauauuauuuaucgaggaaggcaagauugugcacaucuccacacugucagggagcgcucaacauguggaggaaugcaguuguuauccccgguacccuggaguccgcugcguuuguagagacaacuggaagggcucuaauaggccaauaguggauauuaacguaaaagacuacuccaucgugagcucguaugucugcucuggucuugugggggacaccccgcggaagaaugauuccuucucaaguagccacuguuuggaccccaacaaugaggaaggaggccauggcguuaaagggugggccuuugaugacggaaacgauguguggaugggucgcacgaucuccgagaagcugcgaucuggcuacgagaccuucaaagucauugaaggguggagcaagccuaauucaaaacuacagaucaacagacaggugauuguagagaggggaaaucggaguggcuauuccgguauauuuagcguugaagggaagucuugcaucaaccguuguuucuacguggagcucauucgcggcagaaaggaagagacagaggucugguggacuucaaauaguaucguggucuuuugcggaaccagcggcacauaugggacuggauccuggccagacggugcggauaucaaccugaugcccauuuga

SEQ ID NO: 142320 - RNA, 1410 nt, Artificial Sequence
  derived and/or modified CDS sequence (opt3) from neuraminidase__InfluenzaA__AAY47088
augaaccccaaucagaagaucauuaccauaggcagcgugucccugacaaucucuacuauuugcuucuuuaugcaaaucgccauucucaucacgaccgucacacuucacuucaaacaguacgaguuuaacucaccuccaaauaaccagguuaugcugugugaaccgacuauaaucgagagaaauauuaccgaaaucguguauuugacaaacaccacuauugagaaggaaaucugccccaaauuagcugaguacaggaauuggaguaagccucaguguaacauaacaggguucgcaccauuuagcaaagacaauuccauucggcugucugccggaggugauaucuggguaacccgcgagcccuaugugucgugcgacccugauaaguguuaccaauucgcgcuaggccaggggacgacucucaacaauguccauucaaacgacaccgugcacgaucgaacaccauaucguacucugcuuaugaaugaacugggaguucccuuucauuugggcaccaaacaggugugcauugcuuggagcaguuccucuugucacgacgguaaggccuggcuccaugucugcgugacaggggaugacgagaacgcaaccgccagcuucaucuacaauggaagacugguagauuccaucguuucauggaguaagaaaauucugaggacgcaggaaagcgagugugugugcauaaacggcacuuguacagucgugaugaccgacggcucugcuuccgggaaggcagauacuaaaauccucuuuauugaggaaggaaagaucgugcacacaucaaccuuaagcgguagugcccaacacgucgaggaaugcucuugcuauccucgguacccaggcguucgcugugugugcagagacaacuggaagggguccaauaggccgauaguagauauuaacaucaaagaccauagcaucgugucgucuuacgucuguuccggacuggugggcgacacgccccggaagaaugauucaaguagcuccucucacugccuugacccuaacaaugaggaaggugggcauggaguuaaaggcugggcuuucgaugacggcaacgauguguggauggggcgcaccauuagcgagaaguugcgaucaggauaugagacauuuaaagucaucgaagguuggaguaauccaaacuccaagcugcagauuaauagacaggugauaguagacaggggcaaccggagcggguacucuggaaucuucucaguugagggcaaaaguuguauuaaucguugcuuuuauguggaacuaauccgcgguagaaagcaggagacugaaguccucuggaccagcaacuccaucguggucuucugugggacaucuggcacuuacggaaccggcucguggcccgauggggccgacauuaaucugaugccuauauga

SEQ ID NO: 142321 - RNA, 1410 nt, Artificial Sequence; identical to SEQ ID NO: 142185
  derived and/or modified CDS sequence (opt3) from neuraminidase__InfluenzaA__AAY58319

SEQ ID NO: 142322 - RNA, 1392 nt, Artificial Sequence
  derived and/or modified CDS sequence (opt3) from neuraminidase__InfluenzaA__AAY59038
augaaccccaaucagaagaucauuaccauaggcagcgugucccugacaaucgccacuauuugcuuccucaugcaaaucgcuauucuugucacgaccguuacacugcacuuuaaacaguacgaguguaacucuccuccaaauaaccaggugauguugugcgaaccgacuaucauagagagaaauaucaccgaaauuguauauuuaacaaacaccacuaucgagaaggaaauuugucccaaacuggcagaguacaggaauuggucaaagccucagugcaacaucacaggguucgccccauuuaguaaagacaauagcauacggcuauccgcgggaggugauauuugggugacccgcgagcccuaugucucuugugacccugauaagugcuaccaauucgcucucggccaggggacgacuaacgacaccgugcaugaucgaacaccauaucguacucugcuuaugaaugaacugggaguucccuuucacuugggcaccaaacagguguguaucgccuggucgucaagcaguugccaugacgguaaggcauggcuccacgucugugugacaggggaugacgagaacgccaccgcuuccuucauuuacaauggaagacugguagauucuaucggcagcugguccaagaaaauccugaggacgcaggaaucagagugcguuuguauuaacggcacuugcacaguggucaugaccgacgggagugcaagcggaaaggccgauacuaaaauacucuuuaucgaggaagguaagauugugcauacaucuccuuuauccggcucagcucaacacguggaggaaugcagcuguuauccacgguacccggggguccgcugcguuuguagagacaauuggaagggaaguaacaggcccaucguggauauaaacguaaaagacuacucuauuguguccagcuaugucugcucgggccuggugggugacaccccucggaagaaugauucuuccucaaguagccacugucuugacccaaacaaugaggaagggggacauggcguuaaaggcugggccuucgaugacgggaacgauguguggaugggacgcacgaucuccgagaaguugcgaucugguuacgagaccuuuaaagucaucgaaggcuggagcaagcccaauucaaaacugcagauuaacagacaggugaucguagacagggggaaucggaguggauauuccggcauuuucagcguugaggguaagucuugcauaaaccguuguuuuuacguggaacuaauccgcgggagaaagcaggagacagaaguccucuggacuucaaauaguauuguggucuucugcggcaccagcggaacauauggcacuggguccuggccugauggagcggacaucaaccugaugccaaucuga

SEQ ID NO: 142323 - RNA, 1410 nt, Artificial Sequence
  derived and/or modified CDS sequence (opt3) from neuraminidase__InfluenzaA__AAY64195
augaaccccaaucagaagaucauuaccauaggcagcgugucccugacaaucgccacuauuugcuuccucaugcaaaucgcuauucuugucacgaccguuacacugcacuuuaaacaguacgaguguaacucuuugccuaauaaccaggugauguuaugcgaaccaacuaucauagagagaaauaucaccgaaauuguauaucugacaaacaccacuaucgagaaggaaauuuguccgaaacuagcagaguacaggaauuggucaaagccccagugcaaaaucacaggguucgccccuuuuaguaaggacaacagcauacggcucuccgcgggaggugauauuugggugacccgcgagccauaugucucuugugaccccgauaagugcuaccaauucgcucugggccaggggacgacucuuaauaaccgacauucgaaugacaccgugcacgaucguacaccuuauagaacucuguugaugaacgaacucggaguuccauuucaucugggcaccaaacagguguguaucgccuggucaagcaguuccugccacgacgguaaggcauggcugcaugucugugugacagggcacgaugagaaugccaccgcuucuuucauuuacgacggaaggcucguagauagcaucggcuccuggaguaaaaagaucuuacggacgcaggaaucagagugcguuuguauuaacggcacuugcacaguggucaugaccgacgggagcgcaucuggacgcgccgauacuaaaauacuguuuaucgaggaagguaagauuauccacauaucccaacuuucaggcagcgcucagcauguggaggaaugcaguuguuaucccagauacccuggggugaggugcgucugucgggacaauuggaagggaucuaaccgcccaauuguugauaucaacgugaaagacuacuccaucguaagcucguaugugugcucuggcuuggucggugacacaccgcgaaagaaugauuccucaaguagcucccacugucugaaccccaauaacgaggaagggggacauggcgugaaaggcugggccuucgacgaugggaaugacguuuggaugggaagaaccauuucugagaaguuuaggagcgguuacgagacguucaaagugaucgaaggcuggucaaagccuaacaguaaacuacagauuaaucggcaggucauaguggaucgugacaaccgcuccggguauagcggaaucuuuucuguagagggcaagucaugcauuaauagauguuucuacguugaacucaucaggggucggaagcaagaggcggaagugugguggaccaguaacagcaucgucguguuuugcgggacauccggcacuuauggaaccggcucuuggccagauggggcagacauuaaucugaugcccauauga

SEQ ID NO: 142324 - RNA, 1410 nt, Artificial Sequence; identical to SEQ ID NO: 142183
  derived and/or modified CDS sequence (opt3) from neuraminidase__InfluenzaA__AAY64205

SEQ ID NO: 142325 - RNA, 1410 nt, Artificial Sequence; identical to SEQ ID NO: 142109
  derived and/or modified CDS sequence (opt3) from neuraminidase__InfluenzaA__AAY64215

SEQ ID NO: 142326 - RNA, 1410 nt, Artificial Sequence
  derived and/or modified CDS sequence (opt3) from neuraminidase__InfluenzaA__AAY64225
augaaccccaaucagaagaucauuaccauaggcagcgugucccugacaaucgccacuauuugcuuccucaugcagaucacgauucuugucaccacaguuacucugcacuuuaaacaguacgaguguaacccuccaccgaauaaccaggugauguugugcgaacccaccaucauagagagaaauaucacagaaauuguauauuuaaccaacacuacaaucgagaaggaaauuuguccuaaacuggcugaguacaggaauuggucuaagccacagugcaacaucaccggguucgcacccuuuucaaaagacaauaguauacggcuaagcgccggaggugauauuugggugacgcgcgagccuuaugucuccugugacccagauaagugcuaccaauucgcgcucggccaggggacuacccugaacaauggacauucuaacgacacagugcacgaucgaacucccuaucguacccuucugaugaaugaauugggcguuccuuuucaucucgguacaagacagguguguaucgcuuggucgucaagcaguugccacgacgggaaggccuggcugcaugucugugugaccggagaugacgagaacgcaacggccuccuucauuuacaauggcaggcugguagauucuaucggcagcugguccaaaaagauccuccggacucaggaaucagagugcguuuguauuaacgggacaugcaccguggucaugacugacggaagugcuagcgguaaagcagauacaaagauauuauuuaucgaggaaggcaaaauugugcacaucucuacccuguccgggucagcccaacacguggaggaaugcagcuguuauccacgcuacccgggagucagaugcguuuguagggacaacuggaagggcaguaaucggcccauaguggauauuaacguaaaggacuacucuaucguguccagcuaugucugcucgggucuugugggggacacgccucgcaaaaaugauucuuucuccucaagucauuguuuggacccaaacaaugaggaaggaggccacggcguuaaggggugggcuuuugaugacggaaacgauguguggaugggucgaaccaucagcgagaaacugagauccggcuacgagacauucaaggucauugaaggguggucuaaacccaauagcaagcuacagaucaacaggcaagugauuguagagcggggaaaucguucaggcuauagugguauauuuuccguugaagggaaaagcugcaucaaccgcuguuucuacguggagcucauuagaggcaggaaggaagagaaugaggucugguggacuucuaacucaaucguggucuuuugcggaaccaguggcacauaugggacuggaagcuggccugacggugccgauaucaaucugaugccaauuuga

SEQ ID NO: 142327 - RNA, 1410 nt, Artificial Sequence
  derived and/or modified CDS sequence (opt3) from neuraminidase__InfluenzaA__AAY64245
augaaccccaaucagaagaucauuaccauaggcagcgugucccugacaaucgccacuauuugcuuccucaugcaaaucgcuauucuugucacgaccguuacacugcacuuuaaacaguacgaguguaacucuuugccuaauaaccaggugauguuaugcgaaccaacuauccuggagagaaauauaaccgaaaucguauaucuaacaaacaccacuauugagaaggaaaucuguccgaaacucgcagaguacaggaauuggucaaagccccagugcaaaauuacaggguucgccccuuuuaguaaggacaacagcauccggcuguccgcgggaggugauauaugggugacccgcgagccauaugucucuugugaccccgauaagugcuaccaauucgcucuuggccaggggacgacucugaauaaccgacauucgaaugacaccgugcacgaucguacaccuuauagaacuuugcucaugaacgaacugggaguuccauuucaucugggcaccaaacagguguguauugccuggucaagcaguuccugccacgacgguaaggcauggcuccaugucugugugacagggcacgaugagaaugccaccgcuucuuucaucuacggaggcagguuaguagacagcauuggcuccuggaguaaaaagauccugcggacgcaggaaucagagugcguuuguaucaacgggacuugcacaguggucaugaccgauggaagcgcaucuggucgcgccgacacuaaaauucuuuuuauagaggaaggcaagaucauucacaucucccaauugucagggagcgcucagcauguggaggaaugcaguuguuaucccagauacccuggagugaggugcgucugucgggauaauuggaagggcucuaaccgcccaauaguugacauuaacgugaaagauuacuccaucguaagcucguaugugugcucuggucuggucggggacacaccgcgaaagaaugacuccucaaguagcucccacugucuaaaccccaauaacgaggaaggaggccauggcgugaaagggugggccuucgaugacggaaaugauguuuggauggguagaaccaucucugagaaguuuaggagcggcuacgagacguucaaagugauugaaggguggucaaagccuaacaguaaacuccagaucaaucggcaggucauuguggaccgugauaaccgcuccggauauagcggcauauuuucuguagaggguaagucaugcaucaauagauguuucuacguugaacugauuagggggcggaagcaagagaccgaagugugguggacaaguaacagcaucgucguguuuugcggcacuuccggaaccuauggcacagggucuuggccagacggagcggauaucaaucuuaugcccauuuga

SEQ ID NO: 142328 - RNA, 1410 nt, Artificial Sequence; identical to SEQ ID NO: 142109
  derived and/or modified CDS sequence (opt3) from neuraminidase__InfluenzaA__AAY64255

SEQ ID NO: 142329 - RNA, 1410 nt, Artificial Sequence; identical to SEQ ID NO: 142327
  derived and/or modified CDS sequence (opt3) from neuraminidase__InfluenzaA__AAY64265

SEQ ID NO: 142330 - RNA, 1410 nt, Artificial Sequence; identical to SEQ ID NO: 142327
  derived and/or modified CDS sequence (opt3) from neuraminidase__InfluenzaA__AAY64285

SEQ ID NO: 142331 - RNA, 1410 nt, Artificial Sequence
  derived and/or modified CDS sequence (opt3) from neuraminidase__InfluenzaA__AAY64295
augaaccccaaucagaagaucauuaccauaggcagcgugucccugacaaucgccacuauuugcuuccucaugcaaaucgcuauucuugucacgaccguuacacugcacuuuaaacaguacgaguguaacucuccuccaaauaaccaggugauguugugcgaaccgacuaucauagagagaaauaucaccgaaauuguauauuuaacaaacaccacuaucgagaaggaaauuugucccaaacugucagaguacaggaauuggaguaagccucagugcaacaucacaggguucgcaccauuuagcaaagacaauuccauacggcuaucugccggaggugauauuugggugacccgcgagcccuaugucucgugugacccugauaagugcuaccaauucgcgcucggccaggggacgacucugaacaauggacauucaaacgacaccgugcacgaucgaacaccauaucguacucuucugaugaaugaauugggcguucccuuucaucucgguaccaaacagguguguaucgcuuggagcaguuccucuugccacgacgggaaggccuggcugcaugucugugugacaggagaugacgagaacgcaaccgccagcuucauuuacaauggcagacugguagauuccaucggcucauggaguaagaaaauccucaggacgcaggaaagcgagugcguuuguauuaacgggacuugcacaguggucaugaccgacggaucugcuuccgguaaggcagauacuaaaauauuauuuaucgaggaaggcaagauugugcacaucucaacacugagcgggagugcccaacacguggaggaaugcucuuguuauccucgguacccaggaguccgcugcguuuguagagacaacuggaagggcuccaauaggccgauaguggauauuaacguaaaagaccauagcaucgugucgucuuacgucugcuccggucuugugggggacacuccccggaagaaugauucauucaguagcucccacuguuuggacccuaacaaugaggaaggaggccauggcguuaaagggugggcuuuugaugacggaaacgauguguggaugggucgcacgaucucugagaagcugcgaagcggcuaugagaccuucaaagucauugaaggguggucaaagccaaauaguaaacuacagaucaacagacaggugauuguagagaggggaaaucgguccggcuacagcgguauauuuucuguugaagggaagucaugcaucaaccguuguuucuauguggagcucauucgcggcagaaaggaagagacagaggucugguggaccaguaauagcaucguggucuuuugcggaaccuccggcacauacgggacuggaucuuggcccgacggugccgauaucaaccugaugccuauuuga

SEQ ID NO: 142332 - RNA, 1410 nt, Artificial Sequence
  derived and/or modified CDS sequence (opt3) from neuraminidase__InfluenzaA__AAY64305
augaaccccaaucagaagaucauuaccauaggcagcgugucccugacaaucgccacuauuugcuuccucaugcaaaucgcuauucuugucacgaccguuacacugcacuuuaaacaguacgaguguaacucuccuccaaauaaccaggugauguugugcgaaccgacuaucauagagagaaauaucaccgaaauuguauauuuaacaaacaccacuaucgagaaggaaauuugucccaaacuggcagaguacaggaauuggucaaagccucagugcaaaaucacaggguucgccccauuuaguaaggacaacagcauacggcuauccgcgggaggugauauuugggugacccgcgagcccuaugucucuugugacccugauaagugcuaccaauucgcucucggccaggggacgacucugaauaaccgacauucgaaugacaccgugcacgaucguacaccauauagaacucuucugaugaacgaauugggaguucccuuucaucucggcaccaaacagguguguaucgccuggucaagcaguuccugccacgacgguaaggcauggcugcaugucugugugacagggcacgaugagaaugccaccgcuucuuucauuuacgacggaaggcugguagauagcaucggcuccuggaguaaaaagauccuccggacgcaggaaucagagugcguuuguauuaacggcacuugcacaguggucaugaccgacgggagcgcaucuggacgcgccgauacuaaaauauuauuuaucgaggaagguaagauugugcacacauccaagcugucaggcagcgcucaacauguggaggaaugcaguuguuauccuagauacccaggggucaggugcguuugucgggacaauuggaaaggaucuaaccgcccgaucguggauauaaacguaaaggacuacuccauugugagcucguaugucugcucuggccuugugggugacacgccccggaaaaaugauuccucaaguagcucccacuguuuggacccuaacaaugaggaagggggacauggcguuaagggcugggccuucgaugacgggaacgauguguggaugggaagaaccaucucugagaaaagcaggucagguuacgagaccuuuaaggucaucgaaggcuggaguaaaccaaauuccaagcugcagauuaaccgacaggugaucguagagcgugggaauaugagcggauauucuggcauuuucucaguugaagguaagaguugcauaaaccgcuguuuuuacguggagcuaaucagagggaggaaacaggaaacagaggucugguggacuagcaauuccauuguggucuucugcggcaccucuggaacauauggcacugggucguggcccgacggagcggauaucaaccucaugccuaucuga

SEQ ID NO: 142333 - RNA, 1410 nt, Artificial Sequence; identical to SEQ ID NO: 142183
  derived and/or modified CDS sequence (opt3) from neuraminidase__InfluenzaA__AAY64335

SEQ ID NO: 142334 - RNA, 1410 nt, Artificial Sequence; identical to SEQ ID NO: 142198
  derived and/or modified CDS sequence (opt3) from neuraminidase__InfluenzaA__AAY64365

SEQ ID NO: 142335 - RNA, 1410 nt, Artificial Sequence
  derived and/or modified CDS sequence (opt3) from neuraminidase__InfluenzaA__AAY64385
augaaccccaaucagaagaucauuaccauaggcagcgugucccugacaaucgccacuauuugcuuccucaugcaaaucgcuauucuugucacgaccguuacacugcacuuuaaacaguacgaguguaacucuuugccuaauaaccaggugauguuaugcgaaccaacuauccuggagagaaauauaaccgaaaucguauaucuaacaaacaccacuauugagaaggaaaucuguccgaaacucgcagaguacaggaauuggucaaagccccagugcaaaauuacaggguucgccccuuuuaguaaggacaacagcauccggcuguccgcgggaggugauauaugggugacccgcgagccauaugucucuugugaccccgauaagugcuaccaauucgcucuuggccaggggacgacucugaauaaccgacauucgaaugacaccgugcacgaucguacaccuuauagaacuuugcucaugaacgaacugggaguuccauuucaucugggcaccaaacagguguguauugccuggucaagcaguuccugccacgacgguaaggcauggcuccaugucugugugacagggcacgaugagaaugccaccgcuucuuucaucuacggaggcagguuaguagacagcauuggcuccuggucaaagaagauccugcggacgcaggaaagugagugcguuuguaucaacgggacuugcacaguggucaugaccgauggaagcgcaucuggucgcgccgacacuaaaauucuuuuuauagaggaaggcaagaucauucacaucucccaauugucagggagcgcucagcauguggaggaaugcaguuguuaucccagauacccuggagugaggugcgucugucgggauaauuggaagggcucuaaccgcccaauaguugacauuaacgugaaagauuacuccaucguaagcucguaugugugcucuggucuggucggggacacaccgcgaaagaaugacuccucaaguagcucccacugucuaaaccccaauaacgaggaaggaggccauggcgugaaagggugggccuucgaugacggaaaugauguuuggauggguagaaccaucucugagaaaagcaggucaggcuacgagacguuuaaagugauugaaggguggaguaagccuaacuccaaacuccagaucaaucggcaggucauuguggaccgugauaaccgcagcggauauucuggcauauucucaguagaggguaagaguugcaucaauagauguuuuuacguugaacugauuagggggcggaagcaagagaccgaagugugguggacaagcaacuccaucgucguguucugcggcacuucuggaaccuauggcacagggucguggccagacggagcggauaucaaucuuaugcccauuuga

SEQ ID NO: 142336 - RNA, 1410 nt, Artificial Sequence
  derived and/or modified CDS sequence (opt3) from neuraminidase__InfluenzaA__AAY64395
augaaccccaaucagaagaucauuaccauaggcagcgugucccugaucauuucuacaaucugcuucuuuaugcaaauugccauccucauaacuacggucacccuucacuucaaacaguacgaguuuaacucaccuccaaauaaccagguuaugcugugugaaccgacaaucauugagagaaauaucacugaaauuguguauuugaccaacacaaccaucgagaaggaaauaugccccaaauuagcugaguacaggaauuggaguaagccucagugugacauuacuggguucgcaccauuuagcaaagauaacuccauccggcugucugccggaggugacauuuggguaacacgcgagcccuaugugucgugcgauccugacaaguguuaccaauucgcgcuaggccaggggaccacgcucaauaacguccauucaaaugauacugugcacgaccgaaccccauaucguacacugcuuaugaacgaacugggaguucccuuucauuugggcacuaaacaggugugcaucgcuuggagcaguuccucuugucacgaugguaaggccuggcuccaugucugcgugaccggggacgaugagaaugcaacagccagcuucaucuacaacggaagacugguagacuccauuguuucauggaguaagaaaauacugaggacccaggaaagcgagugugugugcaucaauggcacguguacugucgugaugacagauggcucugcuuccgggaaggcagacaccaaaauucucuuuaucaaggagggaaagauagugcacacuucaacauuaagcgguagugcccaacacgucgaagagugcucuugcuauccucgguacccaggcguucgcugugugugcagagauaacuggaaaggguccaacaggccgauuguagacaucaauaucaaggacuacagcauugugucgucuuaugucuguuccggacuggugggcgauacgccccggaaaaacgacucaaguagcuccucucauugccuugauccuaauaacgaagagggugggcacggaguuaagggcugggcuuucgacgauggcaaugacguguggauggggcgcaccaucagcgaaaaauugcgaucaggauacgagaccuuuaaggucauugaggguuggaguaacuccaauagcaaacugcagauaaacagacaggugaucguagauaggggcaaucggucuggguauucaggaauuuucaguguugaaggcaagagcuguaucaaccguugcuuuuacguggagcuaauccgcgguagaaaggaagagacagaaguccucuggacuuccaauucuauuguggucuucugugggaccucgggcacauauggaacuggcagcuggccagacggggccgauauaaaccugaugcccaucuga

SEQ ID NO: 142337 - RNA, 1410 nt, Artificial Sequence; identical to SEQ ID NO: 142332
  derived and/or modified CDS sequence (opt3) from neuraminidase__InfluenzaA__AAY64405

SEQ ID NO: 142338 - RNA, 1410 nt, Artificial Sequence; identical to SEQ ID NO: 142327
  derived and/or modified CDS sequence (opt3) from neuraminidase__InfluenzaA__AAY98040

SEQ ID NO: 142339 - RNA, 1410 nt, Artificial Sequence; identical to SEQ ID NO: 142327
  derived and/or modified CDS sequence (opt3) from neuraminidase__InfluenzaA__AAY98050

SEQ ID NO: 142340 - RNA, 1410 nt, Artificial Sequence; identical to SEQ ID NO: 142219
  derived and/or modified CDS sequence (opt3) from neuraminidase__InfluenzaA__AAY98060

SEQ ID NO: 142341 - RNA, 1410 nt, Artificial Sequence
  derived and/or modified CDS sequence (opt3) from neuraminidase__InfluenzaA__AAY98070
augaaccccaaucagaagaucauuaccauaggcagcgugucccugacaaucgccacuauuugcuuccucaugcaaaucgcuauucuugucacgaccguuacacugcacuuuaaacaguacgaguguaacucuccuccaaauaaccaggugauguugugcgaaccgacuaucauagagagaaauaucaccgaaauuguauauuuaacaaacaccacuaucgagaaggaaauuugucccaaacuggcagaguacaggaauuggucaaagccucagugcaacaucacaggguucgccccauuuaguaaagacaauagcauacggcuauccgcgggaggugauauuugggugacccgcgagcccuaugucucuugugacccugauaagugcuaccaauucgcucucggccaggggacgacucugaacaauggacauucgaacgacaccgugcacgaucgaacaccauaucguacucuucugaugaaugaauugggcguucccuuucaucucgguaccagacagguguguaucgccuggucaagcaguuccugccacgacgggaaggcauggcugcaugucugugugacaggagaugacgagaacgccaccgcuucuuucauuuacaauggcaggcugguagauagcaucggcuccuggaguaaaaagauccuccggacgcaggaaucagagugcguuuguauuaacgggacuugcacaguggucaugaccgacggaagcgcaucugguaaagccgauacuaagauauuauuuaucgaggaaggcaaaauugugcacaucuccacacugucagggagcgcucaacacguggaggaaugcaguuguuauccucgcuacccaggagucagaugcguuuguagggacaacuggaagggcucuaaucggccgauaguggauauuaacguaaaggaccauuccaucgugagcucguacgucugcucuggucuugugggggacacccccaggaaaaaugauuccuucucaaguagccacuguuuggacccuaacaaugaggaaggaggccauggcguuaaggggugggccuuugaugacggaaacgauguguggaugggucgaacgaucuccgagaaacugagaucuggcuaugagauuuucaaggucaucgaaggguggagcaaaccaaauucaaagcuacagauuaaccgccaggugauaguagagcggggaaaucguaguggcuacuccgguaucuuuagcguugaagggaaaucuugcauuaaccgcuguuucuauguggagcucaucagaggcaggaaggaagagaccgaggucugguggacaucaaauaguaucguggucuuuugcggaacuagcggcaccuacgggacaggauccuggcccgacggugcggauauuaaccugaugccuauauga

SEQ ID NO: 142342 - RNA, 1410 nt, Artificial Sequence; identical to SEQ ID NO: 142227
  derived and/or modified CDS sequence (opt3) from neuraminidase__InfluenzaA__AAY98080

SEQ ID NO: 142343 - RNA, 1410 nt, Artificial Sequence
  derived and/or modified CDS sequence (opt3) from neuraminidase__InfluenzaA__AAY98090
augaaccccaaucagaagaucauuaccauaggcagcgugucccugacaaucgccacuauuugcuuccucaugcaaaucgcuauucuugucacgaccguuacacugcacuuuaaacaguacgaguguaacucuuugccuaauaaccaggugauguuaugcgaaccaacuaucauagagagaaauaucaccgaaauuguauaucugacaaacaccacuaucgagaaggaaauuuguccgaaacuagcagaguacaggaauuggucaaagccccagugcaaaaucacaggguucgccccuuuuaguaaggacaacagcauacggcucuccgcgggaggugauauuugggugacccgcgagccauaugucucuugugaccccgauaagugcuaccaauucgcucugggccaggggacgacucuuaauaaccgacauucgaaugacaccgugcacgaucguacaccuuauagaacucuguugaugaacgaacucggaguuccauuucaucugggcaccaaacagguguguaucgccuggucaagcaguuccugccacgacgguaaggcauggcugcaugucugugugacagggcacgaugagaaugccaccgcuucuuucauuuacgacggaaggcucguagauagcaucggcuccuggaguaaaaagaucuuacggacgcaggaaucagagugcguuuguauuaacggcacuugcacaguggucaugaccgacgggagcgcaucuggaaaagccgauacuaagauacuguuuaucgaggaagguaagauuauccacauaucccaacuuucaggcagcgcucagcauguggaggaaugcaguuguuauccccgcuacccuggggugagaugcgucuguagggacaauuggaaaggaucuaaccggccaauuguugauaucaacgugaaggacuacuccaucguaagcucguaugugugcucuggcuuggucggugacacaccgcgcaaaaaugauuccucaaguagcucccacugucugaaccccaauaacgaggaagggggacauggcgugaagggcugggccuucgacgaugggaaugacguuuggaugggacgaaccauuucugagaaauuuagaagcgguuacgagacguucaaggugaucgaaggcuggucaaaaccuaacaguaagcuacagauuaauaggcaggucauaguggaucgggacaaccguuccggguauagcggaaucuuuucuguagagggcaagucaugcauuaaucgcuguuucuacguugaacucaucagagguaggaaacaagagaccgaagugugguggacaaguaacagcaucgucguguuuugcgggacuuccggcaccuauggaacaggcucuuggccagauggggcggacauuaaucugaugcccauauga

SEQ ID NO: 142344 - RNA, 1410 nt, Artificial Sequence; identical to SEQ ID NO: 142327
  derived and/or modified CDS sequence (opt3) from neuraminidase__InfluenzaA__AAY98100

SEQ ID NO: 142345 - RNA, 1410 nt, Artificial Sequence; identical to SEQ ID NO: 142327
  derived and/or modified CDS sequence (opt3) from neuraminidase__InfluenzaA__AAY98110

SEQ ID NO: 142346 - RNA, 1410 nt, Artificial Sequence; identical to SEQ ID NO: 142327
  derived and/or modified CDS sequence (opt3) from neuraminidase__InfluenzaA__AAY98120

SEQ ID NO: 142347 - RNA, 1410 nt, Artificial Sequence; identical to SEQ ID NO: 142327
  derived and/or modified CDS sequence (opt3) from neuraminidase__InfluenzaA__AAY98130

SEQ ID NO: 142348 - RNA, 1410 nt, Artificial Sequence; identical to SEQ ID NO: 142327
  derived and/or modified CDS sequence (opt3) from neuraminidase__InfluenzaA__AAY98150

SEQ ID NO: 142349 - RNA, 1410 nt, Artificial Sequence
  derived and/or modified CDS sequence (opt3) from neuraminidase__InfluenzaA__AAY98160
augaaccccaaucagaagaucauuaccauaggcagcgugucccugacaaucgccacuauuugcuuccucaugcaaaucgcuauucuugucacgaccguuacacugcacuuuaaacaguacgaguguaacucuuugccuaauaaccaggugauguuaugcgaaccaacuauccuggagagaaauauaaccgaaaucguauaucuaacaaacaccacuauugagaaggaaaucuguccgaaacucgcagaguacaggaauuggucaaagccccagugcaaaauuacaggguucgccccuuuuaguaaggacaacagcauccggcuguccgcgggaggugauauaugggugacccgcgagccauaugucucuugugaccccgauaagugcuaccaauucgcucuuggccaggggacgacucugaauaaccgacauucgaaugacaccgugcacgaucguacaccuuauagaacuuugcucaugaacgaacugggaguuccauuucaucugggcaccaaacagguguguauugccuggucaagcaguuccugccacgacgguaaggcauggcuccaugucugugugacagggcacgaugagaaugccaccgcuucuuucaucuacggaggcagguuaguagacagcauuggcuccuggaguaaaaagauccugcggacgcaggaaucagagugcguuuguaucaacgggacuugcacaguggucaugaccgauggaagcgcaucuggucgcgccgacacuaaaauucuuuuuauagaggaaggcaagaucauucacaucucccaauugucagggaaugcucagcauguggaggaaugcagcuguuaucccagauacccuggagugaggugcgucugucgggauaacuggaagggcaguaaccgcccaauaguugacauuaaugugaaagauuacucuaucguauccagcuaugugugcucgggucuggucggggacacaccgcgaaagaacgacucuuccucaaguagcaauugucuaaaccccaauaacgaggaaggaggccacggcgugaaagggugggccuucgaugacggaaaugauguuuggauggguagaaccaucuccgagaaguuuaggucuggcuacgagacguucaaagugauugaaggguggagcaagccuaacucaaaacuccagaucaaucggcaggucauuguggaccgugauaaccgcaguggauauuccggcauauuuagcguagaggguaagucuugcaucaauagauguuucuacguugaacugauuagggggcggaagcaagagaccgaagugugguggacaucaaacaguaucgucguguuuugcggcacuagcggaaccuauggcacaggguccuggccagacggagcggauaucaaucuuaugcccauuuga

SEQ ID NO: 142350 - RNA, 1410 nt, Artificial Sequence; identical to SEQ ID NO: 142327
  derived and/or modified CDS sequence (opt3) from neuraminidase__InfluenzaA__AAY98170

SEQ ID NO: 142351 - RNA, 1410 nt, Artificial Sequence; identical to SEQ ID NO: 142327
  derived and/or modified CDS sequence (opt3) from neuraminidase__InfluenzaA__AAY98180

SEQ ID NO: 142352 - RNA, 1410 nt, Artificial Sequence; identical to SEQ ID NO: 142327
  derived and/or modified CDS sequence (opt3) from neuraminidase__InfluenzaA__AAY98200

SEQ ID NO: 142353 - RNA, 1410 nt, Artificial Sequence; identical to SEQ ID NO: 142327
  derived and/or modified CDS sequence (opt3) from neuraminidase__InfluenzaA__AAY98210

SEQ ID NO: 142354 - RNA, 1410 nt, Artificial Sequence; identical to SEQ ID NO: 142332
  derived and/or modified CDS sequence (opt3) from neuraminidase__InfluenzaA__AAY98220

SEQ ID NO: 142355 - RNA, 1410 nt, Artificial Sequence; identical to SEQ ID NO: 142327
  derived and/or modified CDS sequence (opt3) from neuraminidase__InfluenzaA__AAY98230

SEQ ID NO: 142356 - RNA, 1410 nt, Artificial Sequence
  derived and/or modified CDS sequence (opt3) from neuraminidase__InfluenzaA__AAY98250
augaaccccaaucagaagaucauuaccauaggcagcgugucccugacaaucgccacuauuugcuuccucaugcaaaucgcuauucuugucacgaccguuacacugcacuuuaaacaguacgaguguaacucuuugccuaauaaccaggugauguuaugcgaaccaacuauccuggagagaaauauaaccgaaaucguauaucuaacaaacaccacuauugagaaggaaaucuguccgaaacucgcagaguacaggaauuggucaaagccccagugcaaaauuacaggguucgccccuuuuaguaaggacaacagcauccggcuguccgcgggaggugauauaugggugacccgcgagccauaugucucuugugaccccgauaagugcuaccaauucgcucuuggccaggggacgacucugaauaaccgacauucgaaugacaccgugcacgaucguacaccuuauagaacuuugcucaugaacgaacugggaguuccauuucaucugggcaccaaacagguguguauugccuggucaagcaguuccugccacgacgguaaggcauggcuccaugucugugugacagggcacgaugagaaugccaccgcuucuuucaucuacggaggcagguuaguagacagcauuggcuccuggaguaaaaagauccugcggacgcaggaaucagagugcguuuguaucaacgggacuugcacaguggucaugaccgauggaagcgcaucuggucgcgccgacacuaaaauucuuuuuauagaggaaggcaagaucauucacaucucccaauugucagggagcgcucagcauguggaggaaugcaguuguuaucccagauacccuggagugaggugcgucugucgggauaauuggaagggcucuaaccgcccaauaguugacauuaacgugaaagauuacuccaucguaagcucguaugugugcucuggucuggucggggacacaccgcgaaagaaugacuccucaaguagcucccacugucuaaaccccaauaacgaggaaggaggccauggcgugaaagggugggccuucgaugacggaaaugauguuuggauggguagaaccaucucugagaaguuuaggagcggcuacgagacguucaaagugauugaaggguggucaaagccuaacaguaaacuccagaucaaucggcaggucauuguggaccgugauaaccgcuccggauauagcggcauauuuucuguagaggacaagucaugcaucaauagauguuucuacguugaacugauuaggggucggaagcaagagaccgaagugugguggacaaguaacagcaucgucguguuuugcgggacuuccggcaccuauggaacaggcucuuggccagauggggcggacaucaaucuuaugcccauuuga

SEQ ID NO: 142357 - RNA, 1410 nt, Artificial Sequence; identical to SEQ ID NO: 142327
  derived and/or modified CDS sequence (opt3) from neuraminidase__InfluenzaA__AAY98322

SEQ ID NO: 142358 - RNA, 1410 nt, Artificial Sequence; identical to SEQ ID NO: 142332
  derived and/or modified CDS sequence (opt3) from neuraminidase__InfluenzaA__AAY98332

SEQ ID NO: 142359 - RNA, 1410 nt, Artificial Sequence; identical to SEQ ID NO: 142327
  derived and/or modified CDS sequence (opt3) from neuraminidase__InfluenzaA__AAY98342

SEQ ID NO: 142360 - RNA, 1410 nt, Artificial Sequence; identical to SEQ ID NO: 142327
  derived and/or modified CDS sequence (opt3) from neuraminidase__InfluenzaA__AAY98359

SEQ ID NO: 142361 - RNA, 1410 nt, Artificial Sequence; identical to SEQ ID NO: 142332
  derived and/or modified CDS sequence (opt3) from neuraminidase__InfluenzaA__AAY98369

SEQ ID NO: 142362 - RNA, 1410 nt, Artificial Sequence
  derived and/or modified CDS sequence (opt3) from neuraminidase__InfluenzaA__AAY98379
augaaccccaaucagaagaucauuaccauaggcagcgugucccugacaaucgccacuauuugcuuccucaugcaaaucgcuauucuugucacgaccguuacacugcacuuuaaacaguacgaguguaacucuuugccuaauaaccaggugauguuaugcgaaccaacuaucauagagagaaauaucaccgaaauuguauaucugacaaacaccacuaucgagaaggaaauuuguccgaaacuagcagaguacaggaauuggucaaagccccagugcaaaaucacaggguucgccccuuuuaguaaggacaacagcauacggcucuccgcgggaggugauauuugggugacccgcgagccauaugucucuugugaccccgauaagugcuaccaauucgcucugggccaggggacgacucuuaauaaccgacauucgaaugacaccgugcacgaucguacaccuuauagaacucuguugaugaacgaacucggaguuccauuucaucugggcaccaaacagguguguaucgccuggucaagcaguuccugccacgacgguaaggcauggcugcaugucugugugacagggcacgaugagaaugccaccgcuucuuucauuuacggaggcaggcucguagacagcaucggcuccuggaguaaaaagaucuuacggacgcaggaaucagagugcguuuguauuaacgggacuugcacaguggucaugaccgauggaagcgcaucuggucgcgccgacacuaaaauacuguuuaucgaggaaggcaagauuauccacauaucccaacuuucagggagcgcucagcauguggaggaaugcaguuguuaucccagauacccuggagugaggugcgucugucgggauaauuggaagggcucuaaccgcccaauuguugacaucaacgugaaagauuacuccaucguaagcucguaugugugcucugguuuggucggggacacaccgcgaaagaaugacuccucaaguagcucccacugucugaaccccaauaacgaggaaggaggccauggcgugaaagggugggccuucgaugacggaaaugauguuuggauggguagaaccauuucugagaaguuuaggagcggcuacgagacguucaaagugaucgaaggguggucaaagccuaacaguaaacuacagauuaaucggcaggucauaguggaccguaacaaucgcuccggauauagcggcaucuuuucuguagaggguaagucaugcauuaacagauguuucuacguugaacucaucagggggcggaagcaagagaccgaagugugguggacaaguaauagcaucgucguguuuugcggcacuuccggaaccuauggcacagggucuuggccagauggagcggacauuaaccugaugcccauauga

SEQ ID NO: 142363 - RNA, 1410 nt, Artificial Sequence
  derived and/or modified CDS sequence (opt3) from neuraminidase__InfluenzaA__AAY98389
augaaccccaaucagaagaucauuaccauaggcagcgugucccugacaaucgccacuauuugcuuccucaugcaaaucgcuauucuugucacgaccguuacacugcacuuuaaacaguacgaguguaacucuuugccuaauaaccaggugauguuaugcgaaccaacuaucauagagagaaauaucaccgaaauuguauaucugacaaacaccacuaucgagaaggaaauuuguccgaaacuagcagaguacaggaauuggucaaagccccagugcaaaaucacaggguucgccccuuuuaguaaggacaacagcauacggcucuccgcgggaggugauauuugggugacccgcgagccauaugucucuugugaccccgauaagugcuaccaauucgcucugggccaggggacgacucuuaauaaccgacauucgaaugacaccgugcacgaucguacaccuuauagaacucuguugaugaacgaacucggaguuccauuucaucugggcaccaaacagguguguaucgccuggucaagcaguuccugccacgacgguaaggcauggcugcaugucugugugacagggcacgaugagaaugccaccgcuucuuucauuuacggaggcaggcucguagacagcaucggcuccuggaguaaaaagaucuuacggacgcaggaaucagagugcguuuguauuaacgggacuugcacaguggucaugaccgauggaagcgcaucuggucgcgccgacacuaaaauacuguuuaucgaggaaggcaagauuauccacauaucccaacuuucagggagcgcucagcauguggaggaaugcaguuguuaucccagauacccuggagugaggugcgucugucgggauaauuggaagggcucuaaccgcccaauuguugacaucaacgugaaagauuacuccaucguaagcucguaugugugcucugguuuggucggggacacaccgcgaaagaaugacuccucaaguagcucccacugucugaaccccaauaacgaggaaggaggccauggcgugaaagggugggccuucgaugacggaaaugauguuuggauggguagaaccauuucugagaaguuuaggagcggcuacgagacguucaaagugaucgaaggguggucaaagccuaacaguaaacuacagauuaaucggcaggucauaguggaccgugauaaccgcuccggauauagcggcaucuuuucuguagaggguaagucaugcauuaauagauguuucuacguugaacucaucagggggcggaagcaagagaccgaagugugguggacaaguaacagcaucgucguguuuugcggcacuuccggaaccuauggcacagggucuuggccagacggagcggauauuaaucugaugcccauauga

SEQ ID NO: 142364 - RNA, 1410 nt, Artificial Sequence; identical to SEQ ID NO: 142327
  derived and/or modified CDS sequence (opt3) from neuraminidase__InfluenzaA__AAY98399

SEQ ID NO: 142365 - RNA, 1410 nt, Artificial Sequence; identical to SEQ ID NO: 142327
  derived and/or modified CDS sequence (opt3) from neuraminidase__InfluenzaA__AAY98409

SEQ ID NO: 142366 - RNA, 1410 nt, Artificial Sequence; identical to SEQ ID NO: 142327
  derived and/or modified CDS sequence (opt3) from neuraminidase__InfluenzaA__AAY98773

SEQ ID NO: 142367 - RNA, 1410 nt, Artificial Sequence
  derived and/or modified CDS sequence (opt3) from neuraminidase__InfluenzaA__AAZ32955
augaaccccaaucagaagaucauuaccauaggcagcgugucccugacaaucucuacuauuugcuucuuuaugcaaaucgccauucucaucacgaccgucacacuucacuucaaacaguacgaguuuaacucaccuccaaauaaccagguuaugcugugugaaccgacuauaaucgagagaaauauuaccgaaaucguguauuugacaaacaccacuauugagaaggaaaucugccccaaauuagcugaguacaggaauuggaguaagccucaguguaacauaacaggguucgcaccauuuagcaaagacaauuccauucggcugucugccggaggugauaucuggguaacccgcgagcccuaugugucgugcgacccugauaaguguuaccaauucgcgcuaggccaggggacgacucucaacaauguccauucaaacgacauugugcacgaacgaaccccauaucguacacugcuuaugaaugagcugggaguucccuuucauuugggcacuaaacaggugugcaucgcuuggagcaguuccucuugucacgaugguaaggccuggcuccaugucugcgugaccggggacgaugaaaacgcaacagccagcuucaucuacaauggaagacugguagacuccauuguuucauggaguaagaaaauacugaggacccaggagagcgagugugugugcaucaacggcacguguacugucgugaugacagauggcucugcuuccgggaaggcagacaccaaaauucucuuuaucgaagagggaaagauagugcacacuucaacauuaagcgguagugcccaacacgucgaagagugcucuugcuauccucgguacccaggcguucgcugugugugcagagauaacuggaagggguccaauaggccgauuguagacaucaacaucaaagauuacagcauugugucgucuuaugucuguuccggacuggugggcgacacgccccggaagaaugacucaaguagcuccucucauugccuugauccuaacaaugaagagggugggcacggaguuaaaggcugggcuuucgacgauggcaacgacguguggauggggcgcaccaucagcgagaaguugcgaucaggauacgaaaccuuuaaagucauugaggguuggaguaauccaaacuccaagcugcagauaaauagacaggugaucguagauaggggcaaccggagcggguauucuggaauuuucucaguugaaggcaaaaguuguaucaaucguugcuuuuacguggagcuaauccgcgguagaaagcaggaaacagagguccucuggacuagcaacuccauuguggucuucugugggaccucuggcacauauggaacuggcucguggcccgacggggccgauauaaaucugaugccuaucuga

SEQ ID NO: 142368 - RNA, 1344 nt, Artificial Sequence
  derived and/or modified CDS sequence (opt3) from neuraminidase__InfluenzaA__AAZ32957
augaaccccaaucagaagaucauuaccauaggcagcgugucccugacaaucucuacuauuugcuucuuuaugcaaaucgccauucucaucacgaccgucacacuuauagagagaaacaucacugaaauuguuuaccugaccaauacaaccaucgagaaagaaauuuguccuaaguuggcugaguauaggaacuggucaaaaccacagugcaauaucacuggguucgcaccguuuaguaaggacaacagcauacgguuauccgccggaggugauauuugggugacacgcgaacccuacguaucuugugacccugauaaaugcuaucaguucgcgcugggccaggggaccacgcuaaauaacgugcacucgaaugacacuguccaugaucgaaccccauaccguacacuccugaugaacgagcuuggagugcccuuucaccugggcacuaagcaaguuuguaucgcuuggucaagcaguuccugccaugacgguaaggccugguugcacgugugugucaccggggaugacgagaaugcaacagccucuuucauuuauaacggaagacucguggauagcaucguauccuggaguaaaaagauccugaggacccaggaaucagagugcguuuguauuaauggcacgugcacuguggucaugacagacggcaacgcuagcgggaaagcagauaccaagauacuguuuaucgaagagggaaaaauugugcauacuucuacacucuccgguucagcccagcacguggaggaauguagcugcuacccucgguauccaggcguccgcugcguuuguagagacaauuggaaggggaguaacaggcccaucguggauauaaacauuaaggacuacucuaucguauccagcuacgugugcucgggauuagucggcgacaccccucggaaaaaugauucuuccucaaguagccacugucuggacccaaacaaugaggaaggugggcauggagugaagggcugggcuuucgaugacggcaacgauguuuggauggggcgcacgaucuccgagaaacuucgaucuggauaugaaaccuuuaaggugauugaggguuggagcaauccgaacucaaaauugcagaucaauagacaagucauuguggacaggggcaaccggaguggguacuccggaauauucagcguagagggcaagucuugcaucaaucguuguuuuuauguugaacugauucgcgguagaaaacaggagacagaagugcuauggacuucaaacaguaucgucguguucugcgggaccagcggcacauacggaacuggcuccuggcccgauggggccgacaucaaucucaugccuauuuga

SEQ ID NO: 142369 - RNA, 1344 nt, Artificial Sequence; identical to SEQ ID NO: 142368
  derived and/or modified CDS sequence (opt3) from neuraminidase__InfluenzaA__AAZ32958

SEQ ID NO: 142370 - RNA, 1344 nt, Artificial Sequence; identical to SEQ ID NO: 142368
  derived and/or modified CDS sequence (opt3) from neuraminidase__InfluenzaA__AAZ32959

SEQ ID NO: 142371 - RNA, 1410 nt, Artificial Sequence; identical to SEQ ID NO: 142332
  derived and/or modified CDS sequence (opt3) from neuraminidase__InfluenzaA__AAZ38465

SEQ ID NO: 142372 - RNA, 1410 nt, Artificial Sequence; identical to SEQ ID NO: 142332
  derived and/or modified CDS sequence (opt3) from neuraminidase__InfluenzaA__AAZ38476

SEQ ID NO: 142373 - RNA, 1410 nt, Artificial Sequence
  derived and/or modified CDS sequence (opt3) from neuraminidase__InfluenzaA__AAZ38487
augaaccccaaucagaagaucauuaccauaggcagcgugucccugacaaucgccacuauuugcuuccucaugcaaaucgcuauucuugucacgaccguuacacugcacuuuaaacaguacgaguguaacucuuugccuaauaaccaggugauguuaugcgaaccaacuauccuggagagaaauauaaccgaaaucguauaucuaacaaacaccacuauugagaaggaaaucuguccgaaacucgcagaguacaggaauuggucaaagccccagugcaaaauuacaggguucgccccuuuuaguaaggacaacagcauccggcuguccgcgggaggugauauaugggugacccgcgagccauaugucucuugugaccccgauaagugcuaccaauucgcucuuggccaggggacgacucugaauaaccgacauucgaaugacaccgugcacgaucguacaccuuauagaacuuugcucaugaacgaacugggaguuccauuucaucugggcaccaaacagguguguauugccuggucaagcaguuccugccacgacgguaaggcauggcuccaugucugugugacagggcacgaugagaaugccaccgcuucuuucaucuacggaggcagguuaguagacagcauuggcuccuggaguaaaaagauccugcggacgcaggaaucagagugcguuuguaucaacgggacuugcacaguggucaugaccgauggaagcgcaucuggucgcgccgacacuaaaauucuuuuuauagaggaaggcaagaucauucacaucucccaauugucagggagcgcucagcauguggaggaaugcaguuguuaucccagauacccuggagugaggugcgucugucgggauaauuggaagggcucuaaccgcccaauaguugacauuaacgugaaagauuacuccaucguaagcucguaugugugcucuggucuggucggggacacaccgcgaaagaaugacuccucaaguagcuccaacugucuaaaucccaacaaugaggaaggaggccacggcgugaaagggugggccuucgaugacggaaacgauguuuggauggguagaaccaucucugagaaguuuaggagcggcuacgagacguucaaagugauugaaggguggucaaagccuaauaguaaacuccagaucaaccggcaggucauuguggaccgugauaaucgcuccggauauagcggcauauuuucuguagaggguaagucaugcaucaacagauguuucuacguugaacugauuagggggcggaagcaagagaccgaagugugguggacaaguaauagcaucgucguguuuugcggcacuuccggaaccuauggcacagggucuuggccagacggagcggauaucaaccuuaugcccauuuga

SEQ ID NO: 142374 - RNA, 1410 nt, Artificial Sequence
  derived and/or modified CDS sequence (opt3) from neuraminidase__InfluenzaA__AAZ38509
augaaccccaaucagaagaucauuaccauaggcagcgugucccugacaaucucuacuauuugcuucuuuaugcaaaucgccauucucaucacgaccgucacacuucacuucaaacaguacgaguuuaacucaccuccaaauaaccagguuaugcugugugaaccgacuauaaucgagagaaauauuaccgaaaucguguauuugacaaacaccacuauugagaaggaaaucugccccaaauuagcugaguacaggaauuggaguaagccucagugugacauaacaggguucgcaccauuuagcaaagauaacuccauucggcugucugccggaggugacaucuggguaacccgcgagcccuaugugucgugcgauccugacaaguguuaccaauucgcgcuaggccaggggacgacucucaauaacguccauucaaaugauaccgugcacgaccgaacaccauaucguacucugcuuaugaacgaacugggaguucccuuucauuugggcaccaaacaggugugcauugcuuggagcaguuccucuugucacgaugguaaggccuggcuccaugucugcgugacaggggacgauaagaaugcaaccgccagcuucaucuacaacggaagacugguagacuccaucguuucauggaguaaagagauucugaggacgcaggaaagcgagugugugugcauaaauggcacuuguacagucgugaugaccgauggcucugcuuccgggaaggcagacacuaaaauccucuuuauugaggaaggaaagaucgugcacacaucaaccuuaagcgguagugcccaacacgucgaggaaugcucuugcuauccucgguacccaggcguucgcugugugugcagagauaacuggaagggguccaacaggccgauaguagacauuaauaucaaagacuacagcaucgugucgucuuaugucuguuccggacuggugggcgauacgccccggaagaacgacucaaguagcuccucucauugccuugauccuaauaacgaggaaggugggcacggaguuaaaggcugggcuuucgacgauggcaaugacguguggauggggcgcaccauuagcgagaaguugcgaucaggauacgagacauuuaaagucaucgaagguuggaguaacuccaauagcaagcugcagauuaacagacaggugauaguagauaggggcaaucggucuggguauucaggaaucuucaguguugagggcaaaagcuguauuaaccguugcuuuuacguggaacuaauccgcgguagaaaggaggaaacugagguccucuggaccuccaauucuaucguggucuucugugggacaucgggcacuuauggaaccggcagcuggccagacggggccgauauuaaccugaugcccauauga

SEQ ID NO: 142375 - RNA, 1410 nt, Artificial Sequence
  derived and/or modified CDS sequence (opt3) from neuraminidase__InfluenzaA__AAZ38586
augaaccccaaucagaagaucauuaccauaggcagcgugucccugacaaucucuacuauuugcuucuuuaugcaaaucgccauucucaucacgaccgucacacuucacuucaaacaguacgaguuuaacucaccuccaaauaaccagguuaugcugugugaaccgacuauaaucgagagaaauauuaccgaaaucguguauuugacaaacaccacuauugagaaggaaaucugccccaaauuagcugaguacaggaauuggaguaagccucagugugacauaacaggguucgcaccauuuagcaaagauaacuccauucggcugucugccggaggugacaucuggguaacccgcgagcccuaugugucgugcgauccugacaaguguuaccaauucgcgcuaggccaggggacgacucucaauaacguccauucaaaugauaccgugcacgaccgaacaccauaucguacucugcuuaugaacgaacugggaguucccuuucauuugggcaccaaacaggugugcauugcuuggagcaguuccucuugucacgaugguaaggccuggcuccaugucugcgugacaggggacgauaagaaugcaaccgccagcuucaucuacaacggaagacugguagacuccaucguuucauggaguaaagagauucugaggacgcaggaaagcgagugugugugcauaaauggcacuuguacagucgugaugaccgauggcucugcuuccgggaaggcagacacuaaaauccucuuuauugaggaaggaaagaucgugcacacaucaaccuuaagcgguagugcccaacacgucgaggaaugcucuugcuauccucgguacccaggcguucgcugugugugcagagauaacuggaagggguccaacaggccgauaguagacauuaauaucaaagacuacagcaucgugucgucuuaugucuguuccggacuggugggcgauacgccccggaagaacgacucaaguagcuccucucauugccuugauccuaauaacgaggaaggugggcacggaguuaaaggcugggcuuucgacgauggcaaugacguguggauggggcgcaccauuagcgagaaguugcgaucaggauacgagacauuuaaagucaucgaagguuggaguaacccaaauuccaagcugcagauuaacagacaggugauaguagauaggggcaaucggagcggguauucuggaaucuucucaguugagggcaaaaguuguauuaaccguugcuuuuacguggaacuaauccgcgguagaaaggaggaaacugagguccucuggaccagcaauuccaucguggucuucugugggacaucuggcacuuauggaaccggcucguggcccgacggggccgauauuaaccugaugccuauauga

SEQ ID NO: 142376 - RNA, 1410 nt, Artificial Sequence; identical to SEQ ID NO: 142375
  derived and/or modified CDS sequence (opt3) from neuraminidase__InfluenzaA__AAZ38597

SEQ ID NO: 142377 - RNA, 1410 nt, Artificial Sequence
  derived and/or modified CDS sequence (opt3) from neuraminidase__InfluenzaA__AAZ38608
augaaccccaaucagaagaucauuaccauaggcagcgugucccugacaaucucuacuauuugcuucuuuaugcaaaucgccauucucaucacgaccgucacacuucacuucaaacaguacgaguuuaacucaccuccaaauaaccagguuaugcugugugaaccgacuauaaucgagagaaauauuaccgaaaucguguauuugacaaacaccacuauugagaaggaaaugugccccaaauuagcugaguacaggaauuggaguaagccucagugugacaucacaggguucgcaccauuuagcaaagauaacuccauacggcugucugccggaggugacauuuggguaacccgcgagcccuaugugucgugcgauccugacaaguguuaccaauucgcgcuaggccaggggacgacucucaauaacguccauucaaaugauaccgugcacgaccgaacaccauaucguacucugcuuaugaacgaacugggaguucccuuucauuugggcaccaaacaggugugcaucgcuuggagcaguuccucuugucacgaugguaaggccuggcuccaugucugcgugacaggggacgauaagaaugcaaccgccagcuucauuuacaacggaagacugguagacuccaucguuucauggaguaaaaagauccugaggacgcaggagagcgaaugugugugcauuaauggcacuuguacagucgugaugaccgauggcucugcuuccgggaaagcagacacuaagauacucuuuaucgaggagggaaagauuauccacacaucaaccuuaagcgguagugcccaacacguggaagagugcucuugcuauccucgguacccaggcguccgcuguguuugcagagauaacuggaaaggguccaacaggccgauaguggacauuaauaucaaggacuacagcaucguaucgucuuauguguguuccggacuggucggcgauacgccccggaaaaacgacucaaguagcuccucucauugccuugauccuaauaacgaagagggugggcacggagugaagggcugggcuuucgacgauggcaaugacguuuggauggggcgcaccauuagcgaaaaauugcgaucaggauacgagacauuuaaggugaucgaggguuggaguaaaccaaacuccaagcugcagauuaauagacaggucauaguggauaggggcaaccggagcggguauucuggaaucuucucaguagaaggcaagaguuguauuaaucguugcuuuuacguugagcuaauccgcgguagaaaagaagagacugaagugcucuggaccagcaacuccaucgucguguucugugggacaucuggcacuuauggaaccggcucguggcccgacggggccgauacaaaucugaugccuauuuga

SEQ ID NO: 142378 - RNA, 1410 nt, Artificial Sequence
  derived and/or modified CDS sequence (opt3) from neuraminidase__InfluenzaA__AAZ38619
augaaccccaaucagaagaucauuaccauaggcagcgugucccugacaaucucuacuauuugcuucuuuaugcaaaucgccauucucaucacgaccgucacacuucacuucaaacaguacgaguuuaacucaccuccaaauaaccagguuaugcugugugaaccgacuauaaucgagagaaauauuaccgaaaucguguauuugacaaacaccacuauugagaaggaaaugugccccaaauuagcugaguacaggaauuggaguaagccucagugugacaucacaggguucgcaccauuuagcaaagauaacuccauacggcugucugccggaggugacauuuggguaacccgcgagcccuaugugucgugcgauccugacaaguguuaccaauucgcgcuaggccaggggacgacucucaauaacguccauucaaaugauaccgugcacgaccgaacaccauaucguacucugcuuaugaacgaacugggaguucccuuucauuugggcaccaaacaggugugcaucgcuuggagcaguuccucuugucacgaugguaaggccuggcuccaugucugcgugacaggggacgauaagaaugcaaccgccagcuucauuuacaacggaagacugguagacuccaucguuucauggaguaaaaagauccugaggacgcaggagagcgaaugugugugcauuaauggcacuuguacagucgugaugaccgauggcucugcuuccgggaaagcagacacuaagauacucuuuaucgaggagggaaagauuauccacacaucaaccuuaagcgguagugcccaacacguggaagagugcucuugcuauccucgguacccaggcguccgcuguguuugcagagauaacuggaaaggguccaacaggccgauaguggacauuaauaucaaggacuacagcaucguaucgucuuauguguguuccggacuggucggcgauacgccccggaaaaacgacucaaguagcuccucucauugccuugauccuaauaacgaagagggugggcacggagugaagggcugggcuuucgacgauggcaaugacguuuggauggggcgcaccauuagcgaaaaauugcgaucaggauacgagacauuuaaggugaucgaggguuggaguaaaccaaacuccaagcugcagauuaauagacaggucauaguggauaggggcaaccggagcggguauucuggaaucuucucaguagaaggcaagaguuguauuaaucguugcuuuuacguugagcuaauccgcgguagaaaagaagagacugaagugcucuggaccagcaacuccaucgucguguucugugggacaucuggcacuuauggaaccggcucguggcccgacggggccgauauuaaucugaugccuauauga

SEQ ID NO: 142379 - RNA, 1410 nt, Artificial Sequence; identical to SEQ ID NO: 142375
  derived and/or modified CDS sequence (opt3) from neuraminidase__InfluenzaA__AAZ38641

SEQ ID NO: 142380 - RNA, 1410 nt, Artificial Sequence; identical to SEQ ID NO: 142375
  derived and/or modified CDS sequence (opt3) from neuraminidase__InfluenzaA__AAZ38653

SEQ ID NO: 142381 - RNA, 1410 nt, Artificial Sequence; identical to SEQ ID NO: 142166
  derived and/or modified CDS sequence (opt3) from neuraminidase__InfluenzaA__AAZ43386

SEQ ID NO: 142382 - RNA, 1410 nt, Artificial Sequence
  derived and/or modified CDS sequence (opt3) from neuraminidase__InfluenzaA__AAZ43397
augaaccccaaucagaagaucauuaccauaggcagcgugucccugacaaucgccacuauuugcuuccucaugcaaaucgcuauucuugucacgaccguuacacugcacuuuaaacagcaugaguguaacucuccuccaaauaaccaggugauguugugcgaaccgacuaucauagagagaaauaucaccgaaauuguauacuuaacaaacaccacuaucgagagggaaauuugucccaagcuggcagaguaucggaauuggucaaaaccucagugcaacaucacaggguucgccccauuuaguaaggacaauagcauacgccuauccgcgggaggugauauuugggugacccgagagcccuacgucucuugugacccugauaaaugcuaucaauucgcucucggccaggggacgacucugaacaauggacacucgaacgacaccgugcaugaucguacaccauacagaacucuucugaugaaugaauugggcguucccuuucaccucgguacccgacagguguguaucgccuggucaagcaguuccugccaugacgggaaggcauggcugcacgucugugugacaggagaugacaagaacgccaccgcuucuuucauuuauaauggccggcugguagauagcaucggcuccuggaguaaaaagauccuccgcacgcaggagucagaaugcguuuguauuaacgggacuugcacaguggucaugaccgacggaagcgcaucugguaaagccgauacuaagauauuauuuaucgaggagggcaaaauugugcacaucuccacacugucagggagcgcucaacauguggaagagugcaguuguuacccuagauauccaggagucaggugcguuugucgggacaacuggaagggcucuaaucgcccgauaguggauauuaacguaaaggacuacuccaucgugagcucguacgucugcucuggucuugugggggacacccccaggaaaaaugauuccucaaguagcucccacuguuuggacccuaacaaugaagagggaggccauggcguuaaggggugggccuucgaugacggaaacgauguguggauggguagaacgaucucugaaaaacugaggagcggcuaugagaccuuuaaggucauugagggguggucaaaaccaaauaguaagcuacagacaaaccgucaggugaucguagaacggggaaaucgcuccggcuacagcgguauuuucucuguugaggggaaaucaugcauaaacagauguuuuuauguggaacucaucaggggccggaaggaggaaacugaggucugguggaccaguaauagcauuguggucuucugcggaacauccggcacuuacgggaccggaucuuggcccgacggugcggauaucaaccugaugccuaucuga

SEQ ID NO: 142383 - RNA, 1410 nt, Artificial Sequence
  derived and/or modified CDS sequence (opt3) from neuraminidase__InfluenzaA__AAZ43408
augaaccccaaucagaagaucauuaccauaggcagcgugucccugacaaucgccacuauuugcuuccucaugcaaaucgcuauucuugucacgaccguuacacugcacuuuaaacaguacgaguguaacucuccuccaaauaaccaggugauguugugcgaaccgacuaugaucgagagaaauauaaccgaaaucguauauuuaacaaacaccacuauugagaaggaaaucugucccaaacuggcagaguacaggaauuggucaaagccucagugcaacauuacaggguucgccccauuuaguaaagacaauagcauccggcuauccgcgggaggugauauaugggugacccgcgagcccuaugucucuugugacccugauaagugcuaccaauucgcucucggccaggggacgacucugaacaauggacauucgaacgacaccgugcacgaucgaacaccauaucguacucuucugaugaaugaauugggcguucccuuucaucucgguaccaaacagguguguauugccuggucaagcaguuccugccacgacgggaaggcauggcugcaugucugugugacaggagaugacgagaacgccaccgcuucuuucaucuacaauggcagacugguagauagcauuggcuccuggucaaagaaaauccucaggacgcaggaaagugagugcguuuguaucaacgggacuugcacaguggucaugaccgacggaagcgcaucugguaaggccgauacuaaaauuuuauuuauagaggaaggcaagaucgugcacacauccucacugagcgggagugcucaacacguggaggaaugcucuuguuauccucgguacccaggaguccgcugcguuuguagagacaacuggaagggcuccaauaggccgauuguggauaucaacguaaaagacuacagcauagugucgucuuaugucugcuccggucuugugggggacacgccccggaagaaugauucaaguagcuccucucauuguuuggacccuaacaaugaggaaggaggccacggcguuaaagggugggccuucgaugacggaaacgauguguggaugggucgcaccauuagcgagaagcugcgaucaggcuacgagaccuuuaaagucaucgaaggguggaguaagccaaauuccaaacuacagaucaacagacaggugauuguagacaggggaaaucggagcggcuauucugguaucuucucaguugagaguaagagcugcauuaaccguuguuuuuacguggaacucauacgcgggagaaagcaggagacagaaguccuguggacuuccaauucuaucguggucuucugcggcaccucgggaacauauggcacugggagcuggcccgauggagcggacauuaaccuuaugccuaucuga

SEQ ID NO: 142384 - RNA, 1410 nt, Artificial Sequence
  derived and/or modified CDS sequence (opt3) from neuraminidase__InfluenzaA__AAZ74355
augaaccccaaucagaagaucauuaccauaggcagcgugucccugacaaucgccacuauuugcuuccucaugcaaaucgcuauucuugucacgaccguuacacugcacuuuaaacagcaugaguguaacucuccuccaaauaaccaggcaaugccgugcgaacccgccaucauagagagaaauacuaccgaaacaguguacuugaccaacacuacaaucgagaaggaaauuuguccuaaauuagcggaguauaggaauuggucaaagccacagugcaacaucaccggguucgcucccuuuaguaaagacaauagcauucggcuguccgccggaggugauaucuggguaacgcgcgagccuuacgugucuugugacccagauaagugcuaucaauucgcacuaggccaggggacuacccucaacaauggacacucgaacgacacaguccaugaucgaacucccuaccguacccugcuuaugaaugaacugggcgugccuuuucacuuggguacaagacagguuuguauagccuggucaagcaguuccugccaugacgggaaggcuuggcuccacgugugugucaccggagaugacgagaacgcaacggccucuuucauuuauaauggcaggcugguggauagcaucggcuccuggaguaaaaagauucugcggacucaggaaucagagugcguauguaucaacgggacaugcaccguugugaugacugacggaagcgcuucugguaaagccgauacaaagauccucuuuauugaggaaggcaaaauaguccacaucuccaccuuaucagggagcgcgcaacauguggaggaaugcaguuguuacccacgcuauccgggagugagaugcgucuguagggacaacuggaagggcucuaaucggcccauuguugauaucaacgugaaggacuacuccauaguaagcucguacgugugcucuggucuggucggggacacgccucgcaaaaaugauuccuucucaaguagccacugucuugacccaaacaaugaggaaggaggccauggcgugaaggggugggcauuugaugacggaaacgauguuuggaugggucgaaccauuuccgagaaauugagaucuggcuaugagacauucaaggugaucgaaggguggagcaaacccaauucaaagcugcagaucaacaggcaggucauuguggagcggggaaaucguaguggcuacuccgguaucuuuagcguagaagggaaaucuugcauuaaccgcuguuucuauguugagcuaauaagaggcaggaaggaagagacugaggugugguggaccucaaauaguaucgucguguuuugcggaacaagcggcacuuacgggaccggauccuggccugacggugccgauauuaaccucaugccaaucuga

SEQ ID NO: 142385 - RNA, 1410 nt, Artificial Sequence
  derived and/or modified CDS sequence (opt3) from neuraminidase__InfluenzaA__AAZ74366
augaaccccaaucagaagaucauuaccauaggcagcgugucccugacaaucgccacuauuugcuuccucaugcaaaucgcuauucuugucacgaccguuacacugcacuuuaaacaguacgaguguaacucuuugccuaauaaccaggugauguuaugcgaaccaacuaucauagagagaaauaucaccgaaauuguauaucugacaaacaccacuaucgagaaggaaauuuguccgaaacuagcagaguacaggaauuggucaaagccccagugcaaaaucacaggguucgccccuuuuaguaaggacaacagcauacggcucuccgcgggaggugauauuugggugacccgcgagccauaugucucuugugaccccgauaagugcuaccaauucgcucugggccaggggacgacucuuaauaaccgacauucgaaugacaccgugcacgaucguacaccuuauagaacucuguugaugaacgaacucggaguuccauuucaucugggcaccaaacagguguguaucgccuggucaagcaguuccugccacgacgguaaggcauggcugcaugucugugugacagggcacgaugagaaugccaccgcuucuuucauuuacgacggaaggcucguagauagcaucggcuccuggaguaaaaagaucuuacggacgcaggaaucagagugcguuuguauuaacggcacuugcacaguggucaugaccgacgggagcgcaucuggaaaagccgauacuaagauacuguuuaucgaggaagguaagauuauccacauaucccaacuuucaggcagcgcucagcauguggaggaaugcaguuguuauccccgcuacccuggggugagaugcgucuguagggacaauuggaaaggaucuaaccggccaauuguugauaucaacgugaaggacuacuccaucguaagcucguaugugugcucuggcuuggucggugacacaccgcgcaaaaaugauuccucaaguagcucccacugucugaaccccaauaacgaggaagggggacauggcgugaagggcugggccuucgacgaugggaaugacguuuggaugggacgaaccauuucugagaaauuuagaagcgguuacgagacguucaaggugaucgaaggcuggucaaaaccuaacaguaagcuacagauuaauaggcaggucauaguggauaaggacaaccgguccggguauagcggaaucuuuucuguagagggcaaaucaugcauuaaucguuguuucuacguugaacucauccgcgguagaaagcaagagaccgaagugugguggacaaguaacagcaucgucguguuuugcgggacuuccggcaccuauggaacaggcucuuggccagauggggcggacauuaaucugaugcccauauga

SEQ ID NO: 142386 - RNA, 1410 nt, Artificial Sequence
  derived and/or modified CDS sequence (opt3) from neuraminidase__InfluenzaA__AAZ74377
augaaccccaaucagaagaucauuaccauaggcagcgugucccugacaaucgccacuauuugcuuccucacgcagaucgcuauucuugucaccacaguuacucugcacuuuaaacaguacgaguguaacucuccuccaaauaaccaggugauguugugcgaaccgaccaucauagagagaaauaucacagaaauuguauauuuaaccaacacuacaaucgagaaggaaauuugucccaaacuggcagaguacaggaauuggucaaagccucagugcaacaucaccggguucgccccauuuaguaaagacaauagcauacggcuauccgcgggaggugauauuugggugacgcgcgagcccuaugucucuugugacccugauaagugcuaccaauucgcucucggccaggggacuacccugaacaauggacauucgaacgacacagugcacgaucgaacuccauaucguacccuucugaugaaugaauugggcguucccuuucaucucgguacaaaacagguguguaucgccuggucaagcaguuccugccacgacgggaaagcauggcugcaugucugugugaccggagaugacaagaacgccacggcuucuuucauuuacaauggcagacugguagauagcaucggcuccuggucaaagaagauccucaggacucaggagagugaaugcguuuguauuaacgggacaugcaccguggucaugacugacggaagcgcaucugguaaagccgauacaaagauauuauuuaucgaggagggcaagauugugcacaccucccugcuuucagggagcgcucaacacguggaagagugcaguuguuauccucgguacccaggaguccgcugcguuuguagagacaacuggaaaggcucuaauaggccgaucguggauauaaacguaaaggacuacuccauugugagcucguaugucugcucugguuuggugggggacacgccccggaaaaaugauuccucaaguagcucccauugucuggacccuaacaaugaagagggaggccacggcguuaaggggugggccuucgaugacggaaacgauguguggaugggucgcaccauccgagaaaaacuaagaucuggcuacgagacauuuaaggucaucgagggguggagcaaaccaaauucaaagcuccagauuaacaggcaagugaucguagaccgggauaaucguaguggauauuccggcauuuucagcguugaagguaagucuugcauaaaccgcuguuuuuacguggagcugaucagagggaggaaucaggaaacugagguccuuuggaccucaaacaguauuguggucuucugcggcacaagcggaacuuauggcaccggguccuggcccgacggagcggauaucaaucugaugccuaucuga

SEQ ID NO: 142387 - RNA, 1410 nt, Artificial Sequence
  derived and/or modified CDS sequence (opt3) from neuraminidase__InfluenzaA__AAZ74400
augaaccccaaucagaagaucauuaccauaggcagcgugucccugacaaucgccacuauuugcuuccucaugcaaaucgcuauucuugucacgaccguuacacugcacuuuaaacaguacgaguguaacucuccuccaaauaaccaggugauguugugcgaaccgacuaucauagagagaaauaucaccgaaauuguauauuuaacaaacaccacuaucgagaaggaaauuugucccaaacuggcagaguacaggaauuggucaaagccucagugcaaaaucacaggguucgccccauuuaguaaggacaacagcauacggcuauccgcgggaggugauauuugggugacccgcgagcccuaugucucuugugacccugauaagugcuaccaauucgcucucggccaggggacgacucugaauaaccgacauucgaaugacaccgugcacgaucguacaccauauagaacucuucugaugaacgaauugggaguucccuuucaucucggcaccaaacagguguguaucgccuggucaagcaguuccugccacgacgguaaggcauggcugcaugucugugugacagggcacgaugagaaugccaccgcuucucugauuuacgacggaaggcucguagauagcaucggcuccuggucaaagaagaucuuacggacgcaggaaagugagugcguuuguauuaacggcacuugcacaguggucaugaccgacgggagcgcaucuggacgcgccgauacuaaaauacuguucaucgaggaagguaagauugugcacacauccaaacuuucaggcagcgcucaacauguggaggaaugcaguuguuauccuagauacccaggggucaggugcguuugucgggacaauuggaaaggaucuaaccgcccgaucguggauauaaacguaaaggacuacuccauugugagcucguaugucugcucuggcuuggugggugacacgccccggaaaaaugauuccucaaguagcucccacugucuggacccuaacaaugaggaagggggacauggcguuaagggcugggccuuugaugacgggaacgauguguggaugggaagaaccaucucugagaaaagcaggucagguuacgagaccuucaaggucaucgaaggcuggaguaaaccaaauuccaagcuacagauuaaccgacaggugaucguagagcgugggaauaugagcggauauucuggcauauuuucaguugaagguaagaguugcauuaaccgcuguuucuacguggagcucaucagagggaggaaacaggaaacagaggucugguggacuagcaauuccauuguggucuuuugcggcaccucuggaacauauggcacugggucguggcccgacggagcggauaucaaccugaugccuaucuga

SEQ ID NO: 142388 - RNA, 1410 nt, Artificial Sequence; identical to SEQ ID NO: 142327
  derived and/or modified CDS sequence (opt3) from neuraminidase__InfluenzaA__AAZ74411

SEQ ID NO: 142389 - RNA, 1410 nt, Artificial Sequence
  derived and/or modified CDS sequence (opt3) from neuraminidase__InfluenzaA__AAZ74422
augaaccccaaucagaagaucauuaccauaggcagcgugucccugacaaucucuacuauuugcuucuuuaugcaaaucgccauucucaucacgaccgucacacuucacuucaaacaguacgaguuuaacucaccuccaaauaaccagguuaugcugugugaaccgacuauaaucgagagaaauauuaccgaaaucguguauuugacaaacaccacuauugagaaggaaaucugccccaaaccugcugaguacaggaauuggaguaagccacagugugacauaacaggguucgcacccuuuagcaaagauaacuccauucgguuaucugccggaggugacaucuggguaacccgcgagccuuaugugucgugcgauccagacaaguguuaccaauucgcgcugggccaggggacgacucuaaauaacguccauucaaaugauaccgugcacgaccgaacacccuaucguacucuccugaugaacgaacuuggaguuccuuuucaucugggcaccaaacaggugugcauugcuuggagcaguuccucuugucacgaugguaaggccugguugcaugucugcgugacaggggacgauaagaaugcaaccgccagcuucaucuacaacggaagacucguagacuccaucguuucauggaguaaagagauucugaggacgcaggaaagcgagugugugugcauaaauggcacuugugcugucgugaugacagauggcucugcauccgggaaggccgacaccaaaauccuguuuauugaggaaggaaagaucgugcacacuucaaagcucagcgguagugcucaacacgucgaggaaugcucuugcuauccacgguacccgggcauacgcuguguuugcagagauaacuggaaaggguccaacaggcccauuguggacaucaauaucaaggacuacagcauuguaucgucuuauguguguuccggauuagucggcgauacaccucggaaaaacgacucaaguagcuccucucauugccuggauccaaauaacgaggaaggugggcacggagugaagggcugggccuucgacgauggcaaugacguuuggauggggcgcaccaucagcgagaaacuucgaucaggauacgagacguuuaaggugauugaagguuggaguaaccccaauuccaaauugcagauaaacagacaggucaucguggauaggggcaaucggagcggguauucuggaauuuucucaguagagggcaagaguuguaucaaccguugcuuuuacguugaacugauccgcgguagaaaggaggaaaccgaggugcuauggacaagcaauuccauugucguguucugugggacuucuggcaccuauggaacaggcucguggccugacggggcggauauaaaccucaugccaaucuga

SEQ ID NO: 142390 - RNA, 1410 nt, Artificial Sequence; identical to SEQ ID NO: 142375
  derived and/or modified CDS sequence (opt3) from neuraminidase__InfluenzaA__AAZ74444

SEQ ID NO: 142391 - RNA, 1410 nt, Artificial Sequence
  derived and/or modified CDS sequence (opt3) from neuraminidase__InfluenzaA__AAZ74455
augaaccccaaucagaagaucauuaccauaggcagcgugucccugacaaucucuacuauuugcuucuuuaugcaaaucgccauucucaucacgaccgucacacuucacuucaaacaguacgaguuuaacucaccuccaaauaaccagguuaugcugugugaaccgacuauaaucgagagaaauauuaccgaaaucguguauuugacaaacaccacuauugagaaggaaaucugccccaaauuagcugaguacaggaauuggaguaagccucagugugacauaacaggguucgcaccauuuagcaaagauaacuccauucggcugucugccggaggugacaucuggguaacccgcgagcccuaugugucgugcgauccugacaaguguuaccaauucgcgcuaggccaggggacgacucucaauaacguccauucaaaugauaccgugcacgaccgaacaccauaucguacucugcuuaugaacgaacugggaguucccuuucauuugggcaccaaacaggugugcauugcuuggagcaguuccucuugucacgaugguaaggccuggcuccaugucugcgugacaggggacgauaagaaugcaaccgccagcuucaucuacaacggaagacugguagacuccaucguuucauggaguaaagauauucugaggacgcaggagagcgaaugugugugcauaaauggcacuuguacagucgugaugaccgacggcucugcuuccgggaaggcagauacuaaaauccucuuuauugaggagggaaagaucgugcacacaucaaccuuaagcgguagugcccaacacgucgaagagugcucuugcuauccucgguacccaggcguucgcugugugugcagagacaacuggaagggguccaacaggccgauaguagacauuaauaucaaagauuacagcaucgugucgucuuaugucuguuccggacuggugggcgacacgccccggaagaacgauucaaguagcuccucucauugccuugacccuaauaacgaagagggugggcacggaguuaaaggcugggcuuucgaugacggcaaugauguguggauggggcgcaccauuagcgaaaaguugcgacugggauacgagacauuuaaagucaucgaggguuggucaaacccaaauaguaagcuacagauuaacagacaggugauaguagaaaggggcaaucgguccggguauagcggaaucuucucuguugagggcaaaucauguauuaaccguugcuuuuacguggaacucauccgcgguagaaaggaggaaacugagguccuguggaccaguaauagcaucguggucuucugugggacauccggcacuuauggaaccggcucuuggcccgacggggccgauauuaaccuuaugccuauauga

SEQ ID NO: 142392 - RNA, 1410 nt, Artificial Sequence; identical to SEQ ID NO: 142375
  derived and/or modified CDS sequence (opt3) from neuraminidase__InfluenzaA__AAZ74477

SEQ ID NO: 142393 - RNA, 1410 nt, Artificial Sequence; identical to SEQ ID NO: 142391
  derived and/or modified CDS sequence (opt3) from neuraminidase__InfluenzaA__AAZ74488

SEQ ID NO: 142394 - RNA, 1410 nt, Artificial Sequence
  derived and/or modified CDS sequence (opt3) from neuraminidase__InfluenzaA__AAZ74499
augaaccccaaucagaagaucauuaccauaggcagcgugucccugacaaucucuacuauuugcuucuuuaugcaaaucgccauucucaucacgaccgucacacuucacuucaaacaguacgaguuuaacucaccuccaaauaaccagguuaugcugugugaaccgacuauaaucgagagaaauauuaccgaaaucguguauuugacaaacaccacuauugagaaggaaaucugccccaaauuagcugaguacaggaauuggaguaagccucagugugacauaacaggguucgcaccauuuagcaaagauaacuccauucggcugucugccggaggugacaucuggguaacccgcgagcccuaugugucgugcgauccugacaaguguuaccaauucgcgcuaggccaggggacgacucucaauaacguccauucaaaugauaccgugcacgaccgaacaccauaucguacucugcuuaugaacgaacugggaguucccuuucauuugggcaccaaacaggugugcauugcuuggagcaguuccucuugucacgaugguaaggccuggcuccaugucugcgugacaggggacgauaagaaugcaaccgccagcuucaucuacaacggaagacugguagacuccaucguuucauggaguaaagagauucugaggacgcaggaaagcgagugugugugcauaaauggcacuugugcugucgugaugacagauggcucugcauccgggaaggccgacaccaaaauccucuuuauugaggaaggaaagaucgugcacacuucaaaguuaagcgguagugcucaacacgucgaggaaugcucuugcuauccucgguacccaggcauacgcuguguuugcagagauaacuggaaaggguccaacaggccgauuguggacaucaauaucaaggacuacagcauuguaucgucuuauguguguuccggacuggucggcgauacaccccggaaaaacgacucaaguagcuccucucauugccuugauccuaauaacgaggaaggugggcacggagugaagggcugggccuucgacgauggcaaugacguuuggauggggcgcaccaucagcgagaaauugcgaucaggauacgagacguuuaaggugauugaagguuggaguaacccaaauuccaaacugcagauaaacagacaggucaucguggauaggggcaaucggagcggguauucuggaauuuucucaguagagggcaagaguuguaucaaccguugcuuuuacguugaacuaauccgcgguagaaaggaggaaaccgaggugcucuggacaagcaauuccauugucguguucugugggacuucuggcaccuauggaacaggcucguggcccgacggggcggauauaaaccugaugccuaucuga

SEQ ID NO: 142395 - RNA, 1410 nt, Artificial Sequence; identical to SEQ ID NO: 142391
  derived and/or modified CDS sequence (opt3) from neuraminidase__InfluenzaA__AAZ74510

SEQ ID NO: 142396 - RNA, 1410 nt, Artificial Sequence; identical to SEQ ID NO: 142394
  derived and/or modified CDS sequence (opt3) from neuraminidase__InfluenzaA__AAZ74521

SEQ ID NO: 142397 - RNA, 1410 nt, Artificial Sequence
  derived and/or modified CDS sequence (opt3) from neuraminidase__InfluenzaA__AAZ74532
augaaccccaaucagaagaucauuaccauaggcagcgugucccugacaaucucuacuauuugcuucuuuaugcaaaucgccauucucaucacgaccgucacacuucacuucaaacaguacgaguuuaacucaccuccaaauaaccagguuaugcugugugaaccgacuauaaucgagagaaauauuaccgaaaucguguauuugacaaacaccacuauugagaaggaaaucugccccaaauuagcugaguacaggaauuggaguaagccucagugugacauaacaggguucgcaccauuuagcaaagauaacuccauucggcugucugccggaggugacaucuggguaacccgcgagcccuaugugucgugcgauccugacaaguguuaccaauucgcgcuaggccaggggacgacucucaauaacguccauucaaaugauaccgugcacgaccgaacaccauaucguacucugcuuaugaacgaacugggaguucccuuucauuugggcaccaaacaggugugcauugcuuggagcaguuccucuugucacgaugguaaggccuggcuccaugucugcgugacaggggacgauaagaaugcaaccgccagcuucaucuacaacggaagacugguagacuccaucguuucauggaguaaagauauucugaggacgcaggagagcgaaugugugugcauaaauggcacuuguacagucgugaugaccgacggcucugcuuccgggaaggcagauacuaaaauccucuuuauugaggagggaaagaucgugcacacaucaaccuuaagcgguaacgcccaacacgucgaagagugcaguugcuauccucgguacccaggcguucgcugugugugcagagacaacuggaaggggucuaauaggccgauaguagacauuaacaucaaagauuacuccaucgugagcucguaugucuguucuggacuggugggcgacacgccccggaagaaugauuccucaaguagcucccauugccuugacccuaacaaugaagagggugggcacggaguuaaaggcugggcuuucgaugacggcaacgauguguggauggggcgcaccauuucugaaaaguugcgacugggauacgagacauuuaaagucaucgaggguuggagcaauccaaacucaaagcuacagauuaauagacaggugauaguagaaaggggcaaccggaguggguauuccggaaucuucagcguugagggcaaaucuuguauuaaucguugcuuuuacguggaacucauccgcgguagaaaggaggaaacugagguccuguggaccucaaacaguaucguggucuucugugggacaagcggcacuuauggaaccggcuccuggcccgacggggccaauauuaaccuuaugccuauauga

SEQ ID NO: 142398 - RNA, 1410 nt, Artificial Sequence; identical to SEQ ID NO: 142375
  derived and/or modified CDS sequence (opt3) from neuraminidase__InfluenzaA__AAZ74543

SEQ ID NO: 142399 - RNA, 1410 nt, Artificial Sequence; identical to SEQ ID NO: 142327
  derived and/or modified CDS sequence (opt3) from neuraminidase__InfluenzaA__AAZ74565

SEQ ID NO: 142400 - RNA, 1410 nt, Artificial Sequence; identical to SEQ ID NO: 142375
  derived and/or modified CDS sequence (opt3) from neuraminidase__InfluenzaA__AAZ74598

SEQ ID NO: 142401 - RNA, 1410 nt, Artificial Sequence
  derived and/or modified CDS sequence (opt3) from neuraminidase__InfluenzaA__AAZ74609
augaaccccaaucagaagaucauuaccauaggcagcgugucccugacaaucgccacuauuugcuuccucaugcaaaucgcuauucuugucacgaccguuacacugcacuuuaaacaguacgaguguaacucuccuccaaauaaccaggugauguugugcgaaccgaucauaaucgagagaaauauuacugaaaucguauauuuaaccaacacaaccauugagaaggaaaucugucccaaacuggcagaguacaggaauuggucaaagccucagugcaaaauaacuggguucgccccauuuaguaaggacaacagcauucggcuauccgcgggaggugauaucugggugacacgcgagcccuaugucucuugugacccugauaagugcuaccaauucgcucucggccaggggaccacgcugaauaaccgacauucgaaugacacugugcacgaucguaccccauauagaacacuucugaugaacgaauugggaguucccuuucaucucggcacuaaacagguguguauugccuggucaagcaguuccugccacgacgguaaggcauggcugcaugucugugugaccgggcacgaugagaaugccacagcuucuuucaucuacgacggaaggcugguagauagcaucuccucauggaguaaaaacauucuccggacccaggaaagcgagugcguuuguauaaauggcacgugcacuguggucaugacagacggcucugcauccgagcgcgccgauaccaagaucuuauuuauugaagaggggaaaaucgugcacauaucaccucugagcggaagugcucaacauguggaagagugcucuuguuauccaagauacccgggugucaggugcguuugucgggacaacuggaagggcuccaaccgccccauuguggauaucaauguaaaggacuacagcaucgugucgucuuaugucugcuccgggcuugugggagacacuccucggaaaaacgauucaaguagcuccucuuacuguuugaauccaaacaaugaagagggcggucacgggguuaagggaugggccuucgacgauggcaacgacguguggaugggcagaacaauuagcgagaaacugaggucaggguaugaaaccuuuaaggucaucggagguuggaguaaacccaauuccaagcuacagauuaaccgacaggugauaguagaucguggcaaucgcagcggguacucuggaaucuucucaguugagggcaaaaguugcgugaacagauguuuuuaugucgaacucauuaggggucggaagcaggagacggaagugugguggaccagcaauuccaucgucguguucugcgggacaucuggcacuuacggaaccggcucguggccugacggggcggauaucaaccugaugccaauuuga

SEQ ID NO: 142402 - RNA, 1410 nt, Artificial Sequence; identical to SEQ ID NO: 142109
  derived and/or modified CDS sequence (opt3) from neuraminidase__InfluenzaA__AAZ74620

SEQ ID NO: 142403 - RNA, 1410 nt, Artificial Sequence; identical to SEQ ID NO: 142221
  derived and/or modified CDS sequence (opt3) from neuraminidase__InfluenzaA__AAZ79508

SEQ ID NO: 142404 - RNA, 1410 nt, Artificial Sequence
  derived and/or modified CDS sequence (opt3) from neuraminidase__InfluenzaA__AAZ79519
augaaccccaaucagaagaucauuaccauaggcagcgugucccugacaaucgccacuauuugcuuccucaugcaaaucgcuauucuugucacgaccguuacacugcacuuuaaacaguacgaguguaacucuccuccaaauaaccaggugauguugugcgaaccgacuaucuuagagagaaauauaaccgaaaucguauaucugacaaacaccacuauugagaaggaaaucugucccaaacuagcagaguacaggaauuggucaaagccucagugcaaaauuacaggguucgccccauuuaguaaggacaacagcauccggcucuccgcgggaggugauauaugggugacccgcgagcccuaugucucuugugacccugauaagugcuaccaauucgcucugggccaggggacgacucuuaauaaccgacauucgaaugacaccgugcacgaucguacaccauauagaacucuguugaugaacgaacucggaguucccuuucaucugggcaccaaacagguguguauugccuggucaagcaguuccugccacgacgguaaggcauggcugcaugucugugugacagggcacgauaaaaaugccaccgcuucuuucaucuacggaggcaggcucguagacagcauuggcuccuggucaaagaaaaucuuacggacgcaggagagugaaugcguuuguaucaacgggacuugcacaguggucaugaccgauggaagcgcaucuggucgcgccgacacuaagauucuguuuauagaggagggcaagaucauucacaucucccaacuuucagggagcgcucagcauguggaagagugcaguuguuauccuagauacccaggagugaggugcgucugucgggauaauuggaaaggcucuaaccgcccgauaguugacauuaacgugaaggauuacuccaucguaagcucguaugugugcucugguuuggucggggacacaccccgaaagaaugacuccucaaguagcucccacugucugaacccuaauaacgaagagggaggccauggcgugaaagggugggccuucgaugacggaaaugauguuuggauggguagaaccaucucugaaaaauuuaggagcggcuacgagacguucaaggugauugagggguggucacggccaaacaguaaacuacagaucaaucgucaggucauuguggaccgcgauaacagauccggauauagcggcauauuuucuguagaagguaagucaugcaucaauagguguuucuacguugagcucauucgggggcgaaagcaagaaaccgaggugugguggacaaguaacagcaucgucguguuuugcggcacuuccggaaccuauggcacagggucuuggcccgacggagcggauaucaaucugaugccuauuuga

SEQ ID NO: 142405 - RNA, 1410 nt, Artificial Sequence; identical to SEQ ID NO: 142185
  derived and/or modified CDS sequence (opt3) from neuraminidase__InfluenzaA__AAZ79530

SEQ ID NO: 142406 - RNA, 1410 nt, Artificial Sequence
  derived and/or modified CDS sequence (opt3) from neuraminidase__InfluenzaA__AAZ79552
augaaccccaaucagaagaucauuaccauaggcagcgugucccugacaaucgccacuauuugcuuccucaugcaaaucgcuauucuugucacgaccguuacacugcacuuuaaacaguacgaguguaacucuccuccaaauaaccaggugauguugugcgaaccgacuaucauagagagaaauaucaccgaaauuguauauuuaacaaacaccacuaucgagaaggaaauuugucccaaacuggcagaguacaggaauuggucaaagccucagugcaacaucacaggguucgccccauuuaguaaagacaauagcauacggcuauccgcgggaggugauauuugggugacccgcgagcccuaugucucuugugacccugauaagugcuaccaauucgcucucggccaggggacgacucugaacaauggacauucgaacgacaccgugcacgaucgaacaccacaucguacucuucugaugaaugaauugggcguucccuuucaccucgguaccaaacagguguguaucgccuggucaagcaguuccugccaugacgggaaagcauggcugcacgucugugugacaggagaugacaagaacgccaccgcuucuuucauuuauaauggcagacugguagauagcaucggcuccuggucaaagaagauccucaggacgcaggagagugaaugcguuuguauuaacgggacuugcacaguggucaugaccgacggaagcgcaucugguaaagccgauacuaagauauuauuuaucgaggagggcaagauugugcacacaucccugcuuucagggagcgcucaacauguggaagagugcaguuguuacccucgguauccaggaguccgcugcguuuguagagacaacuggaaaggcucuaauaggccgaucguggauauaaacguaaaggacuacuccauugugagcucguacgucugcucugguuuggugggggacacuccccggaaaaaugauuccucaaguagcucccacugucuggacccuaacaaugaagagggaggccauggcguuaaggggugggccuucgaugacggaaacgauguguggaugggucgcacgaucucugaaaaacuacgaagcggcuaugagaccuuuaaggucaucgagggguggucaaaaccaaauaguaagcuccagauuaacagacaggugaucguagacagggauaaucgguccggauacagcggcauuuucucuguugaagguaagucaugcauaaaccguuguuuuuauguggagcugauccgcgggagaaaucaggaaacagagguccuuuggaccaguaacagcauuguggucuucugcggcaccuccggaacauacggcacugggucuuggcccgacggagcggauaucaaucugaugccuaucuga

SEQ ID NO: 142407 - RNA, 1410 nt, Artificial Sequence; identical to SEQ ID NO: 142327
  derived and/or modified CDS sequence (opt3) from neuraminidase__InfluenzaA__AAZ79563

SEQ ID NO: 142408 - RNA, 1410 nt, Artificial Sequence; identical to SEQ ID NO: 142327
  derived and/or modified CDS sequence (opt3) from neuraminidase__InfluenzaA__AAZ79574

SEQ ID NO: 142409 - RNA, 1410 nt, Artificial Sequence; identical to SEQ ID NO: 142327
  derived and/or modified CDS sequence (opt3) from neuraminidase__InfluenzaA__AAZ79585

SEQ ID NO: 142410 - RNA, 1410 nt, Artificial Sequence; identical to SEQ ID NO: 142394
  derived and/or modified CDS sequence (opt3) from neuraminidase__InfluenzaA__AAZ79618

SEQ ID NO: 142411 - RNA, 1410 nt, Artificial Sequence; identical to SEQ ID NO: 142375
  derived and/or modified CDS sequence (opt3) from neuraminidase__InfluenzaA__AAZ79633

SEQ ID NO: 142412 - RNA, 1410 nt, Artificial Sequence; identical to SEQ ID NO: 142394
  derived and/or modified CDS sequence (opt3) from neuraminidase__InfluenzaA__AAZ79945

SEQ ID NO: 142413 - RNA, 1410 nt, Artificial Sequence; identical to SEQ ID NO: 142391
  derived and/or modified CDS sequence (opt3) from neuraminidase__InfluenzaA__AAZ79966

SEQ ID NO: 142414 - RNA, 1410 nt, Artificial Sequence; identical to SEQ ID NO: 142375
  derived and/or modified CDS sequence (opt3) from neuraminidase__InfluenzaA__AAZ79977

SEQ ID NO: 142415 - RNA, 1410 nt, Artificial Sequence; identical to SEQ ID NO: 142375
  derived and/or modified CDS sequence (opt3) from neuraminidase__InfluenzaA__AAZ79988

SEQ ID NO: 142416 - RNA, 1410 nt, Artificial Sequence
  derived and/or modified CDS sequence (opt3) from neuraminidase__InfluenzaA__AAZ79999
augaaccccaaucagaagaucauuaccauaggcagcgugucccugacaaucucuacuauuugcuucuuuaugcaaaucgccauucucaucacgaccgucacacuucacuucaaacaguacgaguuuaacucaccuccaaauaaccagaugaugcugugugaaccgacuauaaucgagagaaauauuaccgaaaucguuuauuugacaaacaccacuauugagaaggaaaucugccccaaauuagcugaguacaggaauuggaguaagccucagugugacauaacaggguucgcaccauuuagcaaagauaacuccauucggcugucugccggaggugacaucugggugacccgcgagcccuauguaucgugcgauccugacaaguguuaccaauucgcgcuaggccaggggacgacucucaauaacgugcauucaaaugauaccguccacgaccgaacaccauaucguacucugcuuaugaacgaacugggagugcccuuucauuugggcaccaagcagguuugcauugcuuggagcaguuccucuugucacgaugguaaagccuggcuccaugugugcgucacaggggacgauaagaaugcaaccgccagcuucaucuacaacggaagacugguggacuccaucguaucauggaguaaagauauucugaggacgcaggagagcgaauguguuugcauaaauggcacuuguacaguggucaugaccgacggcucugcuuccgggaaggcagauacuaaaauccucuuuauugaggagggaaagaucgugcacacaucaaccuuaagcgguagugcccaacacguggaagagugcucuugcuauccucgguacccaggcguccgcuguguuugcagagacaacuggaagggguccaacaggccgauaguggacauuaauaucaaagauuacagcaucguaucgucuuauguguguuccggacuggucggcgacacgccccggaagaacgauucaaguagcuccucucauugccuugacccuaauaacgaagagggugggcacggagugaaaggcugggcuuucgaugacggcaaugauguuuggauggggcgcaccauuagcgaaaaguugcgacugggauacgagacauuuaaagugaucgaggguuggucaaacccaaauaguaagcuacagauuaacagacaggucauaguggaaaggggcaaucgguccggguauagcggaaucuucucuguagagggcaaaucauguauuaaccguugcuuuuacguugaacucauccgcgguagaaaggaggaaacugaggugcuguggaccaguaauagcaucgucguguucugugggacauccggcacuuauggaaccggcucuuggcccgacggggccgauauuaaccuuaugccuauauga

SEQ ID NO: 142417 - RNA, 1410 nt, Artificial Sequence; identical to SEQ ID NO: 142163
  derived and/or modified CDS sequence (opt3) from neuraminidase__InfluenzaA__AAZ80010

SEQ ID NO: 142418 - RNA, 1410 nt, Artificial Sequence
  derived and/or modified CDS sequence (opt3) from neuraminidase__InfluenzaA__AAZ80021
augaaccccaaucagaagaucauuaccauaggcagcgugucccugacaaucucuacuauuugcuucuuuaugcaaaucgccauucucaucacgaccgucacacuucacuucaaacaguacgaguuuaacucaccuccaaauaaccagguuaugcugugugaaccgacuauaaucgagagaaauauuaccgaaaucguguauuugacaaacaccacuauugagaaggaaaucugccccaaauuagcugaguacaggaauuggaguaagccucagugugacauaacaggguucgcaccauuuagcaaagauaacuccauucggcugucugccggaggugacaucuggguaacccgcgagcccuaugugucgugcgauccugacaaguguuaccaauucgcgcuaggccaggggacgacucucaauaacguccauucaaaugauaccgugcgagaccguacaccauauagaacucugcuuaugaacgaacugggaguucccuuucacuugggcaccaaacaggugugcauugcuuggagcaguuccucuugucaugaugguaaggccuggcuccacgucugcgugacaggggacgauaagaaugcaaccgccagcuucaucuacaacggaaggcugguagacuccaucguuucauggaguaaagagauucugcggacgcaggaaagcgagugugugugcauaaauggcacuugugcugucgugaugacagauggcucugcauccgggaaggccgacaccaaaauccucuuuauugaggaaggaaagaucgugcauacuucaaaguuaagcgguagugcucaacacgucgaggaaugcucuugcuauccucgcuacccaggcauaagauguguuugcagggauaacuggaaaggguccaaccggccgauuguggacaucaauaucaaggacuacagcauuguaucgucuuauguguguuccggacuggucggcgauacaccccgcaaaaacgacucaaguagcuccucucacugccuugauccuaauaacgaggaaggugggcauggagugaagggcugggccuucgacgauggcaaugacguuuggauggggcgaaccaucagcgagaaauugagaucaggauacgagacguuuaaggugauugaagguuggaguaacccaaauuccaaacugcagauaaacaggcaggucaucguggaucggggcaaucguagcggguauucuggaauuuucucaguagagggcaagaguuguaucaaccgcugcuuuuacguugaacuaaucagagguaggaaggaggaaaccgaggugcucuggacaagcaauuccauugucguguucugugggacuucuggcaccuauggaacaggcucguggcccgacggggcggauauaaaccugaugccuaucuga

SEQ ID NO: 142419 - RNA, 1410 nt, Artificial Sequence
  derived and/or modified CDS sequence (opt3) from neuraminidase__InfluenzaA__AAZ83245
augaaccccaaucagaagaucauuaccauaggcagcgugucccugacaaucucuacuauuugcuucuuuaugcaaaucgccauucucaucacgaccgucacacuucacuucaaacaguacgaguuuaacccuccaccgaauaaccagguuaugcugugugaacccacuauaaucgagagaaauauuaccgaaaucguguauuugacaaacaccacuauugagaaggaaaucugcccuaaauuagcugaguacaggaauuggucaaagccacaguguaacauaacaggguucgcacccuuuaguaaagacaauagcauucggcuguccgccggaggugauaucuggguaacccgcgagccuuaugugucuugcgacccagauaaguguuaccaauucgcgcuaggccaggggacgacucucaacaauguccauucgaacgacaccgugcacgaucgaacacccuaucguacucugcuuaugaaugaacugggaguuccuuuucauuugggcaccaaacaggugugcauugcuuggucaagcaguuccugucacgacgguaaggccuggcuccaugucugcgugacaggggaugacgagaacgcaaccgccucuuucaucuacaauggaagacugguagauagcaucguuuccuggucaaagaaaauucugaggacgcaggaaagugagugugugugcauaaacggcacuuguacagucgugaugaccgacggcagcgcuucugggaaggcagauacuaaaauccucuuuauugaggaaggaaagaucgugcacacauccaccuuaucagguagcgcccaacacgucgaggaaugcaguugcuauccacgguacccgggcguucgcugugugugcagagacaacuggaaggggucuaauaggcccauaguagauauuaacaucaaagacuacuccaucgugagcucguaugucuguucuggacuggugggcgacacgccucggaagaaugauuccucaaguagcucccauugccuugacccaaacaaugaggaaggugggcacggaguuaaaggcugggcuuucgaugacggcaacgauguguggauggggcgcaccauuucugagaaguugcgaagcggauacgagacauuuaaagucaucgaagguuggucaaaucccaacaguaagcugcagauuaauagacaggugauaguagacagggauaaccgguccggcuauagcgggaucuucucuguugagggaaaaucauguauuaaucguugcuuuuacguggaacuaauccgcggcagaaaccaggagacugaaguccucuggaccaguaauagcaucguggucuucugugguacauccgggacuuauggcaccggaucuuggccugacggcgccgauauuaaccugaugccaauauga

SEQ ID NO: 142420 - RNA, 1413 nt, Artificial Sequence
  derived and/or modified CDS sequence (opt3) from neuraminidase__InfluenzaA__AAZ83256
augaaccccaaucagaagaucauuaccauaggcagcaucuccauugccaucgggauuaucucucugaugcuccaaauaggaaacaucauuucaaucugggcuagucacagcauucagacagguucccagaaucauacuggcaucugcaaccagagaauaauuacguacgaaaauucuaccugggugaaccacacauaugucaauaucaacaauacuaacguuguggcagggaaagacaagaccucgguaacacuugccggaaauucaagccuguguaguauuuccggcugggcgaucuacaccaaagauaacucuaucaggauugguagcaagggggacguguucgucauacgggagccuuuuaucuccugcucacauuuggagugucgcacuuucuuuuuaacacaaggagcucugcuaaaugauaaacacaguaacggcaccgugaaggaccgaagcccauaucgugcccucaugucuugcccgcugggcgaagcacccuccccuuacaauucaaaguucgagagcguugccuggagugcuucugcaugucaugaugggaugggauggcuuacgauugguaucuccggcccagacaacggggccguggcuguccugaaauauaacggaauaauuacugaaaccaucaagagcuggaaaaagagaaucuugaggacacaggagucggagugcguguguguaaauggcucuugcuuuacuauuaugaccgauggucccuccaacggggccgcgucauacaaaaucuucaagauugaaaagggaaaaguuacaaagaguauagagcucaaugcaccuaacuuucacuaugaagaguguagcugcuacccagacaccggcacggugaugugugucugccgggauaauuggcacggcuccaaccgccccugggugucuuucaaucagaaccuggacuaccagaucggguauauuugcagcggaguguuuggugauaauccuagaccaaaagacggcaaggggucauguaacccggucacuguugauggagccgacggcgugaaagguuucaguuacaaguaugggaauggcguauggaucggaaggacaaaauccaaccggcugcgcaagggcuuugagaugaucugggaccccaauggguggaccgauacugacagcgauuucucugugaagcaagacgucguggcuauuacagauuggucaggauacagugguagcuuuguucagcauccugaacucaccggcuuagacugcauacgaccauguuucuggguggagcuggucagagggcuucccagggaaaacacgaccaucuggacauccggaucuucgauuagcuucugcggcaucgauuccgacacugccaauuggucauggccugauggugcagaguugccauuuaccauugacaaauga

SEQ ID NO: 142421 - RNA, 1410 nt, Artificial Sequence; identical to SEQ ID NO: 142327
  derived and/or modified CDS sequence (opt3) from neuraminidase__InfluenzaA__AAZ83269

SEQ ID NO: 142422 - RNA, 1410 nt, Artificial Sequence; identical to SEQ ID NO: 142327
  derived and/or modified CDS sequence (opt3) from neuraminidase__InfluenzaA__AAZ83280

SEQ ID NO: 142423 - RNA, 1410 nt, Artificial Sequence; identical to SEQ ID NO: 142301
  derived and/or modified CDS sequence (opt3) from neuraminidase__InfluenzaA__AAZ83291

SEQ ID NO: 142424 - RNA, 1413 nt, Artificial Sequence
  derived and/or modified CDS sequence (opt3) from neuraminidase__InfluenzaA__AAZ83302
augaaccccaaucagaagaucauuaccauaggcagcaucuccauugccaucgggauuaucucucugaugcuccaaauaggaaacaucauuucaaucugggcuagucacagcauucagacagguucccagaaucauacuggcgugugcaaccagagaaucauaacguacgaaaauucuaccugggucaaccacacauauguuaauauuaacaauacuaacgugaucgcagggaaagacaaggccucgguaacccuugcgggaaauucaagccuguguaguauuuccggcugggcuaucuacacaaaagauaacucuaucaggauugguagcaagggggacguguucgucauacgggagccuuuuaucuccugcucacauagugagugucgcaccuucuuuuugacucaaggagccuuacugaaugauaaacacagcaacggcacagugaaggaccgaucuccauaucgugcacuaauguccugcccgcucggcgaagcccccucaccuuacaauagcaaguucgagaguguugcuuggucugcauccgccugucaugaugggaugggauggcugaccauugguaucagcggcccagacaacggggcuguggccguccuuaaauauaacggaauaauuacggaaacuaucaagucguggaaaaagcagauccugagaacccaggagucugagugcguguguguaaauggcuccugcuuuacaauuaugacugauggucccucaaacggggcggcaaguuacaaaaucuucaagauugaaaagggaaaaguuaccaagagcauagaguugaaugccccuaacuuucacuaugaagaguguuccugcuacccagacacaggcaccgugaugugugucugcagggauaauuggcacggcucuaaccggcccugggugagcuucaaucagaaccucgacuaccaaaucggguauauuugcucaggaguguuuggugauaauccucgcccaaaagacggcgaggggaguuguaacccggucacgguugauggagcuaauggcgugaaggguuucuccuacaaauaugggaacggcguauggaucggaagaacuaagagcaauaggcugcggaaaggcuuugaaaugaucugggaccccaacggguggacagacaccgauucugacuucucagugaagcaggaugucguggccauuacugacuggaguggauacagcgguuccuuuguucagcauccugagcugacaggccucgauugcauacgcccauguuucuggguggaauuaguccgagggcugcccaaggagaauaccacgaucuggaccucuggaucgagcauuuccuucugcggcgugaacucagacacagcaaacuggaguuggccugauggugcugaacuuccauuuacuaucgacaaauga

SEQ ID NO: 142425 - RNA, 1410 nt, Artificial Sequence
  derived and/or modified CDS sequence (opt3) from neuraminidase__InfluenzaA__AAZ83315
augaaccccaaucagaagaucauuaccauaggcagcgugucccugacaaucgccacuauuugcuuccucaugcaaaucgcuauucuugucacgaccguuacacugcacuuuaaacaguacgaguguaacucuuugccuaauaaccaggugauguuaugcgaaccaacuaucauagagagaaauaucaccgaaauuguauaucugacaaacaccacuaucgagaaggaaauuuguccgaaacuagcagaguacaggaauuggucaaagccccagugcaaaaucacaggguucgccccuuuuaguaaggacaacagcauacggcucuccgcgggaggugauauuugggugacccgcgagccauaugucucuugugaccccgauaagugcuaccaauucgcucugggccaggggacgacucuuaauaaccgacauucgaaugacaccgugcacgaucguacaccuuauagaacucuguugaugaacgaacucggaguuccauuucaucugggcaccaaacagguguguaucgccuggucaagcaguuccugccacgacgguaaggcauggcugcaugucugugugacagggcacgaugagaaugccaccgcuucuuucauuuacgacggaaggcucguagauagcaucggcuccuggaguaaaaagaucuuacggacgcaggaaucagagugcguuuguauuaacggcacuugcacaguggucaugaccgacgggagcgcaucuggacgcgccaauacuaaaauacuguuuaucgaggaagguaagauuauccacauaucccaacuuucaggcagcgcucagcauguggaggaaugcaguuguuaucccagauacccuggggugaggugcgucugucgggauaacuggaagggaucuaaccgcccaauuguugacaucaaugugaaagauuacuccaucgccagcucguauguaugcucuggcuuggugggugacacaccgcgaaagaacgacuccucaaguagcucccacugucugaaucccaacaaugaggaagggggacauggcgucaaaggcugggcguucgaugacgggaacgauguguggaugggaagaaccauuucugagaaguuuaggagcgguuacgagacguucaaaguuaucgaaggcuggucaaagccuaauaguaaacuacagauuaaccgucaggugauagucgaccgggauaaucgcuccggguauagcggaaucuuuucuguggagggcaagucaugcauuaacagauguuucuacguagaacucaucaggggucggaagcaagagaccgaaguuugguggacaaguaauagcaucguggucuuuugcgggacuuccggcaccuauggaacaggcucuuggccagacggggcagauauuaaccugaugcccauauga

SEQ ID NO: 142426 - RNA, 1410 nt, Artificial Sequence
  derived and/or modified CDS sequence (opt3) from neuraminidase__InfluenzaA__AAZ83326
augaaccccaaucagaagaucauuaccauaggcagcgugucccugacaaucgccacuauuugcuuccucaugcaaaucgcuauucuugucacgaccguuacacugcacuuuaaacaguacgagugugacucuuugccuaacaaucaggugauguuaugcgaaccaacuaucauagagagaaacaucaccgaaauuguauaucugacaaauaccacuaucgagaaggaaauuuguccgaaacuagcagaguacaggaacuggucaaagccccagugcaaaaucacaggguucgccccuuuuaguaaggauaauagcauacggcucuccgcgggaggugacauuugggugacccgcgagccauaugucucuugugaucccgacaagugcuaccaauucgcucugggccaggggacgacucuuaacaaucgacauucgaacgauaccgugcacgaccguacaccuuauagaacucuguugaugaaugaacucggaguuccauuucaucugggcaccaaacagguguguaucgccuggucaagcaguuccugccacgaugguaaggcauggcugcaugucugugugacagggcacgacgagaacgccaccgcuucuuucauuuacgauggaaggcucguagacagcaucggcuccuggaguaaaaagaucuuacggacgcaggaaucagagugcguuuguauuaauggcacuugcacaguggucaugaccgaugggagcgcaucuggacgcgccgacacuaaaauacuguuuaucgaggaagguaagauuauccacauaucccaacuuucaggcagcgcucagcauguggaggaaugcaguuguuaucccagauacccuggggugaggugcgucugucgggauaacuggaagggaucuaaucgcccaauuguugacaucaacgugaaagacuacuccaucguaagcucguaugugugcucuggcuuggucggugauacaccgcgaaagaacgacuccucaaguagcucccacugucugaaucccaacaaugaggaagggggacauggcgugaaaggcugggccuucgaugacgggaacgauguuuggaugggaagaaccauuucugagaaguuuaggagcgguuacgagacguucaaagugaucgaaggcuggucaaagccuaauaguaaacuacagauuaaccggcaggucauaguggaccgugauaaucgcuccggguauagcggaaucuuuucuguagagggcaagucaugcauuaacagauguuucuacguugaacucaucaggggucggaagcaagagaccgaagugugguggacaaguaauagcaucgucguguuuugcgggacuuccggcaccuauggaacaggcucuuggccagacggggcggauauuaaccugaugcccauauga

SEQ ID NO: 142427 - RNA, 1410 nt, Artificial Sequence
  derived and/or modified CDS sequence (opt3) from neuraminidase__InfluenzaA__AAZ83374
augaaccccaaucagaagaucauuaccauaggcagcgugucccugacaaucucuacuauuugcuucuuuaugcaaaucgccauucucaucacgaccgucacacuucacuucaaacaguacgaguuuaacucaccuccaaauaaccagguuaugcugugugaaccgacuauaaucgagagaaauauuaccgaaaucguguauuugacaaacaccacuauugagaaggaaaucugccccaaauuagcugaguacaggaauuggaguaagccucagugugacauaacaggguucgcaccauuuagcaaagauaacuccauucggcugucugccggaggugacaucuggguaacccgcgagcccuaugugucgugcgauccugacaaguguuaccaauucgcgcuaggccaggggacgacucucaauaacguccauucaaaugauaccgugcacgaccgaacaccauaucguacucugcuuaugaacgaacugggaguucccuuucauuugggcaccaaacaggugugcauugcuuggagcaguuccucuugucacgaugguaaggccuggcuccaugucugcgugacaggggacgauaagaaugcaaccgccagcuucaucuacaacggaagacugguagacuccaucguuucauggaguaaagagauucugaggacgcaggaaagcgagugugugugcauaaauggcacuuguacagucgugaugaccgauggcucugcuuccgggaaggcagacacuaaaauccucuuuauugaggaaggaaagaucgugcacacaucaaccuuaagcgguagugcccaacacgucgaggaaugcucuugcuauccucgguacccaggcguucgcugugugugcagagauaacuggaagggguccaacaggccgauaguagacauuaauaucaaagacuacagcaucgugucgucuuaugucuguuccggacuggugggcgauacgccccggaagaacgacucaaguagcuccucucauugccuugauccuaauaacgaggaaggugggcacggaguuaaaggcugggcuuucgacgauggcaaugacguguggauggggcgcaccauuagcgagaaguugcgaacaggauacgagacuuuuaaagucaucgaagguuggucaaacccaaauaguaagcugcagauuaacagacaggugauaguagauaggggcaaucgguccggguauagcggaaucuucucuguugagggcaaaucauguauuaaccguugcuuuuacguggaacuaauccgcgguagaaaggaggaaaccgagguccucuggacaaguaauagcaucguggucuucugugggacuuccggcaccuauggaacaggcucuuggcccgacggggccgauauuaaccugaugccuauauga

SEQ ID NO: 142428 - RNA, 1410 nt, Artificial Sequence; identical to SEQ ID NO: 142394
  derived and/or modified CDS sequence (opt3) from neuraminidase__InfluenzaA__AAZ83385

SEQ ID NO: 142429 - RNA, 1413 nt, Artificial Sequence
  derived and/or modified CDS sequence (opt3) from neuraminidase__InfluenzaA__AAZ85129
augaacaccaaucagaagaucauuacaauaggcagcaucuccauugccaucgggauuaucucucugaugcuccaaauaggaaacaucauuucaaucugggcuagucacagcauucagacugguucccagaaucauacgggcgugugcaaccagagaaucauaaccuacgaaaauucuacaugggucaaccacacuuauguuaauauuaacaauaccaacgugaucgcagggaaagacaagacaucgguaacccuugccggaaauucaagccuguguaguauuuccggcugggcgaucuacacuaaagauaacucuaucaggauugguagcaagggggacguguucgucauacgggagcccuuuaucuccugcucacauuuggagugucgcacauucuuuuuaacccaaggagcucugcuaaaugauaaacacaguaacggcacggugaaggaccgaagcccuuaucgugcccucaugucuugcccacugggcgaagcaccgucccccuacaauucaaaguucgagagcguugccuggagugcuucugcaugucaugaugggaugggauggcuuacuauugguaucuccggcccugacaacggggccguggcuguccugaaauauaacggaauaauuaccgaaacaaucaagagcuggaaaaagcagaucuugagaacucaggagucggagugcguguguguaaauggcucuugcuuuaccauuaugacagaugguccauccaacggggccgcgucauacaaaaucuucaagauugaaaagggaaaaguuaccaagaguauagagcucaaugcacccaacuuucacuaugaagaguguagcugcuacccugacacgggcacugugaugugugucugcagggauaauuggcacggcuccaaccggccaugggugucuuucaaucagaaccuggacuaccaaaucggguauauuugcagcggaguguuuggugauaauccccgcccuaaagacggcgaggggucauguaacccagucacaguugauggagccaauggcgugaaggguuucaguuacaaauaugggaacggcguauggaucggaagaaccaaguccaauaggcugcggaaaggcuuugaaaugaucugggacccgaacggguggacugacacagauagcgacuucucugugaagcaggaugucguggcuauuaccgacuggucaggauacagugguagcuuuguucagcaucccgagcucacgggcuuagauugcauacgcccuuguuucuggguggaacugguccgagggcuuccaaaggagaauaccacaaucuggacuuccggaucuucgauuagcuucugcggcgugaacuccgacaccgccaacuggucauggcccgauggugcagaauugccuuuuacaaucgacaaauga

SEQ ID NO: 142430 - RNA, 1410 nt, Artificial Sequence
  derived and/or modified CDS sequence (opt3) from neuraminidase__InfluenzaA__ABA06513
augaaccccaaucagaagaucauuaccauaggcagcgugucccugacaaucgccacuauuugcuuccucacgcaaaucgcuauucuugucaccacaguuacucugcacuuuaaacaguacgaguguaacucuccuccaaauaaccaggugauguugugcgaaccgaccaucauagagagaaauaucacagaaauuguauauuuaaccaacacuacaaucgagaaggaaauuugucccaaacuggcagaguacaggaauuggucaaagccucagugcaacaucaccggguucgccccauuuaguaaagacaauagcauacggcuauccgcgggaggugauauuugggugacgcgcgagcccuaugucucuugugacccugauaagugcuaccaauucgcucucggccaggggacuacccugaacaauggacauucgaacgacacagugcacgaucgaacuccauaucguacccuucugaugaaugaauugggcguucccuuucaucucgguacaaaacagguguguaucgccuggucaagcaguuccugccacgacgggaaagcauggcugcaugucugugugaccggagaugacaagaacgccacggcuucuuucauuuacaauggcagacugguagauagcaucggcuccuggucaaagaagauccucaggacucaggagagugaaugcguuuguauuaacgggacaugcaccguggucaugacugacggaagcgcaucugguaaagccgauacaaagauauuauuuaucgaggagggcaagauugugcacaccucccugcuuucagggagcgcucaacacguggaagagugcaguuguuauccucgguacccaggaguccgcugcguuuguagagacaacuggaaaggcucuaauaggccgaucguggauauaaacguaaaggacuacuccauugugagcucguaugucugcucugguuuggugggggacacgccccggaaaaaugauuccucaaguagcucccauugucuggacccuaacaaugaagagggaggccacggcguuaaggggugggccuucgaugacggaaacgauguguggaugggucgcaccaucucugaaaaacuacgaagcggcuacgagacauuuaaggucaucgagggguggucaaaaccaaauaguaagcuccagauuaacagacaggugaucguagacagggauaaucgguccggauauagcggcauuuucucuguugaagguaagucaugcauaaaccguuguuuuuacguggagcugauccgcgggagaaaucaggaaacugagguccuuuggaccaguaacagcauuguggucuucugcggcacauccggaacuuauggcaccgggucuuggcccgacggagcggauaucaaucugaugccuaucuga

SEQ ID NO: 142431 - RNA, 1410 nt, Artificial Sequence; identical to SEQ ID NO: 142430
  derived and/or modified CDS sequence (opt3) from neuraminidase__InfluenzaA__ABA06545

SEQ ID NO: 142432 - RNA, 1413 nt, Artificial Sequence
  derived and/or modified CDS sequence (opt3) from neuraminidase__InfluenzaA__ABA08478
augaacaccaaucagaagaucauuacaauaggcagcaucuccauugccaucgggauuaucucucugaugcuccaaauaggaaacaucauuucaaucugggcuagucacagcauucagacugguucccagaaucauacgggcaucugcaaccagagaauaauuaccuacgaaaauucuacaugggugaaccacacuuaugucaauaucaacaauaccaacguuguggcagggaaagacaagacaucgguaacccuugccggaaauucaagccuguguaguauuuccggcugggcgaucuacacuaaagauaacucuaucaggauugguagcaagggggacguguucgucauacgggagcccuuuaucuccugcucacauuuggagugucgcacauucuuuuuaacccaaggagcucugcuaaaugauaaacacaguaacggcacggugaaggaccgaagcccuuaucgugcccucaugucuugcccacugggcgaagcaccgucccccuacaauucaaaguucgagagcguugccuggagugcuucugcaugucaugaugggaugggauggcuuacuauugguaucuccggcccugacaacggggccguggcuguccugaaauauaacggaauaauuaccgaaacaaucaagagcuggaaaaagagaaucuugaggacucaggagucggagugcguguguguaaauggcucuugcuuuaccauuaugacagaugguccauccaacggggccgcgucauacaaaaucuucaagauugaaaagggaaaaguuaccaagaguauagagcucaaugcacccaacuuucacuaugaagaguguagcugcuacccugacacgggcacugugaugugugucugccgggauaauuggcacggcuccaaccgcccaugggugucuuucaaucagaaccuggacuaccagaucggguauauuugcagcggaguguuuggugauaaucccagaccuaaagacggcaaggggucauguaacccagucacaguugauggagccgacggcgugaaagguuucaguuacaaguaugggaauggcguauggaucggaaggaccaaauccaaccggcugcgcaagggcuuugagaugaucugggacccgaauggguggacugauacagacagcgauuucucugugaagcaagacgucguggcuauuaccgauuggucaggauacagugguagcuuuguucagcaucccgaacucacgggcuuagacugcauacgaccuuguuucuggguggagcuggucagagggcuuccaagggaaaacaccacaaucuggacuuccggaucuucgauuagcuucugcggcguggauuccgacaccgccaauuggucauggcccgauggugcagaguugccuuuuacaaucgacaaauga

SEQ ID NO: 142433 - RNA, 1410 nt, Artificial Sequence; identical to SEQ ID NO: 142430
  derived and/or modified CDS sequence (opt3) from neuraminidase__InfluenzaA__ABA08511

SEQ ID NO: 142434 - RNA, 1413 nt, Artificial Sequence
  derived and/or modified CDS sequence (opt3) from neuraminidase__InfluenzaA__ABA12699
augaaccccaaucagaagaucauuaccauaggcagcaucuccauugccaucgggauuaucucucugaugcuccaaauaggaaacaucauuucaaucugggcuagucacagcauucagacagguucccagaaucauacuggcaucugcaaccagagaauaauuacguacgaaaauucuaccugggugaaccacacauaugucaauaucaacaauacuaacguuguggcagggaaagacaagaccucgguaacacuugccggaaauucaagccuguguaguauuuccggcugggcgaucuacaccaaagauaacucuaucaggauugguagcaagggggacguguucgucauacgggagccuuuuaucuccugcucacauuuggagugucgcacuuucuuuuuaacacaaggagcucugcuaaaugauaaacacaguaacggcaccgugaaggaccgaagcccauaucgugcccucaugucuugcccgcugggcgaagcacccuccccuuacaauucaaaguucgagagcguugccuggagugcuucugcaugucaugaugggaugggauggcuuacgauugguaucuccggcccagacaacggggccguggcuguccugaaauauaacggaauaauuacugaaaccaucaagagcuggaaaaagagaaucuugaggacacaggagucggagugcguguguguaaauggcucuugcuuuacuauuaugaccgauggucccuccaacggggccgcgucauacaaaaucuucaagauugaaaagggaaaaguuacaaagaguauagagcucaaugcaccuaacuuucacuaugaagaguguagcugcuacccagacaccggcacggugaugugugucugccgggauaauuggcacggcuccaaccgccccugggugucuuucaaucagaaccuggacuaccagaucggguauauuugcagcggaguguuuggugauaauccuagaccaaaagacggcaaggggucauguaacccggucacuguugauggagccgacggcgugaaagguuucaguuacaaguaugggaauggcguauggaucggaaggacaaaauccaaccggcugcgcaagggcuuugagaugaucugggaccccaauggguggaccgauacugacagcgauuucucugugaagcaagacgucguggcuauuacagauuggucaggauacagugguagcuuuguucagcauccugaacucaccggcuuagacugcauacgaccauguuucuggguggagcuggucagagggcuucccagggaaaacacgaccaucuggacauccggaucuucgauuagcuucugcggcguggauuccgacacugccaauuggucauggccugauggugcagaguugccauuuaccaucgacaaauga

SEQ ID NO: 142435 - RNA, 1413 nt, Artificial Sequence; identical to SEQ ID NO: 142434
  derived and/or modified CDS sequence (opt3) from neuraminidase__InfluenzaA__ABA12710

SEQ ID NO: 142436 - RNA, 1413 nt, Artificial Sequence
  derived and/or modified CDS sequence (opt3) from neuraminidase__InfluenzaA__ABA12721
augaaccccaaucagaagaucauuaccauaggcagcaucuccauugccaucgggauuaucucucugaugcuccaaauaggaaacaucauuucaaucugggcuagucacagcauucagacagguucccagaaucauacuggcgugugcaaccagagaaucauaacguacgaaaauucuaccugggucaaccacacauauguuaauauuaacaauacuaacgugaucgcagggaaagacaagaccucgguaacacuugccggaaauucaagccuguguaguauuuccggcugggcgaucuacaccaaagauaacucuaucaggauugguagcaagggggacguguucgucauacgggagccuuuuaucuccugcucacauuuggagugucgcacuuucuuuuuaacacaaggagcucugcuaaaugauaaacacaguaacggcaccgugaaggaccgaagcccauaucgugcccucaugucuugcccgcugggcgaagcacccuccccuuacaauucaaaguucgagagcguugccuggagugcuucugcaugucaugaugggaugggauggcuuacgauugguaucuccggcccagacaacggggccguggcuguccugaaauauaacggaauaauuacugaaaccaucaagagcuggaaaaagcagaucuugagaacacaggagucggagugcguguguguaaauggcucuugcuuuacuauuaugaccgauggucccuccaacggggccgcgucauacaaaaucuucaagauuggaaagggcaaaguuacaaagaguauagaacucaaugcaccuaacuuucacuaugaggaauguagcugcuacccagacaccggcacggugaugugugucugcagggauaauuggcacggguccaaccggcccugggugucuuucaaucagaaccuggacuaccaaaucggauauauuugcagcgguguguuuggcgauaauccucgcccaagagacggggagggaucauguaacccggucacuguugauggcgccaauggugugaaaggguucaguuacaaguauggcaacggaguauggaucggcaggacaaaauccaaucggcugcgcaagggguuugagaugaucugggaccccaacggauggaccgacacugauagcgacuucucugugaaacaggaugucguggcuauuacagacuggucagguuacaguggcagcuuuguucagcauccugaacucaccggguuagauugcauacgaccauguuucuggguggagcuggucagaggacuucccagggaaaauacgaccaucuggacauccgguucuucgauuagcuucugcggcgugaacuccgacacugccaacuggucauggccugauggggcagaguugccauuuaccaucgacaaguga

SEQ ID NO: 142437 - RNA, 1413 nt, Artificial Sequence; identical to SEQ ID NO: 142434
  derived and/or modified CDS sequence (opt3) from neuraminidase__InfluenzaA__ABA12732

SEQ ID NO: 142438 - RNA, 1410 nt, Artificial Sequence; identical to SEQ ID NO: 142375
  derived and/or modified CDS sequence (opt3) from neuraminidase__InfluenzaA__ABA12743

SEQ ID NO: 142439 - RNA, 1410 nt, Artificial Sequence; identical to SEQ ID NO: 142391
  derived and/or modified CDS sequence (opt3) from neuraminidase__InfluenzaA__ABA12754

SEQ ID NO: 142440 - RNA, 1410 nt, Artificial Sequence; identical to SEQ ID NO: 142394
  derived and/or modified CDS sequence (opt3) from neuraminidase__InfluenzaA__ABA12765

SEQ ID NO: 142441 - RNA, 1410 nt, Artificial Sequence; identical to SEQ ID NO: 142166
  derived and/or modified CDS sequence (opt3) from neuraminidase__InfluenzaA__ABA12776

SEQ ID NO: 142442 - RNA, 1410 nt, Artificial Sequence; identical to SEQ ID NO: 142375
  derived and/or modified CDS sequence (opt3) from neuraminidase__InfluenzaA__ABA12786

SEQ ID NO: 142443 - RNA, 1410 nt, Artificial Sequence; identical to SEQ ID NO: 142394
  derived and/or modified CDS sequence (opt3) from neuraminidase__InfluenzaA__ABA18029

SEQ ID NO: 142444 - RNA, 1413 nt, Artificial Sequence
  derived and/or modified CDS sequence (opt3) from neuraminidase__InfluenzaA__ABA18040
augaaccccaaucagaagaucauuaccauaggcagcaucuccauugccaucgggauuaucucucugaugcuccaaauaggaaacaucauuucaaucugggcuagucacagcauucagacagguucccagaaucauacuggcgugugcaaccagagaaucauaacguacgaaaauucuaccugggucaaccacacauauguuaauauuaacaauacuaacgugaucgcagggaaagacaagaccucgguaacacuugccggaaauucaagccuguguaguauuuccggcugggcgaucuacaccaaagauaacucuaucaggauugguagcaagggggacguguucgucauacgggagccuuuuaucuccugcucacauuuggagugucgcacuuucuuuuuaacacaaggagcucugcuaaaugauaaacacaguaacggcaccgugaaggaccgaagcccauaucgugcccucaugucuugcccgcugggcgaagcacccuccccuuacaauucaaaguucgagagcguugccuggagugcuucugcaugucaugaugggaugggauggcuuacgauugguaucuccggcccagacaacggggccguggcuguccugaaauauaacggaauaauuacugaaaccaucaagagcuggaaaaagcagaucuugagaacacaggagucggagugcguguguguaaauggcucuugcuuuacuauuaugaccgauggucccuccaacggggccgcgucauacaaaaucuucaagauugaaaagggaaaaguuacaaagaguauagagcucaaugcaccuaacuuucacuaugaagaguguagcugcuacccagacaccggcacggugaugugugucugcagggauaauuggcacggcuccaaccggcccugggugucuuucaaucagaaccuggacuaccaaaucggguauauuugcagcggaguguuuggugauaauccucgcccaaaagacggcgaggggucauguaacccggucacuguugauggagccaauggcgugaaggguuucaguuacaaauaugggaacggcguauggaucggaagaacaaaguccaauaggcugcggaaaggcuuugaaaugaucugggaccccaacggguggaccgacacugauagcgacuucucugugaagcaggaugucguggcuauuacagacuggucaggauacagugguagcuuuguucagcauccugagcucaccggcuuagauugcauacgcccauguuucuggguggaacugguccgagggcuucccaaggagaauacgaccaucuggacauccggaucuucgauuagcuucugcggcgugaacuccgacacugccaacuggucauggccugauggugcagaauugccauuuaccaucgacaaauga

SEQ ID NO: 142445 - RNA, 1410 nt, Artificial Sequence
  derived and/or modified CDS sequence (opt3) from neuraminidase__InfluenzaA__ABA18126
augaaccccaaucagaagaucauuaccauaggcagcgugucccugacaaucgccacuauuugcuuccucaugcaaaucgcuauucuugucacgaccguuacacugcacuuuaaacaguacgaguguaacucuccuccaaauaaccaggugauguugugcgaaccgacuaucauagagagaaauaucaccgaaauuguauauuuaacaaacaccacuaucgagaaggaaauuugucccaaacuggcagaguacaggaauuggucaaagccucagugcaacaucacaggguucgccccauuuaguaaagacaauagcauacggcuauccgcgggaggugauauuugggugacccgcgagcccuaugucucuugugacccugauaagugcuaccaauucgcucucggccaggggacgacucugaacaauggacauucgaacgacaccgugcacgaucgaacaccauaucguacucuucugaugaaugaauugggcguucccuuucaucucgguaccaaacagguguguaucgccuggucaagcaguuccugccacgacgggaaggcauggcugcaugucugugugacaggagaugacgagaacgccaccgcuucuuucauuuacaauggcagacugguagauagcaucggcuccuggucaaagaaaauccucaggacgcaggaaagugagugcguuuguauuaacgggacuugcacaguggucaugaccgacggaagcgcaucugguaaggccgauacuaaaauauuauuuaucgaggaaggcaagauugugcacaucuccacacugucagggagcgcucaacacguggaggaaugcaguuguuauccucgguacccaggaguccgcugcguuuguagagacaacuggaagggcucuaauaggccgauaguggauauuaacguaaaagacuacuccaucgugagcucguaugucugcucuggucuugugggggacacgccccggaagaaugauuccuucucaaguagccauuguuuggacccuaacaaugaggaaggaggccacggcguuaaagggugggccuuugaugacggaaacgauauguggaugggucgcaccaucuccgagaagcugcgaucuggcuacgagaccuucaaagugauugaaggguggagcaagccaaauucaaaacuacagaucaacagacaggucauuguggagaggggaaaucggaguggcuauuccgguauauuuagcguagaagggaagucuugcaucaaccguuguuucuacguugagcucauucgcggcagaaaggaagagacagaggugugguggacuucaaauaguaucgucguguuuugcggaaccagcggcacauaugggacuggauccuggcccgacggugcggauaucaaccugaugccuauuuga

SEQ ID NO: 142446 - RNA, 1413 nt, Artificial Sequence; identical to SEQ ID NO: 142434
  derived and/or modified CDS sequence (opt3) from neuraminidase__InfluenzaA__ABA18148

SEQ ID NO: 142447 - RNA, 1410 nt, Artificial Sequence
  derived and/or modified CDS sequence (opt3) from neuraminidase__InfluenzaA__ABA18159
augaaccccaaucagaagaucauuaccauaggcagcgugucccugacaaucucuacuauuugcuucuuuaugcaaaucgccauucucaucacgaccgucacacuucacuucaaacaguacgaguuuaacucaccuccaaauaaccagguuaugcugugugaaccgacuauaaucgagagaaauauuaccgaaaucguguauuugacaaacaccacuauugagaaggaaaucugccccaaauuagcugaguacaggaauuggaguaagccucagugugacauaacaggguucgcaccauuuagcaaagauaacuccauucggcugucugccggaggugacaucuggguaacccgcgagcccuaugugucgugcgauccugacaaguguuaccaauucgcgcuaggccaggggacgacucucaauaacguccauucaaaugauaccgugcacgaccgaacaccauaucguacucugcuuaugaacgaacugggaguucccuuucauuugggcaccaaacaggugugcauugcuuggagcaguuccucuugucacgaugguaaggccuggcuccaugucugcgugacaggggacgauaagaaugcaaccgccagcuucaucuacaacggaagacugguagacuccaucguuucauggaguaaagagauucugaggacgcaggaaagcgagugugugugcauaaauggcacuugugcugucgugaugacagauggcucugcauccgggaaggccgacaccaaaauccucuuuauugaggaaggaaagaucgugcacacuucaaaguuaagcgguagugcucaacacgucgaggaaugcucuugcuauccucgguacccaggcauacgcuguguuugcagagauaacuggaaaggguccaacaggccgauuguggacguaaauaucaaggacuacagcaucgugucgucuuaugucuguuccggacuggugggcgauacaccccggaaaaacgacucaaguagcuccucucauugccuugauccuaauaacgaggaaggugggcacggaguuaagggcugggccuucgacgauggcaaugacguguggauggggcgcaccauuagcgagaaauugcgaucaggauacgagacguuuaaggucaucgaagguuggaguaacccaaauuccaaacugcagauuaacagacaggugauaguagauaggggcaaucggagcggguauucuggaaucuucucaguugagggcaagaguuguauuaaccguugcuuuuacguggaacuaauccgcgguagaaaggaggaaaccgagguccucuggacaagcaauuccaucguggucuucugugggacuucuggcaccuauggaacaggcucguggcccgacggggcggauauuaaccugaugccuauauga

SEQ ID NO: 142448 - RNA, 1410 nt, Artificial Sequence; identical to SEQ ID NO: 142375
  derived and/or modified CDS sequence (opt3) from neuraminidase__InfluenzaA__ABA26703

SEQ ID NO: 142449 - RNA, 1410 nt, Artificial Sequence; identical to SEQ ID NO: 142375
  derived and/or modified CDS sequence (opt3) from neuraminidase__InfluenzaA__ABA26714

SEQ ID NO: 142450 - RNA, 1410 nt, Artificial Sequence; identical to SEQ ID NO: 142375
  derived and/or modified CDS sequence (opt3) from neuraminidase__InfluenzaA__ABA26736

SEQ ID NO: 142451 - RNA, 1410 nt, Artificial Sequence; identical to SEQ ID NO: 142375
  derived and/or modified CDS sequence (opt3) from neuraminidase__InfluenzaA__ABA26747

SEQ ID NO: 142452 - RNA, 1410 nt, Artificial Sequence; identical to SEQ ID NO: 142375
  derived and/or modified CDS sequence (opt3) from neuraminidase__InfluenzaA__ABA26758

SEQ ID NO: 142453 - RNA, 1410 nt, Artificial Sequence; identical to SEQ ID NO: 142375
  derived and/or modified CDS sequence (opt3) from neuraminidase__InfluenzaA__ABA26769

SEQ ID NO: 142454 - RNA, 1410 nt, Artificial Sequence; identical to SEQ ID NO: 142375
  derived and/or modified CDS sequence (opt3) from neuraminidase__InfluenzaA__ABA26780

SEQ ID NO: 142455 - RNA, 1410 nt, Artificial Sequence; identical to SEQ ID NO: 142375
  derived and/or modified CDS sequence (opt3) from neuraminidase__InfluenzaA__ABA26791

SEQ ID NO: 142456 - RNA, 1410 nt, Artificial Sequence; identical to SEQ ID NO: 142375
  derived and/or modified CDS sequence (opt3) from neuraminidase__InfluenzaA__ABA26802

SEQ ID NO: 142457 - RNA, 1413 nt, Artificial Sequence
  derived and/or modified CDS sequence (opt3) from neuraminidase__InfluenzaA__ABA42250
augaaccccaaucagaagaucauuaccauaggcagcaucuccauugccaucgggauuaucucucugaugcuccaaauaggaaacaucauuucaaucugggcuagucacagcauucagacagguucccagaaucauacuggcaucugcaaccagagaauaauuacguacgaaaauucuaccugggugaaccacacauaugucaauaucaacaauacuaacguuguggcagggaaagacaagaccucgguaacacuugccggaaauucaagccuguguaguauuuccggcugggcgaucuacaccaaagauaacucuaucaggauugguagcaagggggacguguucgucauacgggagccuuuuaucuccugcucacauuuggagugucgcacuuucuuuuuaacacaaggagcucugcuaaaugauaaacacaguaacggcaccgugaaggaccgaagcccauaucgugcccucaugucuugcccgcugggcgaagcacccuccccuuacaauucaaaguucgagagcguugccuggagugcuucugcaugucaugaugggaugggauggcuuacgauugguaucuccggcccagacaacggggccguggcuguccugaaauauaacggaauaauuacugaaaccaucaagagcuggaaaaagagaaucuugaggacacaggagucggagugcguguguguaaauggcucuugcuuuacuauuaugaccgauggucccuccaacggggccgcgucauacaaaaucuucaagauugaaaagggaaaaguuacaaagaguauagagcucaaugcaccuaacuuucacuaugaagaguguagcugcuacccagacaccggcacggugaugugugucugccgggauaauuggcacggcuccaaccgccccugggugucuuucaaucagaaccuggacuaccagaucggguauauuugcagcggaguguuuggugauaauccuagaccaaaagacggcaaggggucauguaacccggucacuguugauggagccgacggcgugaaagguuucaguuacaaguauggggacggcguauggaucggaaggacaaaauccaaucggcugcgcaagggcuuugagaugaucugggaucccaacggguggaccgacacugauagcgacuucucugugaagcaagaugucguggcuauuacagacuggucaggauacagugguagcuuuguucagcauccugaacucaccggcuuagauugcauacgaccauguuucuggguggagcuggucagagggcuucccagggaaaauacgaccaucuggacauccggaucuucgauuagcuucugcggcguggacuccgauacugccaacuggucauggccugacggugcagaguugccauuuaccaucgauaaauga

SEQ ID NO: 142458 - RNA, 1413 nt, Artificial Sequence; identical to SEQ ID NO: 142444
  derived and/or modified CDS sequence (opt3) from neuraminidase__InfluenzaA__ABA42261

SEQ ID NO: 142459 - RNA, 1410 nt, Artificial Sequence
  derived and/or modified CDS sequence (opt3) from neuraminidase__InfluenzaA__ABA42272
augaaccccaaucagaagaucauuaccauaggcagcgugucccugacaaucucuacuauuugcuucuuuaugcaaaucgccauucucaucacgaccgucacacuucacuucaaacaguacgaguuuaacucaccuccaaauaaccagguuaugcugugugaaccgacuauaaucgagagaaauauuaccgaaaucguguauuugacaaacaccacuauugagaaggaaaucugccccaaauuagcugaguacaggaauuggaguaagccucagugugacauaacaggguucgcaccauuuagcaaagauaacuccauucggcugucugccggaggugacaucuggguaacccgcgagcccuaugugucgugcgauccugacaaguguuaccaauucgcgcuaggccaggggacgacucucaauaacguccauucaaaugauaccgugcacgaccgaacaccauaucguacucugcuuaugaacgaacugggaguucccuuucauuugggcaccaaacaggugugcauugcuuggagcaguuccucuugucacgaugguaaggccuggcuccaugucugcgugacaggggacgauaagaaugcaaccgccagcuucaucuacaacggaagacugguagacuccaucguuucauggaguaaagauauucugaggacgcaggagagcgaaugugugugcauaaauggcacuuguacagucgugaugaccgacggcucugcuuccgggaaggcagauacuaaaauccucuuuauugaggagggaaagaucgugcacacaucaaccuuaagcgguagugcccaacacgucgaagagugcucuugcuauccucgguacccaggcguucgcugugugugcagagacaacuggaagggguccaacaggccgauaguagacauuaauaucaaagauuacagcaucgugucgucuuaugucuguuccggacuggugggcgacacgccccggaagaacgauucaaguagcuccucucauugccuugacccuaauaacgaagagggugggcacggaguuaaaggcugggcuuucgaugacggcaaugauguguggauggggcgcaccauuaacgaaaaguugcgacugggauacgagacauuuaaagucaucgaggguuggagcaauccaaacucaaagcuacagauuaauagacaggugauaguagaaaggggcaaccggaguggguauuccggaaucuucagcguugagggcaaaucuuguauuaaucguugcuuuuacguggaacucauccgcgguagaaaggaggaaacugagguccuguggaccucaaacaguaucguggucuucugugggacaagcggcacuuauggaaccggcuccuggcccgacggggccgauauuaaucuuaugccuauauga

SEQ ID NO: 142460 - RNA, 1410 nt, Artificial Sequence; identical to SEQ ID NO: 142375
  derived and/or modified CDS sequence (opt3) from neuraminidase__InfluenzaA__ABA42294

SEQ ID NO: 142461 - RNA, 1410 nt, Artificial Sequence; identical to SEQ ID NO: 142202
  derived and/or modified CDS sequence (opt3) from neuraminidase__InfluenzaA__ABA42305

SEQ ID NO: 142462 - RNA, 1410 nt, Artificial Sequence; identical to SEQ ID NO: 142212
  derived and/or modified CDS sequence (opt3) from neuraminidase__InfluenzaA__ABA42316

SEQ ID NO: 142463 - RNA, 1413 nt, Artificial Sequence
  derived and/or modified CDS sequence (opt3) from neuraminidase__InfluenzaA__ABA42327
augaaccccaaucagaagaucauuaccauaggcagcaucuccauugccaucgggauuaucucucugaugcuccaaauaggaaacaucauuucaaucugggcuagucacagcauucagacagguucccagaaucauacuggcaucugcaaccagagaauaauuacguacgaaaauucuaccugggugaaccacacauaugugaauaucaacaauacuaacguuguggcagggaaagacaagaccucgguaacacuugccggaaauucaagccuguguaguauuuccggcugggcgaucuacaccaaagauaacucuaucaggauugguagcaagggggacguguucgucauacgggagccuuuuaucuccugcucacauuuggagugucgcacuuucuuuuuaacacaaggagcucugcuaaaugauaaacacaguaacggcaccgugaaggaccgaagcccauaucgugcccucaugucuugcccgcugggcgaagcacccuccccuuacaauucaaaguucgagagcguugccuggagugcuucugcaugucaugaugggaugggauggcuuacgauugguaucuccggcccagacaacggggccguggcuguccugaaauauaacggaauaauuacugaaaccaucaagagcuggaaaaagagaaucuugaggacacaggagucggagugcguguguguaaauggcucuugcuuuacuauuaugaccgauggucccuccaacggggccgcgucauacaaaaucuucaagauugaaaagggaaaaguuacaaagaguauagagcucaaugcaccuaacuuucacuaugaagaguguagcugcuacccagacaccggcacggugaugugugucugccgggauaauuggcacggcuccaaccgccccugggugucuuucaaucagaaccuggacuaccagaucggguauauuugcagcggaguguuuggugauaauccuagaccaaaagacggcgaggggucauguaacccggucacuguugauggagccgacggcgugaaggguuucaguuacaaauaugggaauggcguauggaucggaaggacaaaguccaaccggcugcgcaaaggcuuugaaaugaucugggaccccaauggguggaccgauacugacagcgauuucucugugaagcaagacgucguggcuauuacagauuggucaggauacagugguagcuuuguucagcauccugagcucaccggcuuagacugcauacgaccauguuucuggguggaacuggucagagggcuucccagggagaacacgaccaucuggacauccggaucuucgauuagcuucugcggcgucaauuccgauacugccaacuggucauggccugacggugcagaauugccauuuaccaucgauaaguga

SEQ ID NO: 142464 - RNA, 1410 nt, Artificial Sequence; identical to SEQ ID NO: 142197
  derived and/or modified CDS sequence (opt3) from neuraminidase__InfluenzaA__ABA42338

SEQ ID NO: 142465 - RNA, 1410 nt, Artificial Sequence
  derived and/or modified CDS sequence (opt3) from neuraminidase__InfluenzaA__ABA42349
augaaccccaaucagaagaucauuaccauaggcagcgugucccugacaaucgccacuauuugcuuccucaugcaaaucgcuauucuugucacgaccguuacacugcacuuuaaacaguacgagugugacucuccuccaaacaaucaggugauguugugcgaaccgacuaucauagagagaaacaucaccgaaauuguauauuuaacaaauaccacuaucgagaaggaaauuugucccaaacuggcagaguacaggaacuggucaaagccucagugcaauaucacaggguucgccccauuuaguaaagauaacagcauacggcuauccgcgggaggugacauuugggugacccgcgagcccuaugucucuugugauccugacaagugcuaccaauucgcucucggccaggggacgacucugaauaacggacauucgaaugauaccgugcacgaccgaacaccauaucguacucuucugaugaacgaauugggcguucccuuucaucucgguaccagacagguguguaucgccuggucaagcaguuccugccacgaugggaaggcauggcugcaugucugugugacaggagacgaugagaaugccaccgcuucuuucauuuacaacggcaaacugguagacagcaucggcuccuggucaaagaaaauccucaggacgcaggaaagugagugcguuuguauuaaugggacuugcacaguggucaugaccgauggaagcgcaucugguaaggccgacacuaaaauauuauuuaucgaggaaggcaagauugugcacaucuccacacugucagggagcgcucaacacguggaggaaugcaguuguuauccucgguacccaggaguccgcugcguuuguagagauaacuggaagggcucuaacaggccgauaguggacauuaauguaaaagacuacuccaucgugagcucguaugucugcucuggucuugugggggauacgccccggaagaacgacuccuucucaaguagccauuguuuggauccuaauaacgaggaaggaggccacggcguuaaagggugggccuuugacgauggaaaugacguguggaugggucgcaccaucuccgagaagcugcgaucuggcuacgagaccuucaaagucauugaaggguggagcaagccaaacucaaaacuacagaucaauagacaggugauuguagagaggggaaaccggaguggcuauuccgguauauuuagcguugaagggaagucuugcaucaaucguuguuucuacguggagcucauucgcggcagaaaggaagagacagaggucugguggacuucaaacaguaucguggucuuuugcggaaccagcggcacauaugggacuggauccuggcccgauggugcggacaucaaucugaugccuauuuga

SEQ ID NO: 142466 - RNA, 1410 nt, Artificial Sequence; identical to SEQ ID NO: 142202
  derived and/or modified CDS sequence (opt3) from neuraminidase__InfluenzaA__ABA42360

SEQ ID NO: 142467 - RNA, 1410 nt, Artificial Sequence; identical to SEQ ID NO: 142197
  derived and/or modified CDS sequence (opt3) from neuraminidase__InfluenzaA__ABA42371

SEQ ID NO: 142468 - RNA, 1410 nt, Artificial Sequence; identical to SEQ ID NO: 142212
  derived and/or modified CDS sequence (opt3) from neuraminidase__InfluenzaA__ABA42382

SEQ ID NO: 142469 - RNA, 1410 nt, Artificial Sequence; identical to SEQ ID NO: 142197
  derived and/or modified CDS sequence (opt3) from neuraminidase__InfluenzaA__ABA42393

SEQ ID NO: 142470 - RNA, 1410 nt, Artificial Sequence
  derived and/or modified CDS sequence (opt3) from neuraminidase__InfluenzaA__ABA42404
augaaccccaaucagaagaucauuaccauaggcagcgugucccugacaaucgccacuauuugcuuccucaugcagaucgcuauucuugucacgaccguuacacugcacuuuaaacaguacgaguguaacucuccuccaaauaaccaggugauguugugcgaaccggcaaucauagagagaaauaucacugaaauuguauauuuaaccaacacaaccaucgagaaggaaauuugucccaaacuggccgaguacaggaauuggucaaagccucagugcaacaucacuggguucgcgccauuuaguaaagacaauagcauacggcuauccgcuggaggugauauuugggugacacgcgagcccuaugucucuugugacccugauaagugcuaccaauucgcccucggccaggggaccacgcugaacaauggacauucgaacgacacugugcacgaucgaaccccauaucguacacuucugaugaaugaauugggcguucccuuucaucucgguacuagacagguguguaucgcauggucaagcaguuccugccacgacgggaaggccuggcugcaugucugugugaccggagaugacgagaacgcuacagcaucuuucauuuacaauggcaggcugguagauagcaucggcuccuggaguaaaaagauccuccggacccaggaaagugagugcguuuguauuaacgggacgugcacuguggucaugacagacggaagcgccucugguaaagcugauaccaagauauuauuuaucgaggaaggcaaaauugugaacaucuccacucugccugggucagcccaacacguggaggaaugcagcuguuauccacgcuacccgggagucagaugcguuuguagggacaauuggaagggcaguaaccggcccauaguggauauuaauguaaaggacuacucuaucguguccagcuaugucugcucgggucuugugggggacacaccucgcaaaaacgauucuuucuccucaagucacuguuuggacccaaauaacgaggaaggaggccauggcguuaaggggugggcguuugaugacggaaaugauguguggaugggucgaaccaucagcgagaaacugagauccggcuacgagacguucaaggucauugaaggguggucuaaacccaacagcaagcuacagaucaauaggcaagugauuguagagcggggaaaccguucaggcuauagugguauauuuuccguugaagggaaaagcugcaucaaucgcuguuucuacguggagcucauuagaggcaggaaggaagagaccgaggucugguggacaucuaacucaaucguggucuuuugcggaacuucaggcaccuaugggacaggaagcuggccugacggugcagauaucaaucugaugccaauuuga

SEQ ID NO: 142471 - RNA, 1410 nt, Artificial Sequence; identical to SEQ ID NO: 142212
  derived and/or modified CDS sequence (opt3) from neuraminidase__InfluenzaA__ABA42415

SEQ ID NO: 142472 - RNA, 1410 nt, Artificial Sequence; identical to SEQ ID NO: 142219
  derived and/or modified CDS sequence (opt3) from neuraminidase__InfluenzaA__ABA42446

SEQ ID NO: 142473 - RNA, 1410 nt, Artificial Sequence
  derived and/or modified CDS sequence (opt3) from neuraminidase__InfluenzaA__ABA42457
augaaccccaaucagaagaucauuaccauaggcagcgugucccugacaaucgccacuauuugcuuccucaugcaaaucgcuauucuugucacgaccguuacacugcacuuuaaacaguacgaguguaacucuccuccaaauaaccaggugauguugugcgaaccgacuaucauagagagaaauaucaccgaaauuguauauuuaacaaacaccacuaucgagaaggaaauuugucccaaacuggcagaguacaggaauuggucaaagccucagugcaacaucacaggguucgccccauuuaguaaagacaauagcauacggcuauccgcgggaggugauauuugggugacccgcgagcccuaugucucuugugacccugauaagugcuaccaauucgcucucggccaggggacgacucugaacaauggacauucgaacgacaccgugcacgaucgaacaccauaucguacucuucugaugaaugaauugggcguucccuuucaucucgguaccagacagguguguaucgccuggucaagcaguuccugccacgacgggaaggcauggcugcaugucugugugacaggagaugacgagaacgccaccgcuucuuucauuuacaauggcaggcugguagauagcaucggcuccuggaguaaaaagauccuccggacgcaggaaagugagugcguuuguauuaacgggacuugcacaguggucaugaccgacggaagcgcaucugguaaagccgauacuaagauauuauuuaucgaggaaggcaaaauugugcacaucuccacacugucagggagcgcucaacacguggaggaaugcaguuguuauccucgcuacccaggagucagaugcguuuguagggacaacuggaagggcucuaaucggccgauaguggauauuaacguaaaggacuacuccaucgugagcucguaugucugcucuggucuugugggggacacccccaggaaaaaugauuccuucucaaguagccauuguuuggacccuaacaaugaggaaggaggccacggcguuaaggggugggccuuugaugacggaaacgauguguggaugggucgaacgaucuccgagaaacugagaucuggcuacgagaccuucaaggucauugaaggguggagcaaaccaaauucaaagcuacagaucaaccgccaggugauuguagagcggggaaaucguaguggcuauuccgguauauuuagcguugaaucuaaaucaugcaucaaccgcuguuucuacguggagcucauuagagggaggaaggaagagacagaggucugguggacuucaaauagcaucguggucuuuugcggcaccuccggaacauauggcacugggucuuggcccgacggagcggauaucaaccugaugccuauuuga

SEQ ID NO: 142474 - RNA, 1410 nt, Artificial Sequence; identical to SEQ ID NO: 142219
  derived and/or modified CDS sequence (opt3) from neuraminidase__InfluenzaA__ABA42468

SEQ ID NO: 142475 - RNA, 1410 nt, Artificial Sequence
  derived and/or modified CDS sequence (opt3) from neuraminidase__InfluenzaA__ABA42479
augaaccccaaucagaagaucauuaccauaggcagcgugucccugacaaucgccacuauuugcuuccucaugcaaaucgcuauucuugucacgaccguuacacugcacuuuaaacaguacgagugugacucuccuccaaacaaucaggugauguugugcgaaccgacuaucauagagagaaacaucaccgaaauuguauauuuaacaaauaccacuaucgagaaggaaauuugucccaaacuggcagaguacaggaacuggucaaagccucagugcaauaucacaggguucgccccauuuaguaaagauaacagcauacggcuauccgcgggaggugacauuugggugacccgcgagcccuaugucucuugugauccugacaagugcuaccaauucgcucucggccaggggacgacucugaauaacggacauucgaaugauaccgugcacgaccgaacaccauaucguacucuucugaugaacgaauugggcguucccuuucaucucgguaccagacagguguguaucgccuggucaagcaguuccugccacgaugggaaggcauggcugcaugucugugugacaggagacgaugagaaugccaccgcuucuuucauuuacaacggcaggcugguagacagcaucggcuccuggaguaaaaagauccuccggacgcaggaaucagagugcguuuguauuaaugggacuugcacaguggucaugaccgauggaagcgcaucugguaaagccgacacuaagauauuauuuaucgaggaaggcaaaauugugcacaucuccacacugucagggagcgcucaacacguggaggaaugcaguuguuauccucgcuacccaggagucagaugcguuuguagggauaacuggaagggcucuaaccggccgauaguggacauuaauguaaaggacuacuccaucgugagcucguaugucugcucuggucuugugggggauacccccaggaaaaacgacuccuucucaaguagccauuguuuggauccuaauaacgaggacggaggccacggcguuaaggggugggccuuugaugacggaaaugauguguggaugggucgaacgaucuccgaaaaacugagaucuggcuacgagaccuucaaggucauugagggguggagcaaaccaaacucaaagcuacagaucaaucgccaggugauuguagaacggggaaaccguaguggcuauuccgguauauuuagcguugaggggaaaucuugcaucaaucgcuguuucuacguggaacucauuagaggcaggaaggaggaaacagaggucugguggacuucaaacaguaucguggucuuuugcggaaccagcggcacauaugggacuggauccuggcccgacggugcggauaucaaucugaugccuauuuga

SEQ ID NO: 142476 - RNA, 1410 nt, Artificial Sequence
  derived and/or modified CDS sequence (opt3) from neuraminidase__InfluenzaA__ABA42490
augaaccccaaucagaagaucauuaccauaggcagcgugucccugacaaucgccacuauuugcuuccucaugcagaucgcuauucuugucacgaccguuacacugcacuuuaaacaguacgaguguaacucuccuccaaauaaccaggugauguugugcgaaccgacuaucauagagagaaauaucaccgaaauuguauauuuaacaaacaccacuaucgagaaggaaauuugucccaaacuggcagaguacaggaauuggucaaagccucagugcaacaucacaggguucgccccauuuaguaaagacaauagcauacggcuauccgcgggaggugauauuugggugacccgcgagcccuaugucucuugugacccugauaagugcuaccaauucgcucucggccaggggacgacucugaacaauggacauucgaacgacaccgugcacgaucgaacaccauaucguacucuucugaugaaugaauugggcguucccuuucaucucgguaccagacagguguguaucgccuggucaagcaguuccugccacgacgggaaggcauggcugcaugucugugugacaggagaugacgagaacgccaccgcuucuuucauuuacaauggcaggcugguagauagcaucggcuccuggaguaaaaagauccuccggacgcaggaaucagagugcguuuguauuaacgggacuugcacaguggucaugaccgacggaagcgcaucugguaaagccgauacuaagauauuauuuaucgaggaaggcaaaauugugcacaucuccaagcugucagggagcgcucaacacguggaggaaugcaguuguuauccucgcuacccaggagucagaugcguuuguagggacaacuggaagggcucuaaucggccgauaguggauauuaacguaaaagacuacuccaucgugagcucguaugucugcucuggucuugugggggacacaccccgcaagaaugauuccuucucaaguagccauuguuuggacccuaacaaugaggaaggaggccacggcguuaaagggugggccuuugaugacggaaacgauguguggaugggucgaaccaucuccgagaagcugagaucuggcuacgagacguucaaagucauuaagggguggagcaaaccaaauucaaagcuacagaucaacaggcaagugauuguagaacggggaaaucguaguggcuauuccgguauauuuagcguugaggggaagucuugcaucaaccgcuguuucuacguggaacucauuagaggcaggaaagaggaaaccgaggucugguggacaucaaauaguaucguggucuuuugcggaacuagcggcaccuaugggacaggauccuggcccgacggugcggauaucaaccugaugccuauuuga

SEQ ID NO: 142477 - RNA, 1410 nt, Artificial Sequence; identical to SEQ ID NO: 142219
  derived and/or modified CDS sequence (opt3) from neuraminidase__InfluenzaA__ABA42501

SEQ ID NO: 142478 - RNA, 1410 nt, Artificial Sequence
  derived and/or modified CDS sequence (opt3) from neuraminidase__InfluenzaA__ABA42512
augaaccccaaucagaagaucauuaccauaggcagcgugucccugacaaucgccacuauuugcuuccucaugcaaaucgcuauucuugucacgaccguuacacugcacuuuaaacaguacgaguguaacucuccuccaaauaaccaggugauguugugcgaaccgacuaucauagagagaaauaucaccgaaauuguauaucccacaaacaccacuaucgagaaggaaauuuguccuaaauuagcagaguacaggaauuggucaaagccacagugcaacaucacaggguucgcccccuuuaguaaagacaauagcauacggcuguccgcgggaggugauauuugggugacccgcgagccuuaugucucuugugacccagauaagugcuaccaauucgcucuaggccaggggacgacucucaacaauggacauucgaacgacaccgugcacgaucgaacacccuaucguacucugcuuaugaaugaacugggcguuccuuuucauuuggguaccaaacagguguguaucgccuggucaagcaguuccugccacgacgggaaggcauggcuccaugucugugugacaggagaugacgagaacgccaccgcuucuuucauuuacaauggcagacugguagauagcaucggcuccuggucaaagaaaauccugaggacgcaggaaagugagugcguuuguauuaacgggacuugcacaguggucaugaccgacggaagcgcaucugguaaggccgauacuaaaauacucuuuaucgaggaaggcaagauugugcacacauccucauuaagcgggagugcucaacacguggaggaaugcucuuguuauccacgguacccgggaguccgcugcguuuguagagacaacuggaagggcuccaauaggcccaucguggauauaaacguaaaagacuacagcauugugucgucuuaugucugcuccggucuggugggggacaccccucggaagaaugauucaaguagcuccucucauugucuugacccaaacaaugaggaaggaggccacggcguuaaagggugggccuucgaugacggaaacgauguguggaugggucgcacgaucagcgagaaguugcgaucaggcuacgagaccuuuaaagucaucgaaggguggaguaagcccaauuccaaacugcagauuaacagacaggugaucguagacaggggaaaucggagcggcuauucugguauuuucucaguugaggggaagaguugcauaaaccguuguuuuuacguggaacuaauccgcggcagaaagcaggagacagaaguccucuggacuagcaauuccauuguggucuucugcggaaccucuggcacauaugggacuggaucguggccugauggugcggacaucaaccugaugccaaucuga

SEQ ID NO: 142479 - RNA, 1410 nt, Artificial Sequence; identical to SEQ ID NO: 142109
  derived and/or modified CDS sequence (opt3) from neuraminidase__InfluenzaA__ABA42523

SEQ ID NO: 142480 - RNA, 1410 nt, Artificial Sequence; identical to SEQ ID NO: 142109
  derived and/or modified CDS sequence (opt3) from neuraminidase__InfluenzaA__ABA42534

SEQ ID NO: 142481 - RNA, 1410 nt, Artificial Sequence; identical to SEQ ID NO: 142301
  derived and/or modified CDS sequence (opt3) from neuraminidase__InfluenzaA__ABA42545

SEQ ID NO: 142482 - RNA, 1410 nt, Artificial Sequence
  derived and/or modified CDS sequence (opt3) from neuraminidase__InfluenzaA__ABA42556
augaaccccaaucagaagaucauuaccauaggcagcgugucccugacaaucgccacuauuugcuuccucaugcaaaucgcuauucuugucacgaccguuacacugcacuuuaaacaguacgaguguaacucuccuccaaauaaccaggugauguugugcgaaccgacuaucauagagagaaauaucaccgaaauuguauauuuaacaaacaccacuaucgagaaggaaauuugucccaaacuggcagaguacaggaauuggucaaagccucagugcaacaucacaggguucgccccauuuaguaaagacaauagcauacggcuauccgcgggaggugauauuugggugacccgcgagcccuaugucucuugugacccugauaagugcuaccaauucgcucucggccaggggacgacucugaacaauggacauucgaacgacaccgugcacgaucgaacaccauaucguacucuucugaugaaugaauugggcguucccuuucaucucgguaccaaacagguguguaucgccuggucaagcaguuccugccacgacgggaaggcauggcugcaugucugugugacaggagaugacgagaacgccaccgcuucuuucauuuacaauggcagacugguagauagcaucggcuccuggucaaagaaaauccucaggacgcaggaaagugagugcguuuguauuaacgggacuugcacaguggucaugaccgacggaagcgcaucugguaaggccgauacuaaaauauuauuuaucgaggaaggcaagauugugcacacaucccugcuuucagggagcgcucaacacguggaggaaugcaguuguuauccucgguacccaggaguccgcugcguuuguagagacaacuggaagggcucuaauaggccgaucguggauauaaacguaaaagacuacuccauugugagcucguaugucugcucugguuuggugggggacacgccccggaagaaugauuccucaaguagcucccauugucuggacccuaacaaugaggaaggaggccacggcguuaaagggugggccuucgaugacggaaacgauguguggaugggucgcaccaucucugagaagcuacgaagcggcuacgagaccuuuaaagucaucgaaggguggucaaagccaaauaguaaacuccagauuaacagacaggugaucguagacaggggaaaucgguccggcuauagcgguauuuucucuguugaggggaagucaugcauaaaccguuguuuuuacguggaacugauccgcggcagaaagcaggaggcggaaguccuuuggacaaguaauagcauuguggucuucugcggaacuuccggcaccuaugggacaggaucuuggcccgauggugcagacaucaaccugaugccuaucuga

SEQ ID NO: 142483 - RNA, 1410 nt, Artificial Sequence; identical to SEQ ID NO: 142109
  derived and/or modified CDS sequence (opt3) from neuraminidase__InfluenzaA__ABA42567

SEQ ID NO: 142484 - RNA, 1410 nt, Artificial Sequence
  derived and/or modified CDS sequence (opt3) from neuraminidase__InfluenzaA__ABA42931
augaaccccaaucagaagaucauuaccauaggcagcgugucccugacaaucgccacuauuugcucucucaugcaaaucgcuauucuugucacgaccguuacacugcacuucaaacaguacgaguguaacucaccuccaaauaaccaggugauguugugcgaaccgacuaucauagagagaaauaucaccgaaauuguauauuuaacaaacaccacuaucgagaaggaaauuugucccaaacuggcagaguacaggaauuggaguaagccucagugcaacaucacaggguuugccccauucagcaaagacaauuccauacggcuaucugcgggaggugauauuugggugacccgcgagcccuaugucucgugugacccugauaagugcuaccaauuugcucucggccaggggacgacucugaacaauggacauucaaacgacaccgugcacgaucgaacaccauaucguacucuucugaugaaugaauugggcguucccuuccaucucgguaccaaacagguguguaucgccuggagcaguuccucuugccacgacgggaaggcauggcugcaugucugugugacaggagaugacgagaacgccaccgcuagcuuuauuuacaauggcagacugguagauuccaucggcucauggaguaagaaaauccucaggacgcaggaaagcgagugcguuuguauuaacgggacuugcacaguggucaugaccgacggaucugcauccgguaaggccgauacuaaaauauuauucaucgaggaaggcaagauugugcacacaucacugcuuagcgggagugcucaacacguggaggaaugcucuuguuauccucgguacccaggaguccgcugcguuuguagagacaacuggaagggcuccaauaggccgaucguggauauaaacguaaaagacuacagcauugugucgucuuaugucugcuccgguuuggugggggacacgccccggaagaaugauucaaguagcuccucucauugucuggacccuaacaaugaggaaggaggccacggcguuaaagggugggccuuugaugacggaaacgauguguggaugggucgcaccaucagcgagaagcuacgaucaggcuacgagaccuucaaagucaucgaaggguggaguaagccaaauuccaaacuccagauuaacagacaggugaucguagacaggggaaaucggagcggcuauucugguauauuuucaguugaggggaagaguugcauuaaccguuguuucuacguggaacugauccgcggcagaaagcaggagacagaaguccuuuggacuagcaauuccauuguggucuuuugcggaaccucuggcacauaugggacuggaucguggcccgauggugcggacaucaaccugaugccuaucuga

SEQ ID NO: 142485 - RNA, 1410 nt, Artificial Sequence; identical to SEQ ID NO: 142109
  derived and/or modified CDS sequence (opt3) from neuraminidase__InfluenzaA__ABA42942

SEQ ID NO: 142486 - RNA, 1410 nt, Artificial Sequence; identical to SEQ ID NO: 142109
  derived and/or modified CDS sequence (opt3) from neuraminidase__InfluenzaA__ABA42981

SEQ ID NO: 142487 - RNA, 1410 nt, Artificial Sequence; identical to SEQ ID NO: 142197
  derived and/or modified CDS sequence (opt3) from neuraminidase__InfluenzaA__ABA42992

SEQ ID NO: 142488 - RNA, 1413 nt, Artificial Sequence
  derived and/or modified CDS sequence (opt3) from neuraminidase__InfluenzaA__ABA43192
augaaccccaaucagaagaucauuaccauaggcagcaucuccauugccaucgggauuaucucucugaugcuccaaauaggaaacaucauuucaaucugggcuagucacagcauucagacagguucccagaaucauacuggcgugugcaaccagagaaucauaacguacgaaaauucuaccugggucaaccacacauauguuaauauuaacaauacuaacgugaucgcagggaaagacaagaccucgguaauucuugccggaaauucaagccuguguaguaucuccggcugggcgaucuacacaaaagauaacucuauuaggauagguagcaagggggacguguucgucauccgggagccuuuuauuuccugcucacauuuggagugucgcaccuucuuuuuaacucaaggagcucugcuaaaugauaaacacaguaacggcacagugaaggaccgaagcccauaucgugcccucaugucuugcccgcugggcgaagcacccuccccuuacaauucaaaguucgagagcguugccuggagugcuucugcaugucaugaugggaugggauggcuuaccaucgguauauccggcccagacaacggggccguggcuguccugaaauauaacggaauuaucacggaaacuaucaagagcuggaaaaagcagauuuugagaacccaggagucggagugcguguguguaaauggcucuugcuuuacaaucaugacugauggucccuccaacggggccgcgucauacaaaauuuucaagauagaaaagggaaaaguuaccaagaguaucgagcucaaugcaccuaacuuucacuaugaagaguguagcugcuacccagacacaggcaccgugaugugugucugcagggauaauuggcacggcuccaaccggcccugggugucuuucaaucagaaccuggacuaccaaauuggguauaucugcagcggaguguuuggugauaauccucgcccaaaagacggcgaggggucauguaacccggucacgguugauggagccaauggcgugaaggguuucaguuacaaauaugggaacggcguauggaucggaagaacuaaguccaauaggcugcggaaaggcuuugaaaugauuugggaccccaacggguggacagacaccgauagcgacuucucugugaagcaggaugucgugucaauaacugacuggaguggauacagcgguuccuuuguucagcauccugagcucacaggcuuagauugcauccgcccauguuucuggguggaacugguccgagggcuucccaaggagaauaccacgauuuggaccucuggaucgagcaucuccuucugcggcgugaacucagacacagcuaacuggaguuggccugauggugccgaauugccauuuacuauugacaaauga

SEQ ID NO: 142489 - RNA, 1410 nt, Artificial Sequence; identical to SEQ ID NO: 142394
  derived and/or modified CDS sequence (opt3) from neuraminidase__InfluenzaA__ABA43203

SEQ ID NO: 142490 - RNA, 1410 nt, Artificial Sequence
  derived and/or modified CDS sequence (opt3) from neuraminidase__InfluenzaA__ABA43339
augaaccccaaucagaagaucauuaccauaggcagcgugucccugucuaucgccacaauuugcuuccucaugcaaaucgcuauucuugucacuacgguuacccugcacuuuaaacaguacgaguguucaaguccuccaaacaaucaggugaugccgugcgaacccacaaucauagagagaaacaucacugaaauuguauauuugaccaauacaaccaucgagaaggaaauuuguccuaaauuaguggaguacaggaacuggagcaagccacagugcaaaaucacuggguucgcacccuuuuccaaggacaauucuauacggcugucggccggaggugauauuugggucacacgcgagccuuaugugucaugugacccaggcaagugcuaccaauucgcgcuagggcagggaaccacgcucaacaaucgacauagcaacgauacuguucacgaccguacccccuauagaacacugcuuaugaaugaacugggcgugccuuuucauuuggguacuaaacaggucuguauggcuuggaguuccucuagcugccacgaugggaaggccuggcuccauguguguguaaccggacacgacgagaacgcaacagccuccuucaucuacgauggcaggcugguugacucaauuggcaguuggagcaaaaauauccugcggacccaggaaucugagugcguguguaucaacgggacgugcacugucgugaugacagauggauccgcuucagagcgcgcagacaccaagauucucuuuauagaagaggguaaaaucgugcacauuagcccauuaaguggcucugcccaacaugucgaagagugcuccuguuauccgagauaccccgggguuaggugcgugugucgggauaauuggaagggaagcaaccgcccuaucguagacauaaacgugaaggauuacucgauugucucuuccuaugugugcucaggccugguuggugacacuccacgaaagaaugacagaaguagcuccucuuacuguaggaaccccaauaacgaaaaggggagccacggagugaaaggcugggcuuucgaugacggcaaugaugucuggauggggcggacaaucggagaggagcuucguucagguuaugaaaccuuuaaggugaucggcggguggaguacgccuaacuccaaauugcagauuaaucgccagguaaucguugacagcggaaacagaucuggcuacucagguauuuucaguguggaggggaaaagcugcauaaauagguguuuuuaugucgaacugauccggggccgaaaacaggagacccgcgugugguggacauccaacucuauugucguguucugcggaacuucgggcaccuacgggacaggaagcuggccagauggugccgacaucaaucuaaugcccaucuga

SEQ ID NO: 142491 - RNA, 1410 nt, Artificial Sequence
  derived and/or modified CDS sequence (opt3) from neuraminidase__InfluenzaA__ABA54916
augaaccccaaucagaagaucauuaccacaggcagcauaugcauggugaucgggauggucucccugaugcuccaaauuggaaacaucauuucuaucuggguuucacacaguauacagacugguacgcagcauagagccgagccuuguaauaggagcaucauuaacuacgaaaauaacaccugggugaaucagacauauguaaaaaucuccaacacuaauuuccuuaccgagaaggcuguggcaucuguccggcuggugggcaacucgucauugugcccaauuagcgggugggccguuuacaguaaagacaauuccauccgcauaggaucuaagggcgauguguuugucauucgagaaccguucaucagcuguucccacuuagagugccguacauuuuuccugacccaaggugcgcuacucaacgacaaacauucaaaugggacugugaaggauagaagucccuauaggacacugaugagcuguccuguaggagaagcuccaucucccuacaacucccgguuugagucaguugccuggagcgcaagugccugccacgacggcaccucuuggcuuacgauuggcaucuccgggccugauaauggagcuguggcaguccugaaguauaacgguaucauuacugacaccauaaaaagcuggcgcaacaauaucuugagagcccaggagucggaaugugcuugcgugaacggcucuuguuucacagugaugacugaugggccauccaauggacaggccucauacaagauuuuuaaaaucgagaagggcaaagucguuaagaguguggaacucaacgcgcccaauuaucauuacgaggagugcagcuguuacccugacgccggugaaauaaccugcguaugcagggauaacuggcacggguccaaucggccaugggugucuuucaaccagaaucuggaguaucaaauuggauacaucuguagcggcgucuuuggcgacaacccgcgccccaaugaugggacaggaucaugcgguccugugaguccaaacggcgcauaugggguuaagggauucuccuuuaaauacggcaaugguguguggaucgggcgaaccaagagcacgaacucuagaucaggcuucgaaaugauuugggaccccaauggauggacuggcacagauaguaacuuuagcgucaaacaggacaucguggcuauuaccgacugguccggguauucuggaucguucguacagcacccugagcugacuggucucgauuguauaaggccaugcuucuggguugaauuaauccggggccgucccaaggagagcacaauuuggaccuccgggucaaguaucucuuuuuguggagugaacagcgacacggucggcugguccuggccggauggugccgagcugccuuucaccaucgacaaauga

SEQ ID NO: 142492 - RNA, 1413 nt, Artificial Sequence
  derived and/or modified CDS sequence (opt3) from neuraminidase__InfluenzaA__ABA87048
augaaccccaaucagaagaucauuaccauaggcagcaucuccauugccaucgggauuaucucucugaugcuccaaauaggaaacaucauuucaaucugggcuagucacagcauucagacagguucccagaaucauacuggcgugugcaaccagagaaucauaacguacgagaauagcaccugggucaaccacacauauguuaauauuaacaauacuaacgugaucgcagggaaagacaagaccucgguaacacuugccggaaauucaagccuguguaguauuuccggcugggcgaucuacaccaaagauaacucuaucaggauugguagcaagggggacguguucgucauacgggaaccuuuuaucuccugcucacauuuggagugucgcacuuucuuuuuaacacaaggagcucugcuaaaugauaaacacaguaacggcaccgugaaggaccgaagcccauaucgugcccucaugucuugcccgcugggcgaagcacccuccccuuacaauucaaaguucgagagcguugccuggagugcuucugcaugucaugaugggaugggauggcuuacgauugguaucuccggcccagacaacggggccguggcuguccugaaauauaacggaauaauuacugaaaccaucaagagcuggaaaaagcagaucuugagaacacaggagucggagugcguguguguaaauggcucuugcuuuacuauuaugaccgauggucccuccaacagggccgcgucauacaaaaucuucaagauugaaaaggggaaaguuacaaagaguguggagcucaaugcaccuaacuuucacuaugaagaguguagcugcuacccagacaccggaacggucaugugugugugccgggauaauuggcacggcuccaaccgccccugggugucuuucaaucagaaccuggacuaccaaauaggcuauaucugcagcggggucuuuggagauaauccuagaccaaaagacggugagggcucauguaacccgguuacuguggauggggccaauggaguaaagggcuucaguuacaaauaugguaacgggguguggauuggcaggacaaaguccaaucggcugcgcaaaggauuugaaaugaucugggaccccaacggcuggaccgacacugauagcgacuucucugucaagcaggaugugguugcuaucacagacuggucaggguacaguggaucuuuugugcagcauccugagcucaccgguuuagauugcauucgaccauguuucugggucgaacuggugagaggccuucccaaggagaauacgaccauauggacauccgggucuucgaucagcuucugcggaguaaacuccgacacugccaacuggucauggccugauggcgcagaauugccauuuaccauugacaaauga

SEQ ID NO: 142493 - RNA, 1413 nt, Artificial Sequence
  derived and/or modified CDS sequence (opt3) from neuraminidase__InfluenzaA__ABA87060
augaaccccaaucagaagaucauuaccauaggcagcaucuccauugccaucgggauuaucucucugaugcuccaaauaggaaacaucauuucaaucugggcuagucacagcauucagacagguucccagaaucauacuggcaucugcaaccagagaauaauuacguacgaaaauucuaccugggugaaccacacauaugucaauaucaacaauacuaacguuguggcagggaaagacaagaccucgguaacacuugccggaaauucaagccuguguaguauuuccggcugggcgaucuacaccaaagauaacucuaucaggauugguagcaagggggacguguucgucauacgggagccuuuuaucuccugcucacauuuggagugucgcacuuucuuuuuaacacaaggagcucugcuaaaugauaaacacaguaacggcaccgugaaggaccgaagcccauaucgugcccucaugucuugcccgcugggcgaagcacccuccccuuacaauucaaaguucgagagcguugccuggagugcuucugcaugucaugaugggaugggauggcuuacgauugguaucuccggcccagacaacggggccguggcuguccugaaauauaacggaauaauuacugaaaccaucaagagcuggaaaaagagaaucuugaggacacaggagucggagugcguguguguaaauggcucuugcuuuacuauuaugaccgauggucccuccaacgggacagccucauacaaaaucuucaagauugaaaagggaaaaguuaccaagaguauagagcucaaugcgccuaacuuucacuaugaagaguguagcugcuacccagacacgggcacugugaugugugucugccgggauaauuggcacggcuccaaccgccccugggugucuuucaaucagaaccuggacuaccagaucggguauauuugcagcggaguguuuggugauaauccuagaccaaaagacggcaaggggucauguaguccggucacaguugauggagcagacggcgugaaagguuucuccuacaaguaugggaacggcguauggaucggaaggaccaaaagcaaucggcugcgcaagggcuuugagaugaucugggaccccaacggguggacugauacagacucugauuucucagugaagcaagacgucguggccauuaccgauuggaguggauacagcgguuccuuuguucagcauccugaacucacgggcuuagacugcauacgaccauguuucuggguggagcuggucagagggcuucccagggaaaauaccacaaucuggacuucuggaucgagcauuuccuucugcggcguggauucagacaccgcuaacuggaguuggccugauggugccgaguugccauuuacaaucgacaaauga

SEQ ID NO: 142494 - RNA, 1413 nt, Artificial Sequence
  derived and/or modified CDS sequence (opt3) from neuraminidase__InfluenzaA__ABA87083
augaaccccaaucagaagaucauuaccauaggcagcaucuccauugccaucgggauuaucucucugaugcuccaaauaggaaacaucauuucaaucugggcuagucacagcauucagacagguucccagaaucauacuggcaucugcaaccagaaaauaauuacguacaaaaauucuaccugggugaaccacacauaugucaauaucaacaauacuaacguuguggcagggaaggacaagaccucgguaacacuugccggaaauucaagccuguguaguauuuccggcugggcgaucuacaccaaagauaacucuaucagaauugguagcaagggggacguguucgucauaagggagccuuuuaucuccugcucacauuuggaaugucggacuuucuuuuuaacacaaggagcucugcuaaaugauaagcacaguaacggcaccgugaaagaccgcagcccauaucgagcccucaugucuugcccgcugggcgaggcacccuccccuuacaauucaaaguucgaaagcguugccuggagugcuucugcaugucaugaugggaugggauggcuuacgauugguaucuccggcccagacaacggggccguggcuguccugaaauauaacggaauaauuacugagaccaucaagagcuggaaaaagcguaucuugagaacacaggaaucggagugcguguguguaaauggcucuugcuuuacuauuaugaccgauggucccuccaacggggccgcgucauacaagaucuucaaaauugagaagggaaaaguuacaaagaguauagaacucaaugcaccuaacuuucacuaugaggaauguagcugcuacccagacaccggcacggugaugugugucugcagggauaauuggcacggcuccaaccggcccugggugucuuucaaucagaaccuggacuaccagaucggguauauuugcagcggaguguuuggugauaauccucgcccaaaagacggcgaggggucauguaacccggucacuguugauggagccgacggcgugaaggguuucaguuacaaauaugggaauggcguauggaucggaagaacaaaguccaacaggcugcggaagggcuuugagaugaucugggaccccaauggguggaccgauacugacagcguguucucugucaaacaagaugugguugcuauuacagacuggucaggauacagugguagcuuugugcagcauccugaacucaccggcuuagauugcauacgcccauguuucugggucgagcuggugcgagggcuucccagagaaaacacgaccaucuggacauccggaucuucgauuagcuucugcggcguaaauuccgacacugccaacuggucauggccugauggugcagaguugccauuuaccaucgacaaguga

SEQ ID NO: 142495 - RNA, 1413 nt, Artificial Sequence
  derived and/or modified CDS sequence (opt3) from neuraminidase__InfluenzaA__ABA87234
augaacagcaaucagaagaucauuaccauaggcuccaucucuauugccaucgggauuaucucacugaugcuccaaauaggaaacaucauuaguaucugggcuagccacuccauucagacagguucucagaaucauacuggcgugugcaaccagagaaucauaacguacgaaaauucgaccugggucaaccacacauauguuaauauuaacaauacuaacgugaucgcagggaaagacaagaccucaguaacacuugccggaaauagcagucuguguuccauuucuggcugggcgaucuacaccaaagauaacagcaucaggauugguuccaagggggacguguucgucauacgggagcccuuuaucucaugcagucauuuggagugucgcacuuucuuuuuaacacaaggagcucugcuaaaugauaaacacagcaacggcaccgugaaggaccgaucuccuuaucgugcccucauguccugcccacugggcgaagcaccgucacccuacaauagcaaguucgagaguguugccuggucugcuuccgcaugucaugaugggaugggauggcuuacgauugguaucagcggcccugacaacggggccguggcuguccugaaauauaacggaauaauuacugaaaccaucaagucguggaaaaagcagaucuugagaacacaggagucugagugcguguguguaaauggcuccugcuuuacuauuaugaccgaugguccaucaaacggggccgcgaguuacaaaaucuucaagauugaaaagggaaaaguuauaaagagcaucgagcucaaugcacccaacuuucacuaugaagaguguuccugcuacccugacacaggcaccgugaugugugucugcagggauaauuggcacggcucuaaccggccaugggugagcuucaaucagaaccuggacuaccaaauuggguauaucugcucaggaguguuuggugauaauccccgcccuaaagacggcgaggggaguuguaacccagucacgguugauggagccaauggcgugaaggguuucuccuacaaauaugggaacggcguauggaucggaagaacuaagagcaauaggcugcggaaaggcuuugaaaugauuugggacccgaacggguggacagacaccgauucugacuucucagugaagcaggaugucguggcuauaacugacuggaguggauacagcgguuccuuuguucagcaucccgagcucacaggcuuagauugcauccgcccuuguuucuggguggaacugguccgagggcuuccaaaggagaauaccacgauuuggaccucuggaucgagcaucuccuucugcggcgugaacucagacacagccaacuggaguuggcccgauggugcagaauugccuuuuacuauugacaaauga

SEQ ID NO: 142496 - RNA, 1410 nt, Artificial Sequence; identical to SEQ ID NO: 142430
  derived and/or modified CDS sequence (opt3) from neuraminidase__InfluenzaA__ABB02784

SEQ ID NO: 142497 - RNA, 1413 nt, Artificial Sequence; identical to SEQ ID NO: 142434
  derived and/or modified CDS sequence (opt3) from neuraminidase__InfluenzaA__ABB02795

SEQ ID NO: 142498 - RNA, 1413 nt, Artificial Sequence; identical to SEQ ID NO: 142434
  derived and/or modified CDS sequence (opt3) from neuraminidase__InfluenzaA__ABB02806

SEQ ID NO: 142499 - RNA, 1413 nt, Artificial Sequence
  derived and/or modified CDS sequence (opt3) from neuraminidase__InfluenzaA__ABB02817
augaaccccaaucagaagaucauuaccauaggcagcaucuccauugccaucgggauuaucucucugaugcuccaaauaggaaacaucauuucaaucugggcuagucacagcauucagacagguucccagaaucauacuggcgugugcaaccagagaaucauaacguacgaaaauucuaccugggucaaccacacauauguuaauauuaacaauacuaacgugaucgcagggaaagacaagaccucgguaacacuugccggaaauucaagccuguguaguauuuccggcugggcgaucuacaccaaagauaacucuaucaggauugguagcaagggggacguguucgucauacgggagccuuuuaucuccugcucacauuuggagugucgcacuuucuuuuuaacacaaggagcucugcuaaaugauaaacacaguaacggcaccgugaaggaccgaagcccauaucgugcccucaugucuugcccgcugggcgaagcacccuccccuuacaauucaaaguucgagagcguugccuggagugcuucugcaugucaugaugggaugggauggcuuacgauugguaucuccggcccagacaacggggccguggcuguccugaaauauaacggaauaauuacugaaaccaucaagagcuggaaaaagcagaucuugagaacacaggagucggagugcguguguguaaauggcucuugcuuuacuauuaugaccgauggucccuccaacggggccgcgucauacaaaaucuucaagauugaaaagggaaaaguuacaaagaguguggagcucaaugcaccuaacuuucacuaugaagaguguagcugcuacccagacaccggcacggucaugugugugugcagggauaauuggcacggcuccaaccggcccugggugucuuucaaucagaaccuggacuaccaaauaggguauaucugcagcggagucuuuggugauaauccucgcccaaaagacggcgaggggucauguaacccgguuacuguggauggagccaauggcguaaaggguuucaguuacaaauaugggaacggcguguggauuggaagaacaaaguccaauaggcugcggaaaggcuuugaaaugaucugggaccccaacggguggaccgacacugauagcgacuucucugucaagcaggaugugguugcuaucacagacuggucaggauacagugguagcuuugugcagcauccugagcucaccggcuuagauugcauucgcccauguuucugggucgaacuggugcgagggcuucccaaggagaauacgaccauauggacauccggaucuucgaucagcuucugcggcguaaacuccgacacugccaacuggucauggccugauggugcagaauugccauuuaccauugacaaauga

SEQ ID NO: 142500 - RNA, 1413 nt, Artificial Sequence; identical to SEQ ID NO: 142499
  derived and/or modified CDS sequence (opt3) from neuraminidase__InfluenzaA__ABB02828

SEQ ID NO: 142501 - RNA, 1410 nt, Artificial Sequence
  derived and/or modified CDS sequence (opt3) from neuraminidase__InfluenzaA__ABB02839
augaaccccaaucagaagaucauuaccauaggcagcgugucccugacaaucucuacuauuugcuucuuuaugcaaaucgccauucucaucacgaccgucacacuucacuucaaacaguacgaguuuaacucaccuccaaauaaccagguugugcugugugaaccgacuauaaucgagagaaauauuaccgaaaucguauauuugacaaacaccacuauugagaaggaaaucugccccaaauuagcugaguacaggaauuggaguaagccucagugugacauaacaggguucgcaccauuuagcaaagauaacuccauucggcugucugccggaggugacaucugggugacccgcgagcccuaugucucgugcgauccugacaaguguuaccaauucgcgcuaggccaggggacgacucucaauaacgugcauucaaaugauaccguucacgaccgaacaccauaucguacucugcuuaugaacgaacugggagugcccuuucauuugggcaccaagcaggucugcauugcuuggagcaguuccucuugucacgaugguaaagccuggcuccaugugugcguaacaggggacgauaagaaugcaaccgccagcuucaucuacaacggaagacugguugacuccaucgugucauggaguaaagagauucugaggacgcaggaaagcgagugugucugcauaaauggcacuuguacaguggugaugaccgauggcucugcuuccgggaaggcagacacuaaaauccucuuuauugaggaaggaaagaucguccacacaucaaccuuaagcgguagugcccaacacguugaggaaugcucuugcuauccucgguacccaggcgugcgcuguguaugcagagauaacuggaagggguccaacaggccgauaguggacauuaauaucaaagacuacagcaucgucucgucuuauguguguuccggacugguuggcgauacgccccggaagaacgacucaaguagcuccucucauugccuugauccuaauaacgaggaaggugggcacggagugaaaggcugggcuuucgacgauggcaaugacgucuggauggggcgcaccauuagcgagaaguugcgaucaggauacgagacauuuaaagugaucgaagguuggaguaacccaaauuccaagcugcagauuaacagacagguaauaguugauaggggcaaucggagcggguauucuggaaucuucucaguggagggcaaaaguuguauuaaccguugcuuuuacgucgaacuaauccgcgguagaaaggaggaaacugaggugcucuggaccagcaauuccaucgucguguucugugggacaucuggcacuuauggaaccggcucguggcccgacggggccgauauuaaccugaugccuauauga

SEQ ID NO: 142502 - RNA, 1410 nt, Artificial Sequence
  derived and/or modified CDS sequence (opt3) from neuraminidase__InfluenzaA__ABB02850
augaaccccaaucagaagaucauuaccauaggcagcgugucccugacaaucucuacuauuugcuucuuuaugcaaaucgccauucucaucacgaccgucacacuucacuucaaacaguacgaguuuaacucaccuccaaauaaccagguuaugcugugugaaccgacuauaaucgagagaaauauuaccgaaaucguguauuugacaaacaccacuauugagaaggaaaucugccccaaaccugcugaguacaggaauuggaguaagccacagugugacauaacaggguucgcacccuuuagcaaagauaacuccauucgguuaucugccggaggugacaucuggguaacccgcgagccuuaugugucgugcgauccagacaaguguuaccaauucgcgcugggccaggggacgacucuaaauaacguccauucaaaugauaccgugcacgaccgaacacccuaucguacucuccugaugaacgaacuuggaguuccuuuucaucugggcaccaaacaggugugcauugcuuggagcaguuccucuugucacgaugguaaggccugguugcaugucugcgugacaggggacgauaagaaugcaaccgccagcuucaucuacaacggaagacucguagacuccaucguuucauggaguaaagagauucugaggacgcaggaaagcgagugugugugcauaaauggcacuugugcugucgugaucacagauggcucugcauccgggaaggccgacaccaaaauucuguuuaucgaggaaggaaagauagugcacacuucaaagcucagcgguagugcucaacacgucgaggaaugcucuugcuauccacgguacccgggcauucgcuguguuugcagagauaacuggaaaggguccaacaggcccaucguggacaucaauauuaaggacuacagcaucguaucgucuuauguguguuccggauuagucggcgauacaccucggaaaaacgacucaaguagcuccucucugugccuugauccaaauaacgaggaaggugggcauggagugaagggcugggccuucgacgauggcaaugacguuuggauggggcgcaccauuagcgagaaauugcgaucaggauacgagacguuuaaggugauagaagguuggaguaaccccaauuccaaacugcagaucaacagacaggucauuguggauaggggcaaucggagcggguauucuggaaucuucucaguagagggcaagaguuguaucaaccguugcuuuuacguugaacuaauucgcgguagaaaggaggaaaccgaggugcucuggacaagcaauuccauagucguguucugugggacuucuggcaccuauggaacaggcucguggccugacggggcggauaucaaccugaugccaauuuga

SEQ ID NO: 142503 - RNA, 1410 nt, Artificial Sequence
  derived and/or modified CDS sequence (opt3) from neuraminidase__InfluenzaA__ABB02861
augaaccccaaucagaagaucauuaccauaggcagcgugucccugacaaucgccacuauuugcuuccucaugcagaucgcuauucuugucacgaccguuacacugcacuuuaaacaguacgaguguaacucuccuccaaauaaccaggugauguugugcgaaccggcaaucauagagagaaauaucacugaaauuguauauuuaaccaacacaaccaucgagaaggaaauuugucccaaacuggccgaguacaggaauuggucaaagccucagugcaacaucacuggguucgcgccauuuaguaaagacaauagcauacggcuauccgcuggaggugauauuugggugacacgcgagcccuaugucucuugugacccugauaagugcuaccaauucgcccucggccaggggaccacgcugaacaauggacauucgaacgacacugugcacgaucgaaccccauaucguacacuucugaugaaugaauugggcguucccuuucaucucgguacuagacagguguguaucgcauggucaagcaguuccugccacgacgggaaggccuggcugcaugucugugugaccggagaugacgagaacgcuacagcaucuuucauuuacgauggcaggcugguagacagcaucggcuccuggaguaaaaagauccuccggacccaggaaucagagugcguuuguauuaaugggacgugcacuguggucaugacagauggaagcgccucugguaaagcugacaccaagauauuauuuaucgaggaaggcaaaauugugaacaucuccacucugucagggagcgcccaacacguggaggaaugcaguuguuauccucgcuacccaggagucagaugcguuuguagggauaacuggaagggcucuaaucggccgauaguggacauuaacguaaaggacuacuccaucgugagcucguaugucugcucuggucuugugggggauacaccccgcaaaaaugacuccuucucaaguagccacuguuuggauccuaacaaugaggaaggaggccauggcguuaaggggugggcguuugacgauggaaacgacguguggaugggucgaaccaucuccgagaaacugagaucuggcuacgagacguucaaggucauugaaggguggagcaaaccaaauucaaagcuacagaucaacaggcaagugauuguagagcggggaaaucguaguggcuauuccgguauauuuagcguugaagggaaaucuugcaucaaccgcuguuucuacguggagcucauuagaggcaggaaggaagagaccgaggucugguggacaucaaauaguaucguggucuuuugcggaacuagcggcaccuaugggacaggauccuggcccgauggugcagacaucgaucugaugccuauuuga

SEQ ID NO: 142504 - RNA, 1410 nt, Artificial Sequence; identical to SEQ ID NO: 142301
  derived and/or modified CDS sequence (opt3) from neuraminidase__InfluenzaA__ABB02872

SEQ ID NO: 142505 - RNA, 1410 nt, Artificial Sequence; identical to SEQ ID NO: 142301
  derived and/or modified CDS sequence (opt3) from neuraminidase__InfluenzaA__ABB02883

SEQ ID NO: 142506 - RNA, 1410 nt, Artificial Sequence
  derived and/or modified CDS sequence (opt3) from neuraminidase__InfluenzaA__ABB02894
augaaccccaaucagaagaucauuaccauaggcagcgugucccugacaaucgccacuauuugcuuccucaugcaaaucgcuauucuugucacgaccguuacacugcacuuuaaacaguacgaguguaacucuccuccaaauaaccaggugauguugugcgaaccgacuaucauagagagaaauaucaccgaaaugguauauuuaacaaacaccacuauugagaaggaaaucugucccaaacuggcagaguacaggaauuggucaaagccucagugcaacauuacaggguucgccccauuuaguaaagacaauagcauccggcuauccgcgggaggugauauaugggugacccgcgagcccuaugucucuugugacccugauaagugcuaccaauucgcucucggccaggggacgacucugaacaauggacauucgaacgacaccgugcacgaucgaacaccauaucguacucuucugaugaaugaauugggcguucccuuucaucucgguaccaaacagguguguauugccuggucaagcaguuccugccacgacgggaaggcauggcugcaugucugugugacaggagaugacgagaacgccaccgcuucuuucaucuacaauggcagacugguagauagcauuggcuccuggucaaagaaaauccucaggacgcaggaaagugagugcguuuguaucaacgggacuugcacaguggucaugaccgacggaagcgcaucugguaaggccgauacuaaaauuuuauuuauagaggaaggcaagaucgugcacacaucccugcuuucagggagcgcucaacacguggaggaaugcaguuguuauccucgguacccaggaguccgcugcguuuguagagacaacuggaagggcucuaauaggccgauuguggauaucaacguaaaagacuacuccauagugagcucguaugucugcucugguuuggugggggacacuccccggaagaaugauuccucaaguagcucccauugucuggacccuaacaaugaggaaggaggccacggcguuaaagggugggccuucgaugacggaaacgauguguggaugggucgcacgauuucugagaagcuacgaagcggcuacgagaccuuuaaagucaucgaaggguggucaaagccaaauaguaaacuccagaucaacagacaggugauuguagacaggggaaaucgguccggcuauagcgguaucuucucuguugaggggaagucaugcauuaaccguuguuuuuacguggaacugauacgcggcagaaagcaggagacagaaguccuuuggaccaguaauagcaucguggucuucugcggaaccuccggcacauaugggacuggaucuuggcccgauggugcggacauuaaccugaugccuaucuga

SEQ ID NO: 142507 - RNA, 1410 nt, Artificial Sequence; identical to SEQ ID NO: 142109
  derived and/or modified CDS sequence (opt3) from neuraminidase__InfluenzaA__ABB02905

SEQ ID NO: 142508 - RNA, 1413 nt, Artificial Sequence
  derived and/or modified CDS sequence (opt3) from neuraminidase__InfluenzaA__ABB02916
augaaccccaaucagaagaucauuaccauaggcagcaucuccauugccaucgggauuaucucucugaugcuccaaauaggaaacaucauuucaaucugggcuagucacagcauucagacagguucccagaaucauacuggcgugugcaaccagagaaucauaacguacgaaaauucuaccugggucaaccacacauauguuaauauuaacaauacuaacgugaucgcagagaaagacaagaccucgguaacacuugccggaaauucaagccuguguaguauuuccggaugggcgaucuacaccaaagauaacucuaucaggauuggcagcaagggugacguguucgucauacgggagccuuuuaucuccugcucacauuuggaaugucgcacuuucuuuuuaacacaaggggcucugcuaaaugauaaacacaguaacggaaccgugaaggaccgaagcccauaucgugcccucaugucuugcccgcugggcgaggcacccuccccuuacaauucaaaguucgaaagcguugccuggagugcuucugcaugucaugauggcaugggguggcuuacgauuggaaucuccgguccagacaacggcgccguggcuguccugaaauauaacgggauaauuacugagaccaucaagagcuggaaaaagcagaucuugagaacacaggagucggaaugcguguguguaaauggaucuugcuuuacuauuaugaccgauggccccuccaacggugccgcgucauacaaaaucuucaagauugagaaggggaaaguuacaaagaguauagaacucaaugcaccuaacuuucacuaugaggaguguagcugcuacccagacaccggaacggugaugugugucugcagggauaauuggcacggcuccaaccggcccugggugucuuucaaucagaaccuggacuaccaaaucggcuauauuugcagcgggguguuuggagauaauccucgcccaagagacggugaaggcucauguaacccggucacuguugauggggccaauggagugaaaggcuucaguuacaaguaugguaacgggguauggaucggcaggacaaaauccaaucggcugcgcaagggauuugagaugaucugggaccccaacggcuggaccgacacugauagcgacuucucugugaaacaggaugucguggcuauuacagacuggucaggguacagugggagcuuuguucagcauccugaacucaccgguuuagauugcauacgaccauguuucuggguggagcuggucagaggccuucccagggaaaauacgaccaucuggacauccgggucuucgauuagcuucugcggagugaacuccgacacugccaacuggucauggccugauggcgcagaguugccauuuaccaucgacaaguga

SEQ ID NO: 142509 - RNA, 1413 nt, Artificial Sequence
  derived and/or modified CDS sequence (opt3) from neuraminidase__InfluenzaA__ABB02927
augaaccccaaucagaagaucauuaccauaggcagcaucuccauugccaucgggauuaucucucugaugcuccaaauaggaaacaucauuucaaucugggcuagucacagcauucagacagguucccagaaucauacuggcaucugcaaccagagaauaauuacguacgaaaauucuaccugggugaaccacacauaugugaauaucaacaauacuaacguuguggcagggaaagacaagaccucgguaacacuugccggaaauucaagccuguguaguauuuccggcugggcgaucuacaccaaagauaacucuaucaggauugguagcaagggggacguguucgucauacgggagccuuuuaucuccugcucacauuuggagugucgcacuuucuuuuuaacacaaggagcucugcuaaaugauaaacacaguaacggcaccgugaaggaccgaagcccauaucgugcccucaugucuugcccgcugggcgaagcacccuccccuuacaauucaaaguucgagagcguugccuggagugcuucugcaugucaugaugggaugggauggcuuacgauugguaucuccggcccagacaacggggccguggcuguccugaaauauaacggaauaauuacugaaaccaucaagagcuggaaaaagagaaucuugaggacacaggagucggagugcguguguguaaauggcucuugcuuuacuauuaugaccgauggucccuccaacggggccgcgucauacaaaaucuucaagauugaaaagggaaaaguuacaaagaguauagagcucaaugcaccuaacuuucacuaugaagaguguagcugcuacccagacaccggcacggugaugugugucugccgggauaauuggcacggcuccaaccgccccugggugucuuucaaucagaaccuggacuaccagaucggguauauuugcagcggaguguuuggugauaauccuagaccaaaagacggcgaggggucauguaacccggucacuguugauggagccgacggcgugaaggguuucaguuacaaauaugggaauggcguauggaucggaaggacaaaguccaacaaacugcggaagggcuuugaaaugaucugggaccccaauggguggaccgauacugacagcgauuucucugugaagcaagacgucguggcuauuacagauuggucaggauacagugguagcuuuguucagcauccugagcucaccggcuuagacugcauacgcccauguuucuggguggaacugguccgagggcuucccagagagaacacgaccaucuggacauccggaucuucgauuagcuucugcggcgucaauuccgauacugccaacuggucauggccugacggugcagaauugccauuuaccaucgauaaauga

SEQ ID NO: 142510 - RNA, 1413 nt, Artificial Sequence
  derived and/or modified CDS sequence (opt3) from neuraminidase__InfluenzaA__ABB02939
augaaccccaaucagaagaucauuaccauaggcagcaucuccauugccaucgggauuaucucucugaugcuccaaauaggaaacaucauuucaaucugggcuagucacagcauucagacagguucccagaaucauacuggcgugugcaaccagagaaucauaacguacgaaaauucuaccuggaugaaccacacauaugucaauauuaacaauacuaacguuaucgcagggaaagacaagaccucggugacacuugccggaaauucaagccuguguaguauuuccggcugggcgaucuacaccaaagauaacucuaucaggauugguagcaagggggacguauucgugauacgggagccuuuuaucuccugcucacauuuggagugucgcacuuucuuuuuaacacaaggagcucugcuaaaugauaaacacaguaacggcaccgucaaggaccgaagcccauaucgugcccucaugucuugcccgcugggcgaagcacccuccccuuacaauucaaaguucgagagcguggccuggagugcuucugcaugucaugaugggaugggauggcuuacgauugguaucuccggcccagacaacggggccguugcugugcugaaauauaacggaauaauuacugaaaccaucaagagcuggaaaaagcagaucuugagaacacaggagucggagugcgucugugugaauggcucuugcuuuacuauuaugaccgauggucccuccaacggggccgcgucauacaaaaucuucaagauugaaaagggaaaaguaacaaagaguauggagcucaaugcaccuaacuuucacuaugaagaguguagcugcuacccagacaccggcacgguuaugugugugugcagggauaauuggcacggcuccaaccggcccugggucucuuucaaucagaaccuggacuaccaaauaggguauaucugcagcggaguguuuggugauaauccucgcccaaaagacggcgaggggucauguaacccggugacugucgauggagccaauggcguuaaggguuucaguuacaaauaugggaacggcguguggauuggaagaacaaaguccaauaggcugcggaaaggcuuugaaaugaucugggaccccaacggguggaccgacacugauagcgacuucucuguaaagcaggauguggucgcuaucacagacuggucaggauacagugguagcuuugugcagcauccugagcucaccggcuuagauugcauucgcccauguuucuggguugaacuggugcgagggcuucccaaggagaauacgaccauauggacauccggaucuucgaucagcuucugcggcgucaacuccgacacugccaacuggucauggccugauggugcagaauugccauuuaccauugacaaauga

SEQ ID NO: 142511 - RNA, 1410 nt, Artificial Sequence; identical to SEQ ID NO: 142426
  derived and/or modified CDS sequence (opt3) from neuraminidase__InfluenzaA__ABB02950

SEQ ID NO: 142512 - RNA, 1410 nt, Artificial Sequence; identical to SEQ ID NO: 142327
  derived and/or modified CDS sequence (opt3) from neuraminidase__InfluenzaA__ABB02961

SEQ ID NO: 142513 - RNA, 1410 nt, Artificial Sequence; identical to SEQ ID NO: 142327
  derived and/or modified CDS sequence (opt3) from neuraminidase__InfluenzaA__ABB02972

SEQ ID NO: 142514 - RNA, 1410 nt, Artificial Sequence; identical to SEQ ID NO: 142327
  derived and/or modified CDS sequence (opt3) from neuraminidase__InfluenzaA__ABB02983

SEQ ID NO: 142515 - RNA, 1410 nt, Artificial Sequence; identical to SEQ ID NO: 142327
  derived and/or modified CDS sequence (opt3) from neuraminidase__InfluenzaA__ABB02994

SEQ ID NO: 142516 - RNA, 1410 nt, Artificial Sequence; identical to SEQ ID NO: 142327
  derived and/or modified CDS sequence (opt3) from neuraminidase__InfluenzaA__ABB03005

SEQ ID NO: 142517 - RNA, 1410 nt, Artificial Sequence; identical to SEQ ID NO: 142332
  derived and/or modified CDS sequence (opt3) from neuraminidase__InfluenzaA__ABB03016

SEQ ID NO: 142518 - RNA, 1410 nt, Artificial Sequence; identical to SEQ ID NO: 142327
  derived and/or modified CDS sequence (opt3) from neuraminidase__InfluenzaA__ABB03027

SEQ ID NO: 142519 - RNA, 1410 nt, Artificial Sequence; identical to SEQ ID NO: 142332
  derived and/or modified CDS sequence (opt3) from neuraminidase__InfluenzaA__ABB03038

SEQ ID NO: 142520 - RNA, 1410 nt, Artificial Sequence; identical to SEQ ID NO: 142327
  derived and/or modified CDS sequence (opt3) from neuraminidase__InfluenzaA__ABB03049

SEQ ID NO: 142521 - RNA, 1410 nt, Artificial Sequence
  derived and/or modified CDS sequence (opt3) from neuraminidase__InfluenzaA__ABB03060
augaaccccaaucagaagaucauuaccauaggcagcgugucccugacaaucucuacuauuugcuucuuuaugcaaaucgccauucucaucacgaccgucacacuucacuucaaacaguacgaguuuaacucaccuccaaauaaccagguuaugcugugugaaccgacuauaaucgagagaaauauuaccgaaaucguguauuugacaaacaccacuauugagaaggaaaucugccccaaauuagcugaguacaggaauuggaguaagccucagugugacauaacaggguucgcaccauuuagcaaagauaacuccauucggcugucugccggaggugacaucuggguaacccgcgagcccuaugugucgugcgauccugacaaguguuaccaauucgcgcuaggccaggggacgacucucaauaacguccauucaaaugauaccgugcacgaccgaacaccauaucguacucugcuuaugaacgaacugggaguucccuuucauuugggcaccaaacaggugugcauugcuuggagcaguuccucuugucacgaugguaaggccuggcuccaugucugcgugacaggggacgauaagaaugcaaccgccagcuucaucuacaacggaagacugguagacuccaucguuucauggaguaaagagauucugaggacgcaggaaagcgagugugugugcauaaauggcacuuguacagucgugaugaccgauggcucugcuuccgggaaggcagacacuaaaauccucuuuauugaggaaggaaagaucgugcacacaucaaccuuaagcgguagugcccaacacgucgaggaaugcucuugcuauccucgguacccaggcauacgcuguguuugcagagauaacuggaagggguccaacaggccgauuguggacaucaauaucaaagacuacagcauuguaucgucuuauguguguuccggacuggucggcgauacgccccggaagaacgacucaaguagcuccucucauugccuugauccuaauaacgaggaaggugggcacggagugaaaggcugggcuuucgacgauggcaaugacguuuggauggggcgcaccaucagcgagaaguugcgaucaggauacgagacauuuaaagugauugaagguuggaguaacccaaauuccaagcugcagauaaacagacaggucaucguggauaggggcaaucggagcggguauucuggaauuuucucaguagagggcaaaaguuguaucaaccguugcuuuuacguugaacuaauccgcgguagaaaggaggaaacugaggugcucuggaccagcaauuccauugucguguucugugggacaucuggcacuuauggaaccggcucguggcccgacggggccgauauaaaccugaugccuaucuga

SEQ ID NO: 142522 - RNA, 1410 nt, Artificial Sequence
  derived and/or modified CDS sequence (opt3) from neuraminidase__InfluenzaA__ABB03071
augaaccccaaucagaagaucauuaccauaggcagcgugucccugacaaucucuacuauuugcuucuuuaugcaaaucgccauucucaucacgaccgucacacuucacuucaaacaguacgaguuuaacucaccuccaaauaaccagguuaugcugugugaaccgacuauaaucgagagaaauauuaccgaaaucguguauuugacaaacaccacuauugagaaggaaaucugccccaaauuagcugaguacaggaauuggaguaagccucagugugggauaacaggauucgcaccauuuagcaaagacaacuccauucggcugucugccgguggcgauaucuggguaacccgcgagcccuaugugucgugcgacccugauaaguguuaccaauucgcgcuagggcagggaacgacucucaauaacguccauucaaaugacaccgugcacgaucgaacaccauaucguacucugcuuaugaacgaacugggcguucccuuucauuuggguaccaaacaggugugcauugcuuggagcaguuccucuugucacgacgggaaggccuggcuccaugucugcgugacaggagaugacaagaaugcaaccgccagcuucaucuacaacggcagacugguagauuccaucguuucauggaguaaagagauucugaggacgcaggaaagcgagugugugugcauaaauggcacuuguacagucgugaugaccgacgggucugcuuccggaaaggcagauacuaaaauccucuuuauugaggaagguaagaucgugcacacaucaaccuuaagcggcagugcccaacacgucgaggaaugcucuugcuauccucgguacccagggguucgcugugugugcagagacaacuggaagggauccaacaggccgauaguagauauuaauaucaaagacuacagcaucgugucgucuuaugucuguuccggccuggugggugacacgccccggaagaacgauucaaguagcuccucucauugccuugacccuaauaacgaggaagggggacacggcguuaaaggcugggcuuucgaugacgggaaugauguguggaugggacgcaccauuagcgagaaguugcgaucagguuacgagacauuuaaagucaucgaaggcuggaguaacccaaauuccaagcugcagauuaacagacaggugauaguagacaaagggaauaggagcggauauucuggcaucuucucaguugaggguaagaguuguauuaaccggugcuuuuacguggaacuaauccgugggcgcaaggaggaaacugagguccucuggaccagcaauuccaucguggucuucuguggcacaucuggaacuuauggcaccgggucguggcccgauggagccgacauuaaccugaugccuauauga

SEQ ID NO: 142523 - RNA, 1410 nt, Artificial Sequence
  derived and/or modified CDS sequence (opt3) from neuraminidase__InfluenzaA__ABB03093
augaaccccaaucagaagaucauuaccauaggcagcgugucccugacaaucucuacuauuugcuucuuuaugcaaaucgccauucucaucacgaccgucacacuucacuucaaacaguacgaguuuaacucaccuccaaauaaccagguuaugcugugugaaccgacuauaaucgagagaaauauuaccgaaaucguguauuugacaaacaccacuauugagaaggaaaucugccccaaauuagcugaguacaggaauuggaguaagccucagugugacauaacaggguucgcaccauuuagcaaagauaacuccauucggcugucugccggaggugacaucuggguaacccgcgagcccuaugugucgugcgauccugacaaguguuaccaauucgcgcuaggccaggggacgacucucaauaacguccauucaaaugauaccgugcacgaccgaacaccauaucguacucugcuuaugaacgaacugggaguucccuuucauuugggcaccaaacaggugugcauugcuuggagcaguuccucuugucacgaugguaaggccuggcuccaugucugcgugacaggggacgauaagaaugcaaccgccagcuucaucuacaacggaagacugguagacuccaucguuucauggaguaaagagauucugaggacgcaggaaagcgagugugugugcauaaauggcacuuguacagucgugaugaccgauggcucugcuuccgggaaggcagacacuaaaauccucuuuauugaggaaggaaagaucgugcacacaucaaccuuaagcgguagugcccaacacauagaggaaugcucuugcuauccucgguacccaggcguccgcuguguuugcagagauaacuggaagggguccaacaggccgauuguggacaucaauaucaaagacuacagcauuguaucgucuuauguguguuccggacuggucggcgauacgccccggaagaacgacucaaguagcuccucucauugccuugauccuaauaacgaggaaggugggcacggagugaaaggcugggcuuucgacgauggcaaugacguuuggauggggcgcaccaucagcgagaaguugcgaucaggauacgagacauuuaaagugauugaagguuggaguaacccaaauuccaagcugcagauaaacagacaggucaucguggauaggggcaaucggagcggguauucuggaauuuucucaguagagggcaaaaguuguaucaaccguugcuuuuacguugaacuaauccgcgguagaaaggaggaaacugaggugcucuggaccagcaauuccauugucguguucugugggacaucuggcacuuauggaaccggcucguggcccgacggggccgauauaaaccugaugccuaucuga

SEQ ID NO: 142524 - RNA, 1410 nt, Artificial Sequence; identical to SEQ ID NO: 142430
  derived and/or modified CDS sequence (opt3) from neuraminidase__InfluenzaA__ABB03104

SEQ ID NO: 142525 - RNA, 1410 nt, Artificial Sequence
  derived and/or modified CDS sequence (opt3) from neuraminidase__InfluenzaA__ABB03115
augaaccccaaucagaagaucauuaccauaggcagcgugucccugacaaucucuacuauuugcuucuuuaugcaaaucgccauucucaucacgaccgucacacuucacuucaaacaguacgaguuuaacucaccuccaaauaaccagguuaugcugugugaaccgacuauaaucgagagaaauauuaccgaaaucguguauuugacaaacaccacuauugagaaggaaaucugccccaaauuagcugaguacaggaauuggaguaagccucaguguaacauaacaggguucgcaccauuuagcaaagacaauuccauucggcugucugccggaggugauaucuggguaacccgcgagcccuaugugucgugcgacccugauaaguguuaccaauucgcgcuaggccaggggacgacucucaacaauguccauucaaacgacaccgugcacgaucgaacaccauaucguacucugcuuaugaaugaacugggaguucccuuucauuugggcaccaaacaggugugcauugcuuggagcaguuccucuugucacgacgguaaggccuggcuccaugucugcgugacaggggaugacgagaacgcaaccgccagcuucaucuacaauggaagacugguagauuccaucguuucauggaguaagaaaauucugaggacgcaggaaagcgagugugugugcauaaacggcacuuguacagucgugaugaccgacggcucugcuuccgggaaggcagauacuaaaauccucuuuauugaggaaggaaagaucgugcacacaucaaccuuaagcgguagugcccaacacgucgaggaaugcucuugcuauccucgguacccaggcguucgcugugugugcagagacaacuggaagggguccaauaggccgauaguagauauuaacaucaaagacuacagcaucgugucgucuuaugucuguuccggacuggugggcgacacgccccggaagaaugauucaaguagcuccucucauugccuugacccuaacaaugaggaaggugggcacggaguuaaaggcugggcuuucgaugacggcaacgauguguggauggggcgcaccauuagcgagaaguugcgaucaggauacgagacauuuaaagucaucgaagguuggaguaauccaaacuccaagcugcagauuaauagacaggugauaguagacaggggcaaccggagcggguauucuggaaucuucucaguugagggcaaaaguuguauuaaucguugcuuuuacguggaacuaauccgcgguagaaagcaggagaacgaaguccucuggacuagcaauuccaucguggucuucugugggaccucuggcacauauggaacuggcucguggcccgauggggccgacauuaaccugaugccuauauga

SEQ ID NO: 142526 - RNA, 1413 nt, Artificial Sequence; identical to SEQ ID NO: 142434
  derived and/or modified CDS sequence (opt3) from neuraminidase__InfluenzaA__ABB03126

SEQ ID NO: 142527 - RNA, 1413 nt, Artificial Sequence
  derived and/or modified CDS sequence (opt3) from neuraminidase__InfluenzaA__ABB03148
augaaccccaaucagaagaucauuaccauaggcagcaucuccauugccaucgggacaauuucucugaugcuccaaaucggaaacauaaucucaauuugggcuagucacagcauccagacugguucccagaaucauacgggcauuugcaaccagagaaucauaaccuacgaaaauucuacaugggugaaccacacuuaugucaauauuaacaauaccaacguuguggcagggaaagacaagacaucgguaacccuugccggaaauucaagccuguguaguaucuccggcugggcgauuuacacuaaagauaacucuaucaggaucgguagcaagggggacguguucgucauucgggagccuuuuauauccugcucacauuuggagugucgcacauucuuuuuaacccaaggagcucugcuaaaugauaaacacaguaacggcacggugaaggaccgaagcccauaucgugcccucaugucuugcccgcugggcgaagcacccuccccuuacaauucaaaguucgagagcguugccuggagugcuucugcaugucaugaugggaugggauggcuuacuaucgguauuuccggcccagacaacggggccguggcuguccugaaauauaacggaaucauaaccgaaacaauuaagagcuggaaaaagagaaucuugaggacucaggagucggagugcguguguguaaauggcucuugcuuuaccaucaugacagauggucccuccaacggggccgcgucauacaaaauuuucaagaucgaaaagggaaaaguuaccaagaguauugagcucaaugcaccuaacuuucacuaugaagaguguagcugcuacccagacacgggcacugugaugugugucugccgggauaauuggcacggcuccaaccgccccugggugucuuucaaucagaaccuggacuaccagauaggguauaucugcagcggaguguuuggugauaauccuagaccaaaagacggcaaggggucauguaacccggucacaguugauggagccgacggcgugaaagguuucaguuacaaguaugggaauggcguauggauuggaaggaccaaauccaaccggcugcgcaagggcuuugagaugaucugggaccccaauggguggacugauacagacagcgauuucucugugaagcaagacgucguggcuaucaccgauuggucaggauacagugguagcuuuguucagcauccugaacucacgggcuuagacugcauucgaccauguuucuggguggagcuggucagagggcuucccagggaaaacaccacaauauggacuuccggaucuucgaucagcuucugcggcguggauuccgacaccgccaauuggucauggccugauggugcagaguugccauuuacaauugacaaauga

SEQ ID NO: 142528 - RNA, 1410 nt, Artificial Sequence
  derived and/or modified CDS sequence (opt3) from neuraminidase__InfluenzaA__ABB04286
augaaccccaaucagaagaucauuaccauaggcagcgugucccugacaaucgccacuauuugcuuccucaugcaaaucgcuauucuugucacgaccguuacacugcacuuuaaacaguacgaguguucuucaccuccaaacaaucaggugaugccgugcgaacccaucauaaucgagagaaacauuacugaaaucguauauuugaccaauacaaccauugagaaggaaaucuguccuaaauuaguggaguacaggaacuggaguaagccacagugcaaaauaacuggguucgcacccuuuagcaaggacaauuccauucggcugucugccggaggugauaucugggucacacgcgagccuuaugugucgugugacccaggcaagugcuaccaauucgcgcuagggcagggaaccacgcucgauaacaaacauucaaaugacacuauucacgaucgaacaccccaucguacccugcuuaugaacgaacugggcguuccuuuucacuuggguacuagacagguguguaucgcuuggagcaguuccucuugccaugacgggaaggccuggcuccacgucugugugaccggauaugauaaaaaugcaacagccagcuucaucuacgacggcaggcugguagauuccauuggcucauggaguaagaacauacugcggacccaggagagcgaaugcguuuguaucaaugggacgugcacuguggucaugacagacggaucugcuuccgagcgcgcagauaccaaaauucucuuuaucgaggaagguaagauagugcacauuucaccauuaagcggcagugcccaacauguggaggaaugcucuuguuauccgagauaccccggggucaggugcguuugucgggacaacuggaagggauccaaucgcccugugguagauaucaacgugaaagacuacagcaucgucucgucuuaugugugcuccggccugguuggugacacuccacgaaagaacgauagaucaaguagcuccuacuguaggaaucccaacaaugagaaagggaaccacggagugaagggcugggcuuucgacgauggcaaugacgucuggauggggcggacaauuucugaagagagccguucaggauaugagaccuuuaaagugaucgguggcuggaguacgccuaacuccaagagccagauuaaucgccagguaauaguugauucugggaacagaucaggauacaguggcaucuucagcguggaagguaaauccugcauuaauagguguuuuuaugucgagcuuauccgggggcgagaacaggagacccgcgugugguggacaucuaacucgaucgucguguucugcggcacuagcggaaccuacggcacaggguccuggccagacggagccgauauuaauuugaugcccauauga

SEQ ID NO: 142529 - RNA, 1410 nt, Artificial Sequence
  derived and/or modified CDS sequence (opt3) from neuraminidase__InfluenzaA__ABB04297
augaaccccaaucagaagaucauuaccauaggcagcgugucccugacaaucgccacuauuugcuuccucaugcaaaucgcuauucuugucacgaccguuacacugcacuuuaaacaguacgagugugacucuccugcaaacaaucaggugaucccaugcgaaccgauaacuaucgagagaaacauuaccgaaaucguauauuugacaaauaccacuauugagaaggaaaucugucccaaauuaguggaguacaggaacuggucaaagccucagugcaaaauaacaggguucgccccauuuaguaaggauaauagcauucggcuguccgcgggaggugacaucugggucacccgcgagcccuaugugucuugugauccuggcaagugcuaccaauucgcucuagggcagggaacgacucucgacaacaaacauucgaaugauaccauucacgaccgaacaccacaucguacucugcuuaugaacgaacugggcguucccuuucacuuggguaccagacagguguguaucgccuggucaagcaguuccugccaugaugggaaggcauggcuccacgucugugugacaggauaugacaaaaaugccaccgcuucuuucaucuacgauggcaggcugguagacagcauuggcuccuggucacagaacauacugcggacgcaagagagugaaugcguuuguaucaaugggacuugcacaguggucaugaccgauggaagcgcaucuggucgcgccgacacuaagauucucuuuaucgaggagggcaaaauagugcacauuuccccuuuaucagggagcgcucagcauguggaagagugcaguuguuauccaagauacccgggagucaggugcaucugucgggauaacuggaagggcucuaaucgccccguuguggacaucaacguaaaggacuacuccauugauagcucguaugugugcucuggucuggucggggacacaccucgaaacaaugauagauccucaaacaguuacuguaggaauccaaacaaugaaaaaggaaaccacggcgugaagggcugggccuucgacgaugggaaugacguuuggaugggacggaccaucagcgaggauucccguucugguuaugaaacguuuaaagugauuggcggguggagcacccccaacucaaaacuucagauaaaucgccaggucaucguggacagugauaacagauccggauacagcggcauuuucucuguagaggguaagucaugcaucaauagguguuuuuauguugaguugauccgggggcgagaacaagagacacgcgugugguggaccaguaacagcauugucguguucugcggcacuuccggaacauacggcacugggucuuggccugacggagcggauauaaaucugaugccaaucuga

SEQ ID NO: 142530 - RNA, 1410 nt, Artificial Sequence
  derived and/or modified CDS sequence (opt3) from neuraminidase__InfluenzaA__ABB04319
augaaccccaaucagaagaucauuaccauaggcagcgugucccugacaaucgccacuauuugcuuccucaugcaaaucgcuauucuugucacgaccguuacacugcacuuuaaacaguacgaguguucuucaccuccaaacaaucaggugaugccgugcgaacccacuaucauagagagaaacaucaccgaaauuguauauuugacaaauaccacuaucgagaaggaaauuuguccuaaauuaguggaguacaggaacuggaguaagccacagugcaaaaucacaggguucgcacccuuuagcaaggacaauuccauacggcugucugccggaggugauauuugggucacccgcgagccuuaugugucgugugacccaggcaagugcuaccaauucgcgcuagggcagggaacgacucucaacaaucgacauucaaacgauaccguucacgaccguacacccuauagaacucugcuuaugaaugaacugggcgugccuuuucauuuggguaccaaacaggucuguaucgcuuggagcaguuccucuugccacgaugggaaggccuggcuccauguguguguaacaggacacgacaaaaacgcaaccgccagcuucauuuacaauggcaggcugguugauuccaucggcucauggaguaagaacauccugcggacgcaggagagcgaaugcguguguauuaaugggacuugcacagucgugaugaccgacggaucugcuuccgagcgcgcagauacuaaaauacucuuuaucgaggaagguaagauugugcacaucucaccauuaagcggcagugcccaacaugucgaggaaugcucuuguuauccgagauaccccgggguuaggugcgugugucgggacaacuggaagggauccaaccgcccuauaguagauauuaaugugaaagacuacagcaucgucucgucuuaugugugcuccggccugguuggugauacaccacgaaagaacgacagaucaaguagcuccuacugucagaaucccaacaaugagaaagggucucacggagugaagggcugggcuuucgacgauggcaacgacgucuggauggggaggaccaucggagaggaacuucggagcgguuaugagacguuuaaagugauuggcggguggucaaccccuaauaguaaguugcagaucaaccgucagguaauuguugauuccggaaaucgcagcggcuacucugguauauucucaguggaagggaaaaguugcaucaacagauguuuuuaugucgagcugauuaggggccggaagcaagaaacacgagugugguggacuagcaauuccaucgucguguucugcggaaccucuggcacauacgggacuggaucguggccagacggugccgauaucaaccuaaugcccauuuga

SEQ ID NO: 142531 - RNA, 1410 nt, Artificial Sequence
  derived and/or modified CDS sequence (opt3) from neuraminidase__InfluenzaA__ABB04341
augaaccccaaucagaagaucauuaccauaggcagcgugucccugacaaucgccacuauuugcuuccucaugcaaaucgcuauucuugucacgaccguuacacugcacuuuaaacaguacgagugugacucuccugcaaacaaucaggugaugccaugcgaaccgaucauaaucgagagaaacauuacugaaaucguauauuugaccaauacaaccauugagaaggaaaucugucccaaauuaguggaguacaggaacuggucaaagccucagugcaaaauaacuggguucgccccauuuaguaaggauaauagcguccggcuguccgcgggaggugacauuugggugacacgcgagcccuauguuucuugugauccuggcaagugcuaccaauucgcucuagggcagggaaccacgcucgacaacaaacauucgaaugauacuauccacgaccgaaccccacaucguacacugcuuaugaacgaacugggcgugcccuuucacuuggguacuagacaggucuguauugccuggucaagcaguuccugccaugaugggaaggcauggcuccacguguguguaaccggauaugacaaaaaugccacagcuucuuucaucuacgauggcaggcugguugacagcaucggcuccuggucacagaacauucugcggacccaagagagugaaugcguguguauaaaugggacgugcacugucgugaugacagauggaagcgcaucuggucgcgccgacaccaagauccucuuuauugaggagggcaaaaucgugcacauauccccuuuaucagggagcgcucagcaugucgaagagugcaguuguuauccaagauacccgggaguuaggugcauuugucgggauaacuggaagggcucuaaucgccccgugguagacaucaacgugaaggacuacuccaucgauagcucguaugucugcucuggucuggugggggacacuccucgaaagaacgauagauccucaaauaguuacuguaggaacccaaauaacgaaaaaggaaaucacggcguuaaaggcugggccuucgacgaugggaacgacguguggaugggacggacaauuagcgaggauucccguucugguuaugaaaccuuuaaggucaucggcggguggagcacgcccaauucaaaacuucagauuaaccgccaggugauaguagacagugauaauagauccggauacagcggcaucuucucuguugaggguaagucaugcauuaacagguguuuuuauguggaguugauccgggggcgagaacaagagacccgcgucugguggacaaguaauagcaucguggucuucugcggcacuuccggaaccuacggcacagggucuuggccugacggagcggauauuaaccugaugccaauauga

SEQ ID NO: 142532 - RNA, 1410 nt, Artificial Sequence
  derived and/or modified CDS sequence (opt3) from neuraminidase__InfluenzaA__ABB04352
augaaccccaaucagaagaucauuaccauaggcagcgugucccugacaaucgccacuauuugcuuccucaugcaaaucgcuauucuugucacgaccguuacacugcacuuuaaacaguacgaguguucuucaccuccaaacaaucaggugaugccgugcgaacccaucauaaucgagagaaacauuacugaaaucguauauuugaccaauacaaccauugagaaggaaaucuguccuaaauuaguggaguacaggaacuggaguaagccacagugcaaaauaacuggguucgcacccuuuagcaaggacaauuccauucggcugucugccggaggugauaucugggucacacgcgagccuuaugugucgugugacccaggcaagugcuaccaauucgcgcuagggcagggaaccacgcucaacaauaaacauucaaacgauacuguucacgaccgaacccccuaucguacacugcuuaugaaugaacugggcgugccuuuucauuuggguacuaagcaggucuguauugcuuggagcaguuccucuugccacgaugggaaagccuggcuccauguguguguaaccggacacgacaagaacgcaacagccagcuucaucuacgauggcagacugguugacuccaucggcucauggaguaaaaauauucugaggacccaggagagcgaaugcguguguauaaacgggacgugcacugucgugaugacagauggaucugcuuccgagcgggcagacaccaagauccucuuuauugaggaagguaagaucgugcacauaucaccauuaagcggcagugcccaacaugucgaggaaugcucuuguuauccgcgcuaccccgggguuagaugcguguguagggauaauuggaaaggauccaaccggccuauuguagacaucaacgugaaggauuacagcaucgucucgucuuaugugugcuccggccugguuggugacacuccacgcaaaaaugaccgaucaaguagcuccuacuguagaaaccccaauaacgagaaggggucucacggagugaaaggcugggcuuucgaugacggcaaugaugucuggauggggaggacaauuggagaggaacuucggagcgguuaugagaccuuuaaggugaucggcggguggucaacgccuaacaguaaauugcagauuaaucgucagguaauaguugacuccggaaaccgcagcggcuacucugguaucuucucaguggaagggaagaguugcauuaauagauguuuuuaugucgagcugaucaggggccgggaacaggagacccgagugugguggacaagcaacuccaucgucguguucugcggaacuucuggcaccuacgggacaggaucguggccagauggugccgacauuaaucuaaugcccauauga

SEQ ID NO: 142533 - RNA, 1410 nt, Artificial Sequence
  derived and/or modified CDS sequence (opt3) from neuraminidase__InfluenzaA__ABB04374
augaaccccaaucagaagaucauuaccauaggcagcgugucccugacaaucgccacugucugcuuccucaugcaaauugcuauccuuguuacgaccgugacacugcacuuuaaacaguacgagugugacucuccugcaaacaaucagguaaugccaugcgaaccgauuaucauagagagaaacaucacugaaauuguguauuugaccaauacaaccaucgagaaggaaauuugucccaaauuagucgaguacaggaacuggucaaagccucagugcaaaaucacuggguucgccccauuuaguaaggauaauagcauacggcuguccgcgggaggugacauuugggugacacgcgagcccuauguuucuugugauccuggcaagugcuaccaauucgcucuagggcagggaaccacgcucgacaacaaacauucgaaugauacuauccacgaccgaaucccacaucguacccugcuuaugaacgaacugggcgugcccuuucacuuggguacaagacaggucuguauugccuggucaagcaguuccugccaugaugggaaggcauggcuccacguguguguaacuggagacgaugagaaugccaccgcuucuuucaucuaugacggcaggcugguugauagcauuggcuccuggucacagaacauacugcggacacaagaaagugagugcguguguaucaaugggaccugcacggucgugaugacugacggaagcgcaucuggucgcgccgauacaaggauucucuuuaucgaggaaggcaaaauagugcacauuuccccuuuaucagggagcgcucagcaugucgaggaaugcaguuguuacccaagauauccgggaguucggugcaucugucgcgacaacuggaagggcucuaaucgacccgugguagacaucaacgugaaagauuacuccauugacagcagauacgucugcucgggucuggugggggauaccccuaggaacaaugacaagucuuccaacucaaauugucggaacccaaauaacgauaagggaaaucacggcguuaaaggcugggccuucgacgaugggaacgacguguggaugggacguacuaucaguaaggauagccgcuccgguuaugagacauuuaaagucauuggcggguggucuacccccaauagcaagucacagauaaacagacaggugaucguagacagugauaauagguccggauacagcggcauuuucucuguugaagguaaaucaugcaucaaccgguguuuuuauguggagcuuauccgagggcgcgagcaagaaacgaaggucugguggaccaguaauagcauuguggucuucugcggcacauccggaacuuacggcaccgggucuuggccugacggagcggacauaaacuugaugccaaucuga

SEQ ID NO: 142534 - RNA, 1410 nt, Artificial Sequence
  derived and/or modified CDS sequence (opt3) from neuraminidase__InfluenzaA__ABB04931
augaaccccaaucagaagaucauuaccauaggcagcgugucccugacaaucgccacuauuugcuuccucaugcaaaucgcuauucuugucacgaccguuacacugcacuuuaaacaguacgagugugacucuccugcaaacaaucaggugaugccaugcgaaccgaucauaaucgagagaaacauuacugaaaucguauauuugaccaauacaaccauugagaaggaaaucugucccaaauuaguggaguacaggaacuggucaaagccucagugcaaaauaacuggguucgccccauuuaguaaggauaauagcauucggcuguccgcgggaggugacaucugggucacacgcgagcccuaugugucuugugauccuggcaagugcuaccaauucgcucuagggcagggaaccacgcucgacaacaaacauucgaaugauacuauucacgaccgaaccccacaucguacacugcuuaugaacgaacugggcguucccuuucacuuggguacuagacagguguguaucgccuggucaagcaguuccugccaugaugggaaggcauggcuccacgucugugugaccggauaugacaaaaaugccacagcuucuuucaucuacgauggcaggcugguagacagcauuggcuccuggucacagaacauacugcggacccaagagagugaaugcguuuguaucaaugggacgugcacuguggucaugacagauggaagcgcaucuggucgcgccgacaccaagauucucuuuaucgaggagggcaaaauagugcacauuuccccuuuaucagggagcgcucagcauguggaagagugcaguuguuauccaagauacccgggagucaggugcaucugucgggauaacuggaagggcucuaaucgccccguuguggacaucaacguaaaggacuacuccauugauagcucguaugugugcucuggucuggucggggacacuccucgaaacaaugauagauccucaaguagcuacuguaggaacccaaauaacgaaaaaggaaagcacggcgugaaaggcugggccuucgacgaugggaaugacguuuggaugggacggacaaucuccgaggauucucguagcgguuaugaaaccuuuaaggugauuggcggguggucaacgcccaacaguaaacuucagauaaaucgccaggucaucguggacuccgauaacagaagcggauacucuggcauuuucucaguagaggguaagaguugcaucaauagguguuuuuauguugaguugauccgggggcgagaacaagagacccgcgugugguggacaagcaacuccauugucguguucugcggcacuucuggaaccuacggcacagggucguggccugacggagcggauauaaaucugaugccaaucuga

SEQ ID NO: 142535 - RNA, 1410 nt, Artificial Sequence
  derived and/or modified CDS sequence (opt3) from neuraminidase__InfluenzaA__ABB04942
augaaccccaaucagaagaucauuaccauaggcagcgugucccugacaaucgccacuauuugcuuccucaugcaaaucgcuauucuugucacgaccguuacacugcacuuuaaacaguacgaguguucuucaccuccaaacaaucaggugaugccgugcgaacccaucauaaucgagagaaacauuacugaaaucguauauuugaccaauacaaccauugagaaggaaaucuguccuaaauuaguggaguacaggaacuggaguaagccacagugcaaaauaacuggguucgcacccuuuagcaaggacaauuccauucggcugucugccggaggugauaucugggucacacgcgagccuuaugugucgugugacccaggcaagugcuaccaauucgcgcuagggcagggaaccacgcucaacaauaaacauucaaacgauacuauucacgaccgaacccccuaucguacacugcuuaugaaugaacugggcguuccuuuucauuuggguacuaaacagguguguaucgcuuggagcaguuccucuugccacgaugggaaggccuggcuccaugucugugugaccggacacgacaagaacgcaacagccagcuucaucuacgauggcagacugguagacuccauuggcucauggaguaaaaauauacugaggacccaggagagcgaaugcguuuguaucaacgggacgugcacuguggucaugacagauggaucugcuuccgagcgggcagacaccaagauucucuuuaucgaggaagguaagauagugcacauuucaccauuaagcggcagugcccaacauguggaggaaugcucuuguuauccgcgcuaccccggggucagaugcguuuguagggauaauuggaaaggauccaaccggccuaucguggacaucaacguaaaggauuacagcauugugucgucuuaugucugcuccggccuggugggugacacuccacgcaaaaaugaccgaucaaguagcuccuacuguagaaaccccaauaacgagaaggggaaucacggaguuaaaggcugggcuuucgaugacggcaacgauguguggauggggaggacaaucggagaggaacuucggucugguuaugagaccuuuaaggucauuggcggguggagcacgccuaauucaaaauugcagauaaaccgucaggugaucguagacagugauaaucgcuccggauacagcggcauuuucucuguugaagguaagucaugcaucaacagauguuuuuauguggagcugaucagggggcgggaacaggagacccgagucugguggacaaguaauagcauuguggucuucugcggcacuuccggaaccuacggcacagggucuuggccagacggagccgauauaaaccuaaugcccaucuga

SEQ ID NO: 142536 - RNA, 1410 nt, Artificial Sequence; identical to SEQ ID NO: 142532
  derived and/or modified CDS sequence (opt3) from neuraminidase__InfluenzaA__ABB04953

SEQ ID NO: 142537 - RNA, 1410 nt, Artificial Sequence; identical to SEQ ID NO: 142430
  derived and/or modified CDS sequence (opt3) from neuraminidase__InfluenzaA__ABB04975

SEQ ID NO: 142538 - RNA, 1410 nt, Artificial Sequence; identical to SEQ ID NO: 142228
  derived and/or modified CDS sequence (opt3) from neuraminidase__InfluenzaA__ABB04986

SEQ ID NO: 142539 - RNA, 1410 nt, Artificial Sequence
  derived and/or modified CDS sequence (opt3) from neuraminidase__InfluenzaA__ABB04997
augaaccccaaucagaagaucauuaccauaggcagcgugucccugacaaucgccacuauuugcuuccucaugcaaaucgcuauucuugucacgaccguuacacugcacuuuaaacaguacgaguguaacucuccuccaaauaaccaggugauguugugcgaaccgacuaucauagagagaaauaucaccgaaauuguacauuuaacaaacaccacuaucgagaaggaaauuugucccaaacuggcagaguauaggaauuggucaaagccucagugcaacaucacaggguucgccccauuuaguaaagacaauagcauacggcuauccgcgggaggugauauuugggugacccgcgagcccuacgucucuugugacccugauaagugcuaucaauucgcucucggccaggggacgacucugaacaauggacacucgaacgacaccgugcaugaucgaacaccauaccguacucuucugaugaaugaauugggcguucccuuucaccucgguaccaaacagguguguaucgccuggucaagcaguuccugccaugacgggaaggcauggcugcacgucugugugacaggagaugacgagaacgccaccgcuucuuucauuuauaauggcagacugguagauagcaucggcuccuggucaaagaaaauccucaggacgcaggaaagugagugcguuuguauuaacgggacuugcacaguggucaugaccgacggaagcgcaucugguaaggccgauacuaaaauauuauuuaucgaggaaggcaagauugugcacacaucccugcuuucagggagcgcucaacauguggaggaaugcaguuguuacccucgguauccaggaguccgcugcguuuguagagacaacuggaagggcucuaauaggccgaucguggauauaaacguaaaagacuacuccauugugagcucguacgucugcucugguuuggugggggacacuccccggaagaaugauuccucaaguagcucccacugucuggacccuaacaaugaggaaggaggccauggcguuaaagggugggccuucgaugacggaaacgauguguggaugggucgcacgaucucugagaagcuacgaagcggcuaugagaccuuuaaagucaucgaaggguggucaaagccaaauaguaaacuccagauuaacagacaggugaucguagacaggggaaaucgguccggcuacagcgguauuuucucuguugaggggaagucaugcauaaaccguuguuuuuauguggaacugauccgcggcagaaagcaggagacagaaguccuuuggaccaguaauagcauuguggucuucugcggaaccuccggcacauacgggacuggaucuuggcccgauggugcggacaucaaccugaaaccuaucuga

SEQ ID NO: 142540 - RNA, 1410 nt, Artificial Sequence; identical to SEQ ID NO: 142301
  derived and/or modified CDS sequence (opt3) from neuraminidase__InfluenzaA__ABB05008

SEQ ID NO: 142541 - RNA, 1410 nt, Artificial Sequence; identical to SEQ ID NO: 142109
  derived and/or modified CDS sequence (opt3) from neuraminidase__InfluenzaA__ABB05186

SEQ ID NO: 142542 - RNA, 1410 nt, Artificial Sequence; identical to SEQ ID NO: 142301
  derived and/or modified CDS sequence (opt3) from neuraminidase__InfluenzaA__ABB05219

SEQ ID NO: 142543 - RNA, 1410 nt, Artificial Sequence
  derived and/or modified CDS sequence (opt3) from neuraminidase__InfluenzaA__ABB46395
augaaccccaaucagaagaucauuaccauaggcagcgugucccugacaaucgccacuauuugcuuccucaugcaaaucgcuauucuugucacgaccguuacacugcacuuuaaacaguacgagugugacucuccugcaaacaaacaggugaugccaugcgaaccgaucauaaucgagagaaauauuacugaaaucguauauuugaccaacacaaccauugagaaggaaaucugucccaaguuaguggaguacaggaauuggucaaaaccucagugcaagauaacuggguucgccccauuuaguaaggauaacagcauucggcuguccgcgggaggugacaucugggucacacgcgagcccuaugugucuugugauccuggcaaaugcuaccaauucgcucuagggcagggaaccacgcucgacaauaagcauucgaacgauacuauucacgaccgaaccccacaucguacacugcuuaugaaugaacugggcguucccuuucacuuggguacuagacagguguguaucgccuggucaagcaguuccugccaugaugggaaagcauggcuccacgucugugugaccggauaugacaagaacgccacagcuucuuucaucuacgauggcaggcugguagacagcauuggcuccuggucacagaauauacugcggacccaagagagugaaugcguuuguaucaacgggacgugcacuguggucaugacagauggaagcgcaucuggucgcgccgacaccaaaauucucuuuaucgaggagggcaagauagugcacauuuccccuuuaucagggagcgcucagcauguggaagagugcaguuguuauccaagauacccgggagucaggugcaucugucgggauaauuggaagggcucuaaccgccccguuguggacaucaauguaaaagacuacuccauugauagcucguaugugugcucuggucuggucggggacacuccucgaaacaacgauagauccucaaguagcuacuguaggaauccaaacaaugaaaagggaacacacggcgugaaaggcugggccuucgacgaugggaacgacguuuggaugggacggaccaucuccgaggauucucguagcgguuaugaaacguuuaaggugauuggcggguggucaacccccaauaguaaacuucagauaaaccgccaggucaucguggacuccgauaauagaagcggauacucuggcauuuucucaguagaggguaagaguugcaucaacagguguuuuuauguugaguugauccgggggcgagaacaagagacacgcgugugguggacuagcaauuccauugucguguucugcggcaccucuggaacauacggcacugggucguggccugacggagcggauauaaaccugaugccaaucuga

SEQ ID NO: 142544 - RNA, 1410 nt, Artificial Sequence; identical to SEQ ID NO: 142088
  derived and/or modified CDS sequence (opt3) from neuraminidase__InfluenzaA__ABB46417

SEQ ID NO: 142545 - RNA, 1410 nt, Artificial Sequence
  derived and/or modified CDS sequence (opt3) from neuraminidase__InfluenzaA__ABB46428
augaaccccaaucagaagaucauuaccauaggcagcgugucccugacaaucgccacuauuugcuuccucaugcaaaucgcuauucuugucacgaccguuacacugcacuuuaaacaguacgaguguaacucuccuccaaauaaccaggugauguugugcgaaccgacuaucauagagagaaauaucaccgaaauuguauauuuaacaaacaccacuaucgagaaggaaauuugucccaaacuggcagaguacaggaauuggucaaagccucagugcaacaucacaggguucgccccauuuaguaaagacaauagcauacggcuauccgcgggaggugauauuugggugacccgcgagcccuaugucucuugugacccugauaagugcuaccaauucgcucucggccaggggacgacucugaacaauggacauucgaacgacaccgugcacgaucgaacaccauaucguacucuucugaugaaugaauugggcguucccuuucaucucgguaccaaacagguguguaucgccuggucaagcaguuccugccacgacgggaaggcauggcugcaugucugugugacaggagaugacgagaacgccaccgcuucuuucauuuacaauggcagacugguagauagcaucggcuccuggucaaagaaaauccucaggacgcaggaaagugagugcguuuguauuaacgggacuugcacaguggucaugaccgacggaagcgcaucugguaaggccgauacuaaaauauuauuuaucgaggaaggcaagauugugcacaucuccccucugucagggagcgcucaacacguggaggaaugcaguuguuauccacgguacccgggaguccgcugcguuuguagagacaacuggaagggcucuaauaggcccauaguggauauuaacguaaaagacuacuccaucgugagcucguaugucugcucuggucuugugggggacacaccucggaagaaugauuccuucucaaguagccauuguuuggacccaaacaaugaggaaggaggccacggcguuaaagggugggccuuugaugacggaaacgauguguggaugggucgcaccaucuccgagaagcugcgaucuggcuacgagacguucaaagucauugaaggguggagcaagcccaauucaaaacuacagaucaacagacaggugauuguagacaggggaaaucggaguggcuauuccgguauauuuagcguugaggggaagucuugcaucaaccguuguuucuacguggaacucauucgcggcagaaaggaggaaaccgaggucugguggacaucaaauaguaucguggucuuuugcggaacuagcggcaccuaugggacaggauccuggccugauggugcggacaucaaccugaugccaauuuga

SEQ ID NO: 142546 - RNA, 1410 nt, Artificial Sequence
  derived and/or modified CDS sequence (opt3) from neuraminidase__InfluenzaA__ABB46439
augaaccccaaucagaagaucauuaccauaggcagcgugucccugacaaucucuacuauuugcuucuuuaugcaaaucgccauucucaucacgaccgucacacuucacuucaaacaguacgaguuuaacucaccuccaaauaaccagguuaugcugugugaaccgacuauaaucgagagaaauauuaccgaaaucguguauuugacaaacaccacuauugagaaggaaaucugccccaaauuagcugaguacaggaauuggaguaagccucagugugacauaacaggguucgcaccauuuagcaaagauaacuccauucggcugucugccggaggugacaucuggguaacccgcgagcccuaugugucgugcgauccugacaaguguuaccaauucgcgcuaggccaggggacgacucucaauaacguccauucaaaugauaccgugcacgaccgaacaccauaucguacucugcuuaugaacgaacugggaguucccuuucauuugggcaccaaacaggugugcauugcuuggagcaguuccucuugucacgaugguaaggccuggcuccaugucugcgugacaggggacgauaagaaugcaaccgccagcuucaucuacaacggaagacugguagacuccaucguuucauggaguaaagagauucugaggacgcaggaaagcgagugugugugcauaaauggcgcuuguacugucgugaugacagauggcucugcauccgggaaggccgacaccaaaauccucuuuauugaggaacggcgcaucgugcacacuucaacauuaagcggaagugcucaacacgucgaggaaugcucuugcuauccuagauacccagguguuaggugugugugccgggauaacuggaagggcuccaaccgcccgauaguagacauuaauaucaaggacuacagcaucgugucgucuuaugucuguuccgggcuggugggagauacgccccggaaaaacgacucaaguagcuccucuaauugccuugauccuaacaaugaggaaggcggucaugggguuaagggaugggccuucgacgauggcaacgacguguggaugggcagaaccauuagcgagaaauugaggucaggguacgagaccuuuaaggucaucgaaggauggaguaauccaaacuccaaacugcagauuaaucgacaggugauaguagaucgugguaaccgcagcggcuauucugggaucuucucaguugagggaaagaguuguauuaauagaugcuuuuacguggaacuaaucaggggccggaaagaggaaacagagguccucuggacuagcaacuccaucguggucuucugugguaccucuggggcguauggcacaggaucguggcccgacggcgcagauauuaaucugaugccuauauga

SEQ ID NO: 142547 - RNA, 1410 nt, Artificial Sequence; identical to SEQ ID NO: 142394
  derived and/or modified CDS sequence (opt3) from neuraminidase__InfluenzaA__ABB46450

SEQ ID NO: 142548 - RNA, 1410 nt, Artificial Sequence; identical to SEQ ID NO: 142375
  derived and/or modified CDS sequence (opt3) from neuraminidase__InfluenzaA__ABB46461

SEQ ID NO: 142549 - RNA, 1410 nt, Artificial Sequence
  derived and/or modified CDS sequence (opt3) from neuraminidase__InfluenzaA__ABB46550
augaaccccaaucagaagaucauuaccauaggcagcgugucccugacaaucgccacuauuugcuuccucaugcaaaucgcuauucuugucacgaccguuacacugcacuuuaaacaguacgaguguucuucaccuccaaacaaucaggugaugccgugcgaacccaucauaaucgagagaaacauuacugaaaucguauauuugaccaauacaaccauugagaaggaaaucuguccuaaauuaguggaguacaggaacuggaguaagccacagugcaaaauaacuggguucgcacccuuuagcaaggacaauuccauucggcugucugccggaggugauaucugggucacacgcgagccuuaugugucgugugacccaggcaagugcuaccaauucgcgcuagggcagggaaccacgcucgauaacaaacauucaaaugacacuauucacgaucgaacaccccaucguacccugcuuaugaacgaacugggcguuccuuuucacuuggguacuagacagguguguaucgcuuggagcaguuccucuugccaugacgggaaggccuggcuccacgucugugugaccggauaugauaaaaaugcaacagccagcuucaucuacgacggcaggcugguagauuccauuggcucauggaguaagaacauacugcggacccaggagagcgaaugcguuugugugaaugggacgugcacugucgugaugacagacggaucugcuuccgagcgcgcagauaccaaaauccucuuuauugaggaagguaagaucgugcacauaucaccauuaagcggcagugcccaacaugucgaggaaugcucuuguuauccgagauaccccgggguuaggugcgugugucgggacaacuggaagggauccaaucgcccuguaguggauauuaacgucaaagacuacagcaucgugucgucuuauguuugcuccggccuggugggugacacuccacgaaagaacgauagaucaaguagcuccuacuguaggaaucccaacaaugagaaagggaaccacggagucaagggcugggcuuucgacgauggcaaugacguguggauggggcggacaaucucugaagagagccguucaggauaugagaccuuuaaaguaauugguggcuggaguacgccuaacuccaagagccagaucaaucgccagguuauuguggauucugggaacagaucaggauacaguggcauauucagcgucgaagguaaauccugcaucaauagguguuuuuauguggagcuuauucgggggcgagaacaggagacccgcgucugguggacaucuaacucgaucgugguuuucugcggcacuagcggaaccuacggcacaggguccuggccagacggagccgauaucaauuugaugcccauuuga

SEQ ID NO: 142550 - RNA, 1410 nt, Artificial Sequence
  derived and/or modified CDS sequence (opt3) from neuraminidase__InfluenzaA__ABB51955
augaaccccaaucagaagaucauuaccauaggcagcgugucccugacaaucucuacuauuugcuucuuuaugcaaaucgccauucucgucacgaccguuacacuucacuucaaacaguacgaguguaacucaccuccaaauaaccaggugaugcugugcgaaccgacuaucauagagagaaauaucaccgaaauuguauauuugacaaacaccacuaucgagaaggaaauuugucccaaauuagcugaguacaggaauuggaguaagccucagugcaacaucacaggguuugcaccauucagcaaagacaauuccauacggcugucugccggaggugauauuugggugacccgcgagcccuaugucucgugugacccugauaagugcuaccaauuugcgcuaggccaggggacgacucucaacaauggacauucaaacgacaucgugcacgaucgaaccccauaucguacacugcuuaugaaugaacugggcguucccuuccauuuggguacuaaacagguguguauugcuuggagcaguuccucuugccacgacgggaaggccuggcuccaugucugugugaccggagaugacgagaacgcaacagccagcuuuaucuacaauggcagacugguagauuccaucggcucauggaguaagaaauucuuuaggacccaggaaagcgagugcguuuguauucacgggacgugcacuguggucaugacagacggaucugcuucccggaaggcagauaccaaaauacuguucaucgaggaagguaagauugugcacacuucaacacucagcggcagugcccaacauguggaggaaugcucuuguuauccucgcuacccaggggucagaugcguuuguagggacaacuggaagggauccaaccggccgaucguggauauaaauauuaaagacuacagcaucguaucgucuuaugugugcuccggcuuagucggugacacgccccgcaagaacgauucaaguagcuccucucacugucuggacccuaauaacgaggaagggggacauggcgugaaaggcugggcuuuugaugacgggaaugauguuuggaugggacgaaccaucagcgagaaacuuagaucagguuacgagaccuucaaggugauugaaggcuggaguaagccaaacuccaaauugcagaucaauaggcaggucauuguggaccgggggaaccguagcggauauucuggcauauuuucaguagaggguaagaguugcaucaaucgcuguuucuacguugaacugauuagagggaggaagcaggagacagaagugcuauggacuagcaacuccaucgucguguucugcggcaccucuggaacauauggcacugggucguggcccgauggagccgacaucaaucucaugccuauuuga

SEQ ID NO: 142551 - RNA, 1413 nt, Artificial Sequence
  derived and/or modified CDS sequence (opt3) from neuraminidase__InfluenzaA__ABB51956
augaaccccaaucagaagaucauuaccauaggcagcaucuccauugccaucgggauuaucucucugaugcuccaaauaggaaacaucauuucaaucugggcuagucacagcauucagacagguucccagaaucauacuggcgugugcaaccagagaaucauaacguacgaaaauucuaccugggucaaccacacauauguuaauauuaacaauacuaacgugaucgcagggaaagacaagaccucgguaacaguggccggaaauucaagccuuuguaguauuuccggcugggcgaucuacaccaaagauaacucuaucaggauugguagcaagggggacgucuucgugauacgggagccuuuuaucuccugcucacaucuggagugucgcacuuucuuuuugacacaaggagcuuuacugaaugauaaacacaguaacggcaccguuaaggaccgaagcccauaucgugcccuaaugucuugcccgcucggcgaagcacccuccccuuacaauucaaaguucgagagcguggccuggagugcuucugcaugucaugaugggaugggauggcugacgauugguaucuccggcccagacaacggggccgucgcugugcuuaaauauaacggaauaauuacugaaaccaucaagagcuggaaaaagcccauccugggcacacaggagucggaguggguaugcguuaaugguucuuguuuuacuauuaugaccgaugacccuuccuacgaagccgcgucauauaaaaucuucaagauugagagagaaagggugacaaagaguauagaguugaacgcaccaaauuuucacuacgaggaaugcagcuguuaccccgauaccgggacggucaugugcgugugucgggacaacuggcacggauccaaucgcccuugggugucuuucaaccagaaucucgauuaucagaucggcuacauuugcagcggcgucuuuggggacaacccaagaccgaaagauggagaggguucaugcaaucccguuacuguggacggcgccaacgggguaaagggauucaguuauaaauacggcaaugguguguggaucgggaggacaaaguccaaccggcugcgcaaaggcuuugaaaugaucugggacccuaauggauggaccgauacugacagcgauuucucugucaagcaagacgugguugcuauuacagauuggucaggcuauagugggagcuuugugcagcauccagagcugaccggacucgacuguauacgacccugcuucugggucgaauuagugagaggucugccuaaagagaacacgaccaucuggacauccgggucuucgauuagcuucuguggcguaaauuccgauacugccaacuggucauggccagacggagcagagcuucccuuuaccaucgauaaguga

SEQ ID NO: 142552 - RNA, 1410 nt, Artificial Sequence
  derived and/or modified CDS sequence (opt3) from neuraminidase__InfluenzaA__ABB51957
augaaccccaaucagaagaucauuaccauaggcagcgugucccugacaaucgccacuauuugcuuccucaugcaaaucgcuauucuugucacgaccguuacacugcacuuuaaacagcaugaguguaacucuccuccaaauaaccaggugauguugugcgaaccgacuaucauagagagaaauaucaccgaaauuguauacuuaacaaacaccacuaucgagaaggaaauuugucccaaacuggcagaguauaggaauuggucaaagccucagugcaacaucacaggguucgccccauuuaguaaagacaauagcauacggcuauccgcgggaggugauauuugggugacccgcgagcccuacgucucuugugacccugauaagugcuaucaauucgcucucggccaggggacgacucugaacaauggacacucgaacgacaccgugcgagaucguacaccauacagaacucuucugaugaaugaauugggcguucccuuucaucucgguacccgacagguguguaucgccuggucaagcaguuccugccacgacgggaaggcauggcugcaugucugugugacaggagaugacaaaaacgccaccgcuucuuucauuuauaauggccggcugguagauagcaucggcuccuggucaaagaaaaucuuucgcacgcagaaguucgagugcguuuguauucacuggacuugcacaguggucaugaccgacgggagugcaagcggaaaagccgauacuaagauacucuuuaucgaagaggguaagauugugcacaucucuacauuauccggcucagcucaacauguggaggaaugcagcuguuacccuagauauccaggggucaggugcguuugucgggacaacuggaaaggaaguaaccgcccgauaguggauauuaauguaaaggacuacucuaucguguccagcuacgucugcucgggccuggugggugacacccccaggaaaaacgauucuuucuccucaagucacugucuugacccuaauaacgaggaagggggacauggcguuaagggcugggccuuugaugacgggaaugauguguggaugggaagaacgaucagcgagaaauugagguccgguuaugaaaccuucaaggucauugagggcuggucuaaaccaaacagcaagcugcagaucaaucgucaggugauuguagagcgggggaaccgcucaggauacaguggcauauuuuccguugaagguaagagcugcaucaauagauguuucuauguggagcuaauuagggggcggaaagaagagacagaagucugguggacuucuaacucaaucguggucuucugcggcaccaguggaacauacggcacugggagcuggcccgacggagcggauaucaaucucaugccuauuuga

SEQ ID NO: 142553 - RNA, 1413 nt, Artificial Sequence
  derived and/or modified CDS sequence (opt3) from neuraminidase__InfluenzaA__ABB51958
augaaccccaaucagaagaucauuaccauaggcagcaucuccauugccaucgggauuaucucucugaugcuccaaauaggaaacaucauuucaaucugggcuagucacagcauucagacagguucccagaaucauacuggcgugugcaaccagagaaucauaacguacgaaaauucuaccugggucaaccacacauauguuucgauuaauaacacuaaugugaucgcagggaaagacaagaccucaguaacacuugccggaaacagcagucuguguccuauuaggggcugggcgaucuacaccaaagguaauuccauccggauugggucuaagggagauguguucgucauacgcgagccauuuaucagcugcucccauuuggagugucgaacuuucuuuuuaacacaaggcgcucugcuaaacgacaaacacucaaauggcaccgugaaggaucguaguccguauagagcccucaugagcugcccccugggggaagcaccuucuccauacaacuccaaguucgagucaguugccuggagcgcuagugcaugucaugacggaauggguuggcuuacgauuggcaucucugggcccgauaauggagccguggcuguccugaaauauaacggcauaauuacugaaaccaucaaguccuggaaaaagcagaucuugaggacacaggagagcgagugcguguguguaaacgguucgugcuuuacuauuaugaccgacgggccuucuaauggagccgcguccuacaaaaucuucaagauugaaaagggcaaaguuacaaagucaauagagcucaacgcaccaaauuuucacuaugaagaguguagucgguaccccgauaccggcacggugaugugcgucugucgcgacaacuggcacgggagcaauagaccuuggguguccuucaaccagaaucuggauuaccaaaucggauauauuugcucugguguguuuggcgacaacccaaggccgaaagauggggagggaagcugcaaucccgucacuguugacggcgccaacggugugaagggguucucauacaaauauggcaauggaguaggcaucgggcggacaaucaguaaccgccugcgaaagggauuugaaaugauuugggauccuaaugguuggaccgacacugacuccgauuucagcgugaaacaggacgucguggcuauaacagauuggucuggcuacucagggaguuuuguucagcauccagagcucaccggauuagacuguaucagacccugcuucuggguggaacuggucaggggccuuccuaaggagaacacgaccauuuggacaagcgguuccucuaucucguucuguggggugaauagcgauacugccaacugguccuggccagacggcgcagaauugcccuuuaccauugauaaguga

SEQ ID NO: 142554 - RNA, 1410 nt, Artificial Sequence
  derived and/or modified CDS sequence (opt3) from neuraminidase__InfluenzaA__ABB51959
augaaccccaaucagaagaucauuaccauaggcagcgugucccugacaaucucuacuauuugcuucuuuaugcagaucgccauucucaucacgaccgucacacuucacuucaaacaguacgaguuuaacucaccuccaaauaaccagguuaugcugugugaaccgacuauaaucgagagaaauauuaccgaaaucguguauuugacaaacaccacuauugagaaggaaaucugccccaaauuagcugaguacaggaauuggaguaagccucagugugacauaacaggguucgcaccauuuagcaaagauaacuccauucggcugucugccggaggugacaucuggguaacccgcgagcccuaugugucgugcgauccugacaaguguuaccaauucgcgcuaggccaggggacgacucucaauaacguccauucaaaugauaccgugcacggacgaacaccauaucguacucugcuuaugaacgaacugggcguucccuuucauuuggguaccaaacaggugugcauugcuuggagcaguuccucuugucacgacgggaaggccuggcuccaugucugcgugacaggagaugacaagaaugcaaccgccagcuucaucuacaacggcagacugguagauuccaucguuucauggaguaaagagauucugaggacgcaggaaagcgagugugugugcauaaauggcacuuguacagucgugaugaccgacgggucugcuuccggaaaggcagauacuaaaauccucuuuaacgaggaagguaagauugugcacacaucaaccugcagcggcagugcccaacacgucgaggaaugcucuuguuauucccgguacccugggguucgcugcguguguagagacaacuggaagggaagcaauaggccaaucguagauauaaacauuaaagacuacucgaucgugucuuccuaugucugcucaggcuuagugggugacacgccgcggaagaaugauaguagcuccucuagccauugucuggaccccaacaaugaggaagggggacacggcguuaaaggccgcgcuuucgaugacgggaacgauguguggaugggacgaaccaucucagagaaacuuagaagugguuacgagacauuuaaggucauugaaggcugguccaauccuaacagcaaguugcagaucaauaggcaagugauuguagaccgggggaaccguucuggauauucaggcauauucaguguugaggguaaaagcugcaucaaucgcuguuuuuacguggaacugauuagagggaggaaggaggaaacugagguccuauggaccuccaacucuaucguggucuucugcggcacaucgggaacuuauggcaccgggagcuggccagauggagccgacaucaaucucaugcccauuuga

SEQ ID NO: 142555 - RNA, 1413 nt, Artificial Sequence
  derived and/or modified CDS sequence (opt3) from neuraminidase__InfluenzaA__ABB51960
augaaccccaaucagaagaucauuaccauaggcagcaucuccauugccaucgggauuaucucucugaugcuccaaauaggaaacaucauuccuaucugggcuucacacaguauucagacagguagccagaaucauacuggcgugugcaaccagagaaucauaacguacgaaaauuccaccugggucaaccacacauauguuaauauuaacaauacuaacgugaucgcagggaaagacaagaccucuguaacacuugccggaaauucgucacuguguagcauuaguggcugggcgaucuacaccaaagauaacuccaucaggauugguucuaagggggacguguucgucauacgggagccauuuaucagcugcucccauuuggagugucgcacuuucuuuuuaacacaaggagcucugcuaaaugauaaacacucaaacggcaccgugaaggaccgaaguccguaucgugcccucaugagcugcccccugggcgaagcaccuucuccauacaauuccgaguucgaaucaguugccuggagcgcuagugcaugucaugaugggaugggauggcuuacgauugguaucucuggccccgacaacggggccguggcuguccugaaguauaacggaauaauuacugagaccaucaaauccuggaagaaacagaucuugagaacacaggagagcgaaugcguguguguaaauggcucgugcuuuacuauuaugaccgaugguccuucuaacggggccgcguccuacaagaucuucaaaauugagaagggaaagauaacaaaaucaaucgaacucaaugcaccaaacagucacuaugaggaguguagcugcuaccccgacaccggcacgguuaugugugugugcagggauuccuggcacggcucuaaucggccuugggucagcuuuaaccagaaucuggacuaccaaauuggguauaucugcucaggaguguucggugauaacccacgcccgaaggacggcgaagggaguuguaaucccgugacugucgauggagccaacggcguuaaagguuuuuccuacgaguaugggaauggcgacuggaucggaagaacaaagagcaacaggcugcggaaaggcuucgaaaugauuugggacccugauggguggaccgacacuaauucugauuuuucagugaagcaggacguaguggcuauaacagauuggaguggauacagcgguuccuucguccagcauccagagcucaccggcuuagugugcauccgccccuguuuuuggguugaacuggugcgagggcuuccuaaagagaacacgaccauuuggacaucuggaucgagcaucuccuucugcggcgucaauucagacacugccaacuggaguuggccagauggugcagaguugcccuucaccauugacaaguga

SEQ ID NO: 142556 - RNA, 1410 nt, Artificial Sequence; identical to SEQ ID NO: 142391
  derived and/or modified CDS sequence (opt3) from neuraminidase__InfluenzaA__ABB53617

SEQ ID NO: 142557 - RNA, 1410 nt, Artificial Sequence
  derived and/or modified CDS sequence (opt3) from neuraminidase__InfluenzaA__ABB53721
augaaccccaaucagaagaucauuaccauaggcagcgugucccugacaaucucuacuauuugcuucuuuaugcaaaucgccauucucaucacgaccgucacacuucacuucaaacaguacgaguuuaacucaccuccaaauaaccagguuaugcugugugaaccgacuauaaucgagagaaauauuaccgaaaucguguauuugacaaacaccacuauugagaaggaaaucugccccaaauuagcugaguacaggaauuggaguaagccucagugugacauaacaggguucgcaccauuuagcaaagauaacuccauucggcugucuucgggaggugacaucuggguaacccgcgagcccuaugugucaugcgauccugacaaguguuaccaauucgcccuaggccaggggacgacucucaauaacguccauagcaaugauaccgugcacgaccgaacaccauaucguacucugcuuaugaacgaacugggaguucccuuucauuugggcaccaaacaggugugcauugcguggaguuccucuagcugucacgaugguaaggcuuggcuccaugucugcgugacaggggacgauaagaaugccaccgcauccuucaucuacaacggaagacugguagacucaaucguuaguuggagcaaagagauucugaggacgcaggaaucugagugugugugcauaaauggcacuuguacagucgugaugaccgauggcuccgccucagggaaggcugacacuaaaauccucuuuauugaggaaggaaagaucgugcacacaagcaccuuaagugguucugcacaacacgucgaggaaugcuccugcuauccucgguacccaggcguucgcugugugugcagagauaacuggaaggggagcaacaggccgauaguagacauuaauaucaaagacuacucgaucgugucuuccuaugucuguucaggacuggugggcgauacgccccggaagaacgacaguagcuccucuagccauugccuugauccuaauaacgaggaaggugggcacggaguuaaaggcugggccuucgacgauggcaaugacguguggauggggcgcaccauuucagagaaguugcgaaguggauacgagacauuuaaagucaucgaagguugguccaacccaaauagcaagcugcagauuaacagacaggugauaguagauaggggcaaucggucuggguauucaggaaucuucaguguugagggcaaaagcuguauuaaccguugcuuuuacguggaacuaauccgcgguagaaaggaggaaacugagguccucuggaccuccaauucuaucguggucuucugugggacaucgggcacuuauggaaccggcagcuggcccgacggggcugauauuaaccugaugccuauauga

SEQ ID NO: 142558 - RNA, 1410 nt, Artificial Sequence
  derived and/or modified CDS sequence (opt3) from neuraminidase__InfluenzaA__ABB53754
augaaccccaaucagaagaucauuaccauaggcagcgugucccugacaaucgccacuauuugcuuccucaugcaaaucgcuauucuugucacgaccguuacacugcacuuuaaacaguacgaguguucuucaccuccaaacaaucaggugaugccgugcgaacccaucauaaucgagagaaacauuacugaaaucguauauuugaccaauacaaccauugagaaggaaaucuguccuaaauuaguggaguacaggaacuggaguaagccacagugcaaaauaacuggguucgcacccuuuagcaaggacaauuccauucggcugucugccggaggugauaucugggucacacgcgagccuuaugugucgugugacccaggcaagugcuaccaauucgcgcuagggcagggaaccacgcucgauaacaaacauucaaaugacacuauucacgaucgaacaccccaucguacccugcuuaugaacgaacugggcguuccuuuucacuuggguacuagacagguguguaucgcuuggagcaguuccucuugccaugacgggaaggccuggcuccacgucugugugaccggauaugauaaaaaugcaacagccagcuucaucuacgacggcaggcugguagauuccauuggcucauggaguaagaacauacugcggacccaggagagcgaaugcguuuguaucaaugggacgugcacuguggucaugacagacggaucugcuuccgagcgcgcagauaccaaaauucucuuuaucgaggaagguaagauagugcacauuucaccauuaagcggcagugcccaacauguggaggaaugcucuuguuauccgagauaccccggggucaggugcguuugucgggacaacuggaagggauccaaucgcccugugguagauaucaacgugaaagacuacagcaucgucucgucuuaugugugcuccggccugguuggugacacuccacgaaagaacgauagaucaaguagcuccuacuguaggaaucccaacaaugagaaagggaaccacggagugaagggcugggcuuucgacgauggcaaugacgucuggauggggcggacaauuucugaagagagccguucaggauaugagaccuuuaaagugaucgguggcuggaguacgccuaacuccaaacuucagauuaaucgccagguaauaguugauagcgacaacagaucuggguacucaggaaucuucaguguggaaggcaagagcugcauuaauagguguuuuuaugucgaguugauccggggucgagaacaggagacccgcgugugguggacauccaacucuaucgucguguucugcgggacuucgggcaccuacggaacaggcagcuggccagauggggccgacauuaaucugaugcccauauga

SEQ ID NO: 142559 - RNA, 1410 nt, Artificial Sequence; identical to SEQ ID NO: 142151
  derived and/or modified CDS sequence (opt3) from neuraminidase__InfluenzaA__ABB54517

SEQ ID NO: 142560 - RNA, 1410 nt, Artificial Sequence
  derived and/or modified CDS sequence (opt3) from neuraminidase__InfluenzaA__ABB59999
augaaccccaaucagaagaucauuaccauaggcagcgugucccugacaaucgccacuauuugcuuccucaugcaaaucgcuauucuugucacgaccguuacacugcacuuuaaacaguacgaguguucuucaccuccaaacaaucaggugauguugugcgaaccgacuaucauagagagaaacaucaccgaaauuguauauuuaacaaauaccacuaucgagaaggaaauuugucccaaacuggcagaguacaggaacuggaguaagccucagugcaaaaucacaggguucgccccauuuagcaaggacaauuccauacggcuaucugcgggaggugauauuugggugacccgcgagcccuaugucucgugugacccugauaagugcuaccaauucgcucucggccaggggacgacucugaacaaucgacauucaaacgacaccgugcacgaucguacaccauauagaacucuucugaugaaugaauugggaguucccuuucaucucggcaccaaacagguguguaucgccuggagcaguuccucuugccacgacgguaaggcauggcugcaugucugugugacagggcacgaugagaacgccaccgcuagcuucauuuacgacggaaggcugguagauuccaucggcucauggaguaaaaagauccuccggacgcaggaaagcgagugcguuuguauuaauggcacuugcacaguggucaugaccgacgggucugcauccggacgcgccgauacuaaaauauuauuuaucgaggaagguaagauugugcacaucucaccucugagcggcagugcucaacauguggaggaaugcucuuguuauccaagauacccgggggucaggugcguuugucgggacaacuggaagggauccaaucgccccauaguggauauuaacaucaaagacuacagcaucguaucgucuuaugugugcuccggccuugucggugacacaccucgaaagaacgauucaaguagcuccucucacuguuugaauccaaacaaugaggaagggggacauggcgugaaaggcugggccuucgacgaugggaacgacguuuggaugggaagaaccauuagcgagaaguuuaggucagguuacgagacguucaaagugaucgaaggcuggaguaagcccaauuccaaacugcagauuaaccggcaggucauaguggaucgugggaaucgcagcggauauucuggcaucuuuucaguagaggguaagaguugcauuaacagauguuucuacguugaacuaaucagggggcggaagcaggagaccgaagugugguggacaagcaauuccaucgucacuuuuugcggcaccucuggaacauauggcacugggucguggccugacggagcggauauuaaccucaugccaauauga

SEQ ID NO: 142561 - RNA, 1410 nt, Artificial Sequence
  derived and/or modified CDS sequence (opt3) from neuraminidase__InfluenzaA__ABB60010
augaaccccaaucagaagaucauuaccauaggcagcgugucccugacaaucgccacuauuugcuuccucaugcaaaucgcuauucuugucacgaccguuacacugcacuuuaaacaguacgaguauucuucaccuccaaacaaucaggugauguugugugaaccgacuaucauagagagaaacaucaccgaaauuguauacuuaacaaauaccacuaucgagaaggaaauuugccccaaacuggcagaguauaggaacuggaguaagccucaguguaaaaucacaggguucgccccauuuagcaaggacaauuccauacggcuaucugcgggaggugauauuugggugacccgcgagcccuacgucucgugcgacccugauaaguguuaucaauucgcucucggccaggggacgacucugaacaaucgacauucaaacgacaccgugcacgaucguacaccauacagaacucuucugaugaaugaauugggaguucccuuucaucucggcaccaaacaggugugcaucgccuggagcaguuccucuugucacgacgguaaggcauggcugcaugucugcgugacagggcacgaugagaacgccaccgcuagcuucauuuaugacggaaggcugguagauuccaucggcucauggaguaaaaagauccuccggacgcaggaaagcgaguguguuugcauuaauggcacuuguacaguggucaugaccgacgggucugcauccggacgcgccgauacuaaaauauuauuuaucgaggaagguaagauugugcacaucucaccucugagcggcagugcucaacauguggaggaaugcucuugcuacccaagauacccgggggucagguguguuugccgggacaacuggaagggauccaaucgccccauaguggauauuaacguaaaagacuauagcaucgugucgcgauacgucuguucuggccuugugggugacacaccuagaaagaacgauuccucaaguagcucccacugcuugaauccaaacaaugaggaagggggacauggcguuaaaggcugggccuucgacgaugggaacgacguguggaugggaaggaccaucucugagaaguuucggagcgguuaugagacguucaaagucauugaaggcuggucaaagcccaauaguaaacugcagaucaaccgucaggugauuguagaucgcgggaauagauccggauacagcggcauauuuucuguugaggguaagucauguaucaacaggugcuucuauguggaacuaauucgggggcgaaagcaggagaccgaagucugguggacaaguaauagcaucguggucuuuuguggcacuuccggaaccuacggcacagggucuuggccugacggagcggauaucaaccucaugccaauuuga

SEQ ID NO: 142562 - RNA, 1410 nt, Artificial Sequence
  derived and/or modified CDS sequence (opt3) from neuraminidase__InfluenzaA__ABB77867
augaaccccaaucagaagaucauuaccauaggcagcgugucccugacaaucgccacuauuugcuuccucaugcaaaucgcuauucuugucacgaccguuacacugcacuuuaaacaguacgaguguaacucuccuccaaauaaccaggugauguugugcgaaccgacuaucauagagagaaauaucaccgaaauuguauauuuaacaaacaccacuaucgagaaggaaauuugucccaaacuggcagaguacaggaauuggucaaagccucagugcaaaaucacaggguucgccccauuuaguaaggacaacagcauacggcuauccgcgggaggugauauuugggugacccgcgagcccuaugucucuugugacccugauaagugcuaccaauucgcucucggccaggggacgacucugaauaacggacauucgaaugacaccgugcacgaucgaacaccauaucguacucuucugaugaacgaauugggcguucccuuucaucucgguaccaaacagguguguaucgccuggucaagcaguuccugccacgacgggaaggcauggcugcaugucugugugacaggacacgaugagaaugccaccgcuucuuucauuuacgacggcagacugguagauagcaucggcuccuggaguaaaaagauccucaggacgcaggaaucagagugcguuuguauuaacgggacuugcacaguggucaugaccgacggaagcgcaucuggucgggccgauacuaaaauauuauuuaucgaggaaggcaagauugugcacaucucccaacugucagggagcgcucagcauguggaggaaugcaguuguuauccucgcuacccaggagucagaugcguuuguagggacaauuggaagggcucuaaccggccgauaguggauauuaacguaaaagaccacuccaucgugagcucguacgucugcucuggucuugugggggacacaccccgcaagaaugauuccucaaguagcucccauuguuugaacccuaauaacgaggaaggaggccacggcguuaaagggugggccuucgacgauggaaaugacguguggaugggucgaaccaucucugagaagcugagaagcggcuaugagacguuuaaagucauugaaggguggucaaagccaaacaguaaacuacagaucaauaggcaagugauuguagaucggggaaaccguuccggcuacagcgguauauucucuguugaggggaagucaugcaucaaucgcuguuuuuauguggaacucauuagaggcaggaagcaggagaccgaagucugguggacaaguaacagcaucguggucuucugcggaacuuccggcaccuacgggacaggaucuuggcccgacggugcggauaucaaucugaugccuauuuga

SEQ ID NO: 142563 - RNA, 1410 nt, Artificial Sequence; identical to SEQ ID NO: 142562
  derived and/or modified CDS sequence (opt3) from neuraminidase__InfluenzaA__ABB79719

SEQ ID NO: 142564 - RNA, 1410 nt, Artificial Sequence
  derived and/or modified CDS sequence (opt3) from neuraminidase__InfluenzaA__ABB79734
augaaccccaaucagaagaucauuaccauaggcagcgugucccugacacucucuacuaucugcuucuuuaugcaaauugccauccuuauuacgaccgucacacugcacuucaaacaguacgaguuuaacucaccuccaaauaaccagguuauguugugugaaccgacuaucauagagagaaauaucaccgaaauuguguauuuaacaaacaccacuaucgagaaggaaauuugccccaaacuggcugaguacaggaauuggaguaagccucagugugacaucacaggguucgcaccauuuagcaaagauaacuccauacggcuaucugccggaggugacauuuggguaacccgcgagcccuaugugucgugcgauccugacaaguguuaccaauucgcgcucggccaggggacgacucugaauaacguccauucaaaugauaccgugcacgaccgaacaccauaucguacucuucugaugaacgaauugggaguucccuuucaucucggcaccaaacaggugugcaucgcuuggagcaguuccucuugucacgaugguaaggccuggcugcaugucugcgugacaggggacgauaagaaugcaaccgccagcuucauuuacaacggaagacugguagacuccaucguuucauggaguaaaaagauccucaggacgcaggagagcgaaugugugugcauuaauggcacuuguacagucgugaugaccgauggcucugcuuccgggaaagcagacacuaagauauuauuuaucgaggagggaaagauugugcacacaucaacccugagcgguagugcccaacacgucgaagagugcucuugcuauccucgguacccaggcguucgcugugugugcagagauaacuggaaaggguccaacaggccgaucguagacauaaauauuaaggacuacagcaucgugucgucuuaugucuguuccggacuugugggcgauacgccccggaaaaacgacucaaguagcuccucucauugcuuggauccuaauaacgaagagggugggcacggaguuaagggcugggcuuucgacgauggcaaugacguguggauggggcgcaccaucagcgaaaaacugcgaucaggauacgagacauuuaaggucauugaggguuggaguaacccaaauuccaaacuacagaucaacagacaggugauuguagauaggggcaaucggagcggguauucuggaauauucucaguugaaggcaagaguuguaucaaccguugcuuuuacguggagcucauucgcgguagaaaggaagagacugaaguccuguggaccagcaauuccaucguggucuucugugggacaucuggcacuuauggaaccggcucguggcccgacggggccgauaucaaccuuaugccuauuuga

SEQ ID NO: 142565 - RNA, 1410 nt, Artificial Sequence; identical to SEQ ID NO: 142535
  derived and/or modified CDS sequence (opt3) from neuraminidase__InfluenzaA__ABB79791

SEQ ID NO: 142566 - RNA, 1410 nt, Artificial Sequence
  derived and/or modified CDS sequence (opt3) from neuraminidase__InfluenzaA__ABB79802
augaaccccaaucagaagaucauuaccauaggcagcgugucccugacaaucgccacuauuugcuuccucaugcaaaucgcuauucuugucacgaccguuacacugcacuuuaaacaguacgaguguucuucaccuccaaacaaucaggugaugccgugcgaacccaucauaaucgagagaaacauuacugaaaucguauauuugaccaauacaaccauugagaaggaaaucuguccuaaauuaguggaguacaggaacuggaguaagccacagugcaaaauaacuggguucgcacccuuuagcaaggacaauuccauucggcugucugccggaggugauaucugggucacacgcgagccuuaugugucgugugacccaggcaagugcuaccaauucgcgcuagggcagggaaccacgcucaacaauaaacauucaaacgauacuauucacgaccgaacccccuaucguacacugcuuaugaaugaacugggcguuccuuuucauuuggguacuaaacagguguguaucgcuuggagcaguuccucuugccacgaugggaaggccuggcuccaugucugugugaccggacacgacgagaacgcaacagccagcuucaucuacgauggcagacugguagacuccauuggcucauggaguaagaauauacugaggacccaggaaagcgagugcguuuguaucaacgggacgugcacuguggucaugacagauggaucugcuuccgagcgggcagacaccaaaauucucuuuaucgaagaggguaagauagugcacauuucaccauuaagcggcagugcccaacauguggaagagugcucuuguuauccgcgcuaccccggggucagaugcguuuguagggauaauuggaagggauccaaccggccuaucguggacaucaacguaaaagauuacagcauugugucgucuuaugucugcuccggccuggugggugacacuccacgcaagaaugaccgaucaaguagcuccuacuguagaaaccccaauaacgaaaaagggucucacggaguuaagggcugggcuuucgaugacggcaaugauguguggauggggaggacaaucggagaggagcuucggagcgguuaugaaaccuuuaaagucauuggcggguggucaacgccuaacaguaaguugcagauaaaucgucaggugaucguagacuccggaaaccgcagcggcuacucugguauuuucucaguugaggggaaaaguugcaucaauagauguuuuuauguggaacugaucaggggccgggagcaggaaacccgagucugguggacaagcaacuccauuguggucuucugcggaacuucuggcaccuacgggacaggaucguggccagauggugccgacauaaaucuaaugcccaucuga

SEQ ID NO: 142567 - RNA, 1410 nt, Artificial Sequence
  derived and/or modified CDS sequence (opt3) from neuraminidase__InfluenzaA__ABB79813
augaaccccaaucagaagaucauuaccauaggcagcgugucccugacaaucgccacuauuugcuuccucaugcaaaucgcuauucuugucacgaccguuacacugcacuuuaaacaguacgaguguaacucuccuccaaauaaccaggugauguugugcgaaccgacuaucauagagagaaauaucaccgaaauuguauauuuaacaaacaccacuaucgagaaggaagugugucccaaacuggcagaguacaggaauuggucaaagccucagugcaaaauuacaggguucgccccauuuaguaaggacaacagcauccggcuauccgcgggaggugauauaugggucacccgcgagcccuaugugucuugugacccuggcaagugcuaccaauucgcucucgggcagggaacgacucugaauaaccgacauucgaaugauaccguucacgaccguacaccauauagaacucuucugaugaacgaauugggcgugcccuuucaucucgguaccaaacaggucuguauugccuggucaagcaguuccugccacgaugggaaggcauggcugcauguguguguaacaggacacgacgagaaugccaccgcuucuuucaucuacgauggcaggcugguugacagcauuggcuccuggaguaaaaacauccuccggacgcaggaaucagagugcguguguaucaaugggacuugcacagucgugaugaccgauggaagcgcaucugagcgcgccgacacuaagauuuuauuuauagaagaggguaaaaucgugcacauuuccccucugucaggcagcgcucaacaugucgaagagugcaguuguuauccaagauacccggggguuaggugcgugugucgggauaacuggaagggaucuaaccgccccaucguagacauaaaugugaaggauuacuccauugucagcucguaugugugcucuggccuuguuggugacacaccucgaaagaacgacuccucaaguagcuccuacuguagaaauccaaacaaugaaaaagggucucacggagugaaaggcugggccuucgaugacggcaacgaugucuggauggggaggaccaucagcgaggaguugcggucaggauaugaaacguuuaaggugaucgguggcuggaguaaacccaauuccaagcugcagauuaaccgucagguaaucguugaccgcgggaauagaagcggauacucuggcauuuucucaguggaggguaaaaguugcauaaacagguguuuuuaugucgaacuaauccgggggcgaaagcaggagaccgaagugugguggacaagcaauuccauugucguguucugcggcacuucuggaaccuacggcacagggucguggccugauggagcggacaucaaccucaugccaaucuga

SEQ ID NO: 142568 - RNA, 1410 nt, Artificial Sequence; identical to SEQ ID NO: 142567
  derived and/or modified CDS sequence (opt3) from neuraminidase__InfluenzaA__ABB79960

SEQ ID NO: 142569 - RNA, 1410 nt, Artificial Sequence; identical to SEQ ID NO: 142567
  derived and/or modified CDS sequence (opt3) from neuraminidase__InfluenzaA__ABB79971

SEQ ID NO: 142570 - RNA, 1413 nt, Artificial Sequence
  derived and/or modified CDS sequence (opt3) from neuraminidase__InfluenzaA__ABB79982
augaacgccaaucagaagaucauuaccauaggcagcaucuccauugcuaucgggauuaucucucugaugcuccaaauaggaaacaucauuucaaucugggcaagucacagcauucagacagguucccagaaucauacuggcgugugcaaccagagaaucauaacguacgaaaauucuaccugggucaaccacacauauguuaauauuaacaauacuaacgugaucgccgggaaagacaagaccucgguaacacuugcgggaaauucaagccuguguaguauuuccggcugggcuaucuacaccaaagauaacucuaucaggauugguagcaagggggacguguucgucauacgggagcccuuuaucuccugcucacauuuggagugucgcacuuucuuuuuaacacaaggagcccugcuaaaugauaaacacaguaacggcaccgugaaggaccgaagcccuuaucgugcacucaugucuugcccacugggcgaagccccgucccccuacaauucaaaguucgagagcguugcuuggagugcaucugccugucaugaugggaugggauggcuuacgauugguaucuccggcccugacaacggggcuguggccguccugaaauauaacggaauaauuacugaaaccaucaagagcuggaaaaagcagaucuugagaacacaggagucggagugcguguguguaaauggcucuugcuuuacuauuaugaccgaugguccauccaacggggcggcaucauacaaaaucuucaagauugaaaagggaaaaguuacaaagaguauagagcucaaugcccccaacuuucacuaugaagaguguagcugcuacccugacaccggcacggugaugugugucugcagggauaauuggcacggcuccaaccggccaugggugucuuucaaucagaaccuggacuaccaaaucggguauauuugcagcggaguguuuggugauaauccccgcccuaaagacggcgaggggucauguaacccagucacuguugauggagcuaauggcgugaaggguuucaguuacaaauaugggaacggcguauggaucggaagaacaaaguccaauaggcugcggaaaggcuuugaaaugaucugggacccgaacggguggaccgacacugauagcgacuucucugugaagcaggaugucguggccauuacagacuggucaggauacagugguagcuuuguucagcaucccgagcucaccggcuuagauugcauacgcccuuguuucuggguggaacugguccgagggcuuccaaaggagaauacgaccaucuggacauccggaucuucgauuagcuucugcggcgugaacuccgacacugcaaacuggucauggcccgauggugcugaauugccuuuuaccaucgacaaauga

SEQ ID NO: 142571 - RNA, 1413 nt, Artificial Sequence; identical to SEQ ID NO: 142499
  derived and/or modified CDS sequence (opt3) from neuraminidase__InfluenzaA__ABB79993

SEQ ID NO: 142572 - RNA, 1410 nt, Artificial Sequence
  derived and/or modified CDS sequence (opt3) from neuraminidase__InfluenzaA__ABB80004
augaaccccaaucagaagaucauuaccauaggcagcgugucccugacaaucucuacuauuugcuucuuuaugcaaaucgccauucucaucacgaccgucacacuucacuucaaacaguacgaguuuaacucaccuccaaauaaccagguuaugcugugugaaccgacuauaaucgagagaaauauuaccgaaaucguguauuugacaaacaccacuauugagaaggaaaucugccccaaauuagcugaguacaggaauuggaguaagccucagugugacauaacaggguucgcaccauuuagcaaagauaacuccauucggcugucugccggaggugacaucuggguaacccgcgagcccuaugugucgugcgauccugacaaguguuaccaauucgcgcuaggccaggggacgacucucaauaacguccauucaaaugauaccgugcacgaccgaacaccauaucguacucugcuuaugaacgaacugggaguucccuuucauuugggcaccaaacaggugugcauugcuuggagcaguuccucuugucacgaugguaaggccuggcuccaugucugcgugacaggggacgauaagaaugcaaccgccagcuucaucuacaacggaagacugguagacuccaucguuucauggaguaaagagauucugaggacgcaggaaagcgagugugugugcauaaauggcacuuguacagucgugaugaccgauggcucugcuuccgggaaggcagacacuaaaauccucuuuauugaggaaggaaagaucgugcacacaucaaccuuaagcgguagugcccaacacgucgaggaaugcucuugcuauccucgguacccaggcguucgcugugugugcagagauaacuggaagggguccaacaggccgauaguagacauuaauaucaaagacuacagcacggugucgucuuaugucuguuccggacuggugggcgauacaccccggaagaacgacucaaguagcuccucucauugccuugauccuaauaacgaggaaggugggcacggaguuaaaggcugggcuuucgacgauggcaaugacguguggauggggcgcaccaucagcgagaaguugcgaucaggauacgagacuuuuaaagucauugaagguuggaguaacccaaauuccaagcugcagaucaacagacaggugauuguagauaggggcaaucggagcggguauucuggaauauucucaguugagggcaaaaguuguaucaaccguugcuuuuacguggaacuaauucgcgguagaaaggaggaaaccgagguccucuggacaagcaauuccaucguggucuucugugggacuucuggcaccuauggaacaggcucguggcccgacggggccgauaucaaccugaugccuauuuga

SEQ ID NO: 142573 - RNA, 1410 nt, Artificial Sequence; identical to SEQ ID NO: 142557
  derived and/or modified CDS sequence (opt3) from neuraminidase__InfluenzaA__ABB80015

SEQ ID NO: 142574 - RNA, 1410 nt, Artificial Sequence
  derived and/or modified CDS sequence (opt3) from neuraminidase__InfluenzaA__ABB80037
augaaccccaaucagaagaucauuaccauaggcagcgugucccugacaaucgccacugucugcuuccucaugcaaauugcuauccuuguuacgaccgugacacugcacuuuaaacaguacgagugugacucuccugcaaacaaucagguaaugccaugcgaaccgauuaucauagagagaaacaucacugaaauuguguauuugaauaacaccacaaucgagaaggaaauuugucccaaauuagucgaguacaggaauuggucaaagccucagugcaaaaucaccggguucgccccauuuaguaaggauaacagcauacggcuguccgcgggaggugacauuugggugacucgcgagcccuauguuucuugugauccuggcaagugcuaccaauucgcucuagggcagggaacaacccucgacaauaaacauucgaacgauacgauccacgaccgaaucccacaucguacucugcuuaugaaugaacugggcgugcccuuucacuuggguaccagacaggucuguauugccuggucaagcaguuccugccaugaugggaaggcauggcuccacguguguguaacaggagacgauaaaaacgccacugcuucuuucaucuaugacggcaggcugguugauagcauuggcuccuggucacagaauauacugcggacccaagagagugaaugcguguguaucaacgggacaugcaccgucgugaugacggacggaagcgcaucuggucgcgccgauacuaggauucucuuuaucgaggagggcaagauagugcacauuuccccuuuaucagggagcgcucagcaugucgaagagugcaguuguuacccaagguauccgggaguucggugcaucugucgcgacaauuggaaaggcucuaaccgacccgugguagacaucaacguggaagauuacuccauugacagcucguacgucugcucuggucuggugggggauacaccuagaaauaacgacagguccucaaauaguaacugucggaauccaaacaaugagcguggaaaccacggcguuaagggcugggccuucgaugacgggaaugauguguggaugggacgcaccaucagcaaggaccuuagauccgguuaugaaacuuuuaaagucauuggcggguggucuacacccaacagcaagucacagauaaauagacaggugaucguagauagugacaaccgguccggauacagcggcauuuucucuguugaggguaaaucaugcaucaaucgauguuuuuauguggaguugauccgcgggagagaacaagagaccagggucugguggacgaguaacagcauuguggucuucugcggcaccuccggaacauacggcacugggucuuggccugauggagcggacauaaaucugaugccaaucuga

SEQ ID NO: 142575 - RNA, 1413 nt, Artificial Sequence
  derived and/or modified CDS sequence (opt3) from neuraminidase__InfluenzaA__ABB80048
augaaccccaaucagaagaucauuaccauaggcagcaucuccauugccaucgggauuaucucucugaugcuccaaauaggaaacaucauuucaaucugggcuagucacagcauucagacagguucccagaaucauacuggcgugugcaaccagagaaucauaacguacgaaaauucuaccugggucaaccacacauauguuaauauuaacaauacuaacgugaucgcagggaaagacaagaccucgguaacacuugccggaaauucaagccuguguaguauuuccggcugggcgaucuacaccaaagauaacucuaucaggauugguagcaagggggacguguucgucauacgggagccuuuuaucuccugcucacauuuggagugucgcacuuucuuuuuaacacaaggagcucugcuaaaugauaaacacaguaacggcaccgugaaggaccgaagcccauaucgugcccucaugucuugcccgcugggcgaagcacccuccccuuacaauucaaaguucgagagcguugccuggagugcuucugcaugucaugaugggaugggauggcuuacgauugguaucuccggcccagacaacggggccguggcuguccugaaauauaacggaauaauuacugaaaccaucaagagcuggaaaaagcagaucuugagaacacaggagucggagugcguguguguaaauggcucuugcuuuacuauuaugaccgauggucccuccaacggggccgcgucauacaaaaucuucaagauugaaaagggaaaaguuacaaagaguguggagcucaaugcaccuaacuuucacuaugaagaguguagcugcuacccagacaccggcacggucaugugugugugcagggauaauuggcacggcuccaaccggcccugggugucuuucaaucagaaccuggacuaccaaauaggguauaucugcagcggagucuuuggugauaauccucgcccaaaagacggcgaggggucauguaacccgguuacuguggauggagccaauggcguaaaggguuucaguuacaaauaugggaacggcguguggauuggaagaacaaaguccaauaggcugcggaaaggcuuugaaaugaucugggaccccaacggguggaccgacacugauagcgacuucucugucaagcaggaugugguugcuaucacagacuggucaggauacagugguagcuuugugcagcauccugagcucaccggcuuagauugcauucgcccauguuucugggucgaacuggugcgagggcuucccaaggagaauacgaccauauggacauccggaucuucgaucagcuucugcggcguaaacggugacacugccaacugguccuggccugauggggcagaauugccauuuaccauugacaaauga

SEQ ID NO: 142576 - RNA, 1410 nt, Artificial Sequence
  derived and/or modified CDS sequence (opt3) from neuraminidase__InfluenzaA__ABB80084
augaaccccaaucagaagaucauuaccauaggcagcgugucccugacaaucgccacuauuugcuuccucaugcaaaucgcuauucuugucacgaccguuacacugcacuuuaaacaguacgaguguaacucuccuucaaauaaccaggugauguugugcgaaccaacuaucauagagagaaauaucaccgaaauuguauauuuaacaaacaccacuaucgagaaggaaauuuguccgaaacuggcagaguacaggaauuggaguaagccccagugcaaaaucacaggguucgccccuuuuagcaaggacaacuccauacggcuaucugcgggaggugauauuugggugacccgcgagccauaugucucgugugaccccgauaagugcuaccaauucgcucucggccaggggacgacucugaauaacggacauucaaaugacaccgugcacgaucgaacaccuuaucguacucuucugaugaacgaauugggcguuccauuucaucucgguaccaaacagguguguaucgccuggagcaguuccucuugccacgacgggaaggcauggcugcaugucugugugacaggacacgaugagaaugccaccgcuagcuucauuuacgacggcagacugguagauuccaucggcucauggaguaaaaagauccucaggacgcaggaaagcgagugcguuuguauuaacgggacuugcacaguggucaugaccgacggaucugcauccggucgggccgauacuaaaauauuauuuaucgaggaaggcaagauugugcacaucucacaacugagcgggagugcucagcauguggaggaaugcucuuguuauccccgcuacccuggagucagaugcguuuguagggacaauuggaagggcuccaaccggccaauaguggauauuaacguaaaagaccacagcaucgugucgucuuacgucugcuccggucuugugggggacacaccgcgcaagaaugauucaaguagcuccucucauuguuugaaccccaauaacgaggaaggaggccacggcguuaaagggugggccuucgacgauggaaaugacguguggaugggucgaaccaucagcgagaagcugagaucaggcuaugagacguuuaaagucauugaaggguggaguaagccuaacuccaaacuacagaucaauaggcaagugauuguagaucggggaaaccguagcggcuacucugguauauucucaguugaggggaagaguugcaucaaucgcuguuuuuauguggaacucauuagaggcaggaagcaggagaccgaagucugguggacaagcaacuccaucguggucuucugcggaacuucuggcaccuacgggacaggaucguggccagacggugcggauaucaaucugaugcccauuuga

SEQ ID NO: 142577 - RNA, 1410 nt, Artificial Sequence; identical to SEQ ID NO: 142562
  derived and/or modified CDS sequence (opt3) from neuraminidase__InfluenzaA__ABB80095

SEQ ID NO: 142578 - RNA, 1410 nt, Artificial Sequence; identical to SEQ ID NO: 142562
  derived and/or modified CDS sequence (opt3) from neuraminidase__InfluenzaA__ABB80162

SEQ ID NO: 142579 - RNA, 1410 nt, Artificial Sequence; identical to SEQ ID NO: 142562
  derived and/or modified CDS sequence (opt3) from neuraminidase__InfluenzaA__ABB80199

SEQ ID NO: 142580 - RNA, 1410 nt, Artificial Sequence
  derived and/or modified CDS sequence (opt3) from neuraminidase__InfluenzaA__ABB80210
augaaccccaaucagaagaucauuaccauaggcagcgugucccugacaaucgccacuauuugcuuccucaugcaaaucgcuauucuugucacgaccguuacacugcacuuuaaacaguacgaguguucuucaccuccaaacaaucaggugauguugugcgaaccgacuaucauagagagaaacaucaccgaaauuguauauuuaacaaauaccacuaucgagaaggaaauuugucccaaacuggcagaguacaggaacuggaguaagccucagugcaaaaucacaggguucgccccauuuagcaaggacaauuccauacggcuaucugcgggaggugauauuugggugacccgcgagcccuaugucucgugugacccugauaagugcuaccaauucgcucucggccaggggacgacucugaacaaucgacauucaaacgacaccgugcacgaucguacaccauauagaacucuucugaugaaugaauugggaguucccuuucaucucggcaccaaacagguguguaucgccuggagcaguuccucuugccacgacgguaaggcauggcugcaugucugugugacagggcacgaugagaacgccaccgcuagcuucauuuacgacggaaggcugguagauuccaucggcucauggaguaaaaagauccuccggacgcaggaaagcgagugcguuuguauuaauggcacuugcacaguggucaugaccgacgggucugcauccggacgcgccgauacuaaaauauuauuuaucgaggaagguaagauugugcacaucucaccucugagcggcagugcucaacauguggaggaaugcucuuguuauccaagauacccgggggucaggugcguuugucgggacaacuggaagggauccaaucgccccauaguggauauuaacguaaaagacuacagcaucgugucgucuuaugucugcuccggccuugugggugacacaccucgaaagaacgauucaaguagcuccucucacuguuugaauccaaacaaugaggaagggggacauggcguuaaaggcugggccuucgacgaugggaacgacguguggaugggaagaaccaucagcgagaaguuuaggucagguuacgagacguucaaagucauugaaggcuggaguaagcccaauuccaaacugcagaucaaccgucaggugauuguagaucgggggaaucgcagcggauauucuggcauauuuucaguugaggguaagaguugcaucaacagauguuucuacguggaacuaauuagggggcggaagcaggagaccgaagucugguggacaagcaauuccaucguggucuuuugcggcacuucuggaaccuauggcacagggucguggccugacggagcggauaucggucucaugccaauuuga

SEQ ID NO: 142581 - RNA, 1410 nt, Artificial Sequence
  derived and/or modified CDS sequence (opt3) from neuraminidase__InfluenzaA__ABB80232
augaaccccaaucagaagaucauuaccauaggcagcgugucccugacaaucgccacuauuugcuuccucaugcaaaucgcuauucuugucacgaccguuacacugcacuuuaaacaguacgaguguaacucuccuccaaauaaccaggugauguugugcgaaccgacuaucauagagagaaauaucaccgaaauuguauauuuaacaaacaccacuaucgagaaggaaauuugucccaaacuggcagaguacaggaauuggucaaagccucagugcaaaaucacaggguucgccccauuuaguaaggacaacagcauacggcuagcggcuggaggugauauuugggugacccgcgagcccuaugucuccugugacccugauaagugcuaccaauucgcccucggccaggggacgacucugaauaaccgacauucuaaugacaccgugcacgaucguacaccauauagaacucuucugaugaacgaauugggaguucccuuucaucucggcaccaaacagguguguaucgcauggucgucaagcaguugccacgacgguaaggccuggcugcaugucugugugacagggcacgaugagaaugcuaccgcauccuucauuuacgacggaaggcugguagauucuaucggcagcugguccaaaaagauccuccggacgcaggaaucagagugcguuuguauuaacggcacuugcacaguggucaugaccgacgggagugccagcggacgcgcugauacuaaaauauuauuuaucgaggaagguaagauugugcacaucucucaacuguccggcucagcccagcauguggaggaaugcagcuguuauccuagauacccaggggucaggugcguuugucgggacaauuggaagggaaguaaccgcccgauaguggauauuaacguaaaagacuacucuaucguguccagcuaugucugcucgggccuugugggugacacaccccgaaagaaugauucuuccucaaguagccacuguuugaacccuaauaacgaggaagggggacauggcguuaaaggcugggcguucgacgauggggacgauguguggaugggaagaaccaucuccgagaagcugaggucugguuacgagacguuuaaagucauugaaggcuggagcaagccaaauucaaaacuacagaucaaccgucaggugauuguagaccgggggaaucgcaguggauauuccggcauauucagcguugaggguaagucuugcaucaacagauguuuuuacguggaacucauuagggggcggaagcaagagaccgaagucugguggacaucaaauaguaucguggucuucugcggcacuagcggaaccuauggcacaggguccuggcccgauggagcagacaucaaccugaugccuauuuga

SEQ ID NO: 142582 - RNA, 1410 nt, Artificial Sequence
  derived and/or modified CDS sequence (opt3) from neuraminidase__InfluenzaA__ABB80243
augaaccccaaucagaagaucauuaccauaggcagcgugucccugacaaucgccacuauuugcuuccucaugcagaucgcuauucuugucacgaccguuacacugcacuuuaaacaguacgaguguaacucuccuccaaauaaccaggugauguugugcgaaccgacuaucauagagagaaauaucaccgaaauuguauauuuaacaaacaccacuaucgagaaggaaauuugucccaaacuggcagaguacaggaauuggucaaagccucagugcaaaaucacaggguucgccccauuuaguaaggacaacagcauacggcuauccgcgggaggugauauuugggugacccgcgagcccuaugucucuugugacccugauaagugcuaccaauucgcucucggccaggggacgacucugaauaacggacauucgaaugacaccgugcacgaucgaacaccauaucguacucuucugaugaacgaauugggcguucccuuucaucucgguaccaaacagguguguaucgccuggucaagcaguuccugccacgacgggaaggcauggcugcaugucugugugacaggacacgaugagaaugccaccgcuucuuucauuuacgacggcagacugguagauagcaucggcuccuggaguaaaaagauccucaggacgcaggaaucagagugcguuuguauuaacgggacuugcacaguggucaugaccgacggaagcgcaucuggucgggccgauacuaaaauauuauuuaucgaggaaggcaagauugugcacaucucccaacugucagggagcgcucagcauguggaggaaugcaguuguuauccucgcuacccaggagucagaugcguuuguagggacaauuggaagggcucuaaccggccgauaguggauauuaacguaaaagaccacuccaucgugagcucguacgucugcucuggucuugugggggacacaccccgcaagaaugauuccucaaguagcucccauuguuugaacccuaauaacgaggaaggaggccacggcguuaaagggugggccuucgacgauggaaaugacguguggaugggucgaaccaucucugagaagcugagaagcggcuaugagacguuuaaagucauugaaggguggucaaagccaaacaguaaacuacagaucaauaggcaagugauuguagaucggggaaaccguuccggcuacagcgguauauucucuguugaggggaagucaugcaucaaucgcuguuuuuauguggaacucauuagaggcaggaagaaagagaacgaagucugguggaccaguaauagcaucguggucuucugcggaacauccggcacuuacgggaccggaucuuggcccgacggugcggauaucaaccugaugccuauuuga

SEQ ID NO: 142583 - RNA, 1410 nt, Artificial Sequence
  derived and/or modified CDS sequence (opt3) from neuraminidase__InfluenzaA__ABB80254
augaaccccaaucagaagaucauuaccauaggcagcgugucccugacaaucgccacuauuugcuuccucaugcaaaucgcuauucuugucacgaccguuacacugcacuuuaaacaguacgaguguucuucaccuccaaacaaucaggugauguugugcgaaccgacuaucauagagagaaacaucaccgaaauuguauauuuaacaaauaccacuaucgagaaggaaauuugucccaaacuggcagaguacaggaacuggaguaagccucagugcaaaaucacaggguucgccccauuuagcaaggacaauuccauacggcuaucugcgggaggugauauuugggugacccgcgagcccuaugucucguguggcccugacaagugcuaccaauucgcucucgggcagggaacgacucugaacaaucgacauucaaacgauaccgugcacgaccguacaccauauagaacucuucugaugaaugaauugggcguucccuuucaucucgguaccaaacagguguguaucgccuggagcaguuccucuugccacgaugggaaggcauggcugcaugucugugugacaggacacgacgagaacgccaccgcuagcuucauuuacgauggcaggcugguagacuccaucggcucauggaguaaaaagauccuccggacgcaggaaagcgagugcguuuguauuaaugggauaugcacuguggucaugacagauggaucugcauccggucgcgccgacaccaaaaucuuauuuauugaggaaggcaagaucgugcacauaucaccucugagcgggagugcucaacauguggaggaaugcucuuguuauccaagauacccgggagucaggugcguuugucgggauaacuggaagggcuccaaucgccccauuguggacaucaacguaaaagauuacagcaucgugucgucuuaugucugcuccggucuugugggggacacuccucgaaagaacgacucaaguagcuccucucacuguuugaauccaaacaaugaggaaggaggccauggcguuaaagggugggccuucgaugacggaaacgauguguggauggguagaacaauuagcgagaaguuuaggucaggcuacgagaccuucaaagucaucgaaggguggaguaagcccaauuccaaacugcagauuaaccgucaggugauaguagaccggggaaaucgcagcggcuauucugguaucuuuucaguugaggggaagaguugcauuaacagauguuucuacguggaacuaaucaggggccggaagcaggagacggaagucugguggaccagcaauuccaucguggucuuuugcggaacaucuggcacuuaugggaccggaucguggccugauggugcggacauuaaccucaugccaauauga

SEQ ID NO: 142584 - RNA, 1410 nt, Artificial Sequence; identical to SEQ ID NO: 142175
  derived and/or modified CDS sequence (opt3) from neuraminidase__InfluenzaA__ABB80495

SEQ ID NO: 142585 - RNA, 1410 nt, Artificial Sequence; identical to SEQ ID NO: 142562
  derived and/or modified CDS sequence (opt3) from neuraminidase__InfluenzaA__ABB80506

SEQ ID NO: 142586 - RNA, 1410 nt, Artificial Sequence; identical to SEQ ID NO: 142562
  derived and/or modified CDS sequence (opt3) from neuraminidase__InfluenzaA__ABB80517

SEQ ID NO: 142587 - RNA, 1410 nt, Artificial Sequence; identical to SEQ ID NO: 142562
  derived and/or modified CDS sequence (opt3) from neuraminidase__InfluenzaA__ABB80532

SEQ ID NO: 142588 - RNA, 1410 nt, Artificial Sequence
  derived and/or modified CDS sequence (opt3) from neuraminidase__InfluenzaA__ABB80644
augaaccccaaucagaagaucauuaccauaggcagcgugucccugacaaucgccacuauuugcuuccucaugcaaaucgcuauucuugucacgaccguuacacugcacuuuaaacaguacgaguguucuucaccuccaaacaaucaggugauguugugcgaaccgacuaucauagagagaaacaucaccgaaauuguauauuuaacaaauaccacuaucgagaaggaaauuugucccaaacuggcagaguacaggaacuggaguaagccucagugcaaaaucacaggguucgccccauuuagcaaggacaauuccauacggcuaucugcgggaggugauauuugggugacccgcgagcccuaugucucgugugacccugauaagugcuaccaauucgcucucggccaggggacgacucugaacaaucgacauucaaacgacaccgugcacgaucguacaccauauagaacucuucugaugaaugaauugggaguucccuuucaucucggcaccaaacagguguguaucgccuggagcaguuccucuugccacgacgguaaggcauggcugcaugucugugugacagggcacgaugagaacgccaccgcuagcuucauuuacgacggaaggcugguagauuccaucggcucauggaguaauaaaauccuccggacgcaggaaagcgagugcguuuguauuaacggcacuugcacaguggucaugaccgacgggucugcauccggacgcgccgauacuaagauauuauuuaucgaggaagguaaaauugugcacaucucaccucugagcggcagugcucaacauguggaggaaugcucuuguuauccaagauacccgggggucaggugcguuugucgggacaauuggaagggauccaaccgccccauaguggauauuaacguaaaggacuacagcaucgugucgucuuaugucugcuccggccuugugggugacacaccucggaaaaaugauucaaguagcuccucucacuguuugaacccaaauaacgaggaagggggacauggcguuaagggcugggccuucgacgaugggaaugacguguggaugggaagaaccaucagcgagaaauuuaggucagguuacgagacguucaaggucauugaaggcuggaguaaacccaacuccaagcugcagaucaaucgacaggugauuguagaucgugggaaccgcagcggauauucuggcauauuuucaguugaggguaaaaguugcaucaauagauguuucuacguggaacuaauuagggggcggaagcaggagaccgaagucugguggacaagcaacuccaucguggucuuuugcggcacuucuggaaccuauggcacagggucguggccugacggagcggauaucaaucucaugccaauuuga

SEQ ID NO: 142589 - RNA, 1410 nt, Artificial Sequence
  derived and/or modified CDS sequence (opt3) from neuraminidase__InfluenzaA__ABB80664
augaaccccaaucagaagaucauuaccauaggcagcgugucccugacaaucgccacuauuugcuuccucaugcaaaucgcuauucuugucacgaccguuacacugcacuuuaaacaguacgaguguucuucaccuccaaacaaucaggugauguugugcgaaccgacuaucauagagagaaacaucaccgaaauuguauauuuaacaaauaccacuaucgagaaggaaauuugucccaaacuggcagaguacaggaacuggaguaagccucagugcaaaaucacaggguucgccccauuuagcaaggacaauuccauacggcuaucugcgggaggugauauuugggugacccgcgagcccuaugucucgugugacccugauaagugcuaccaauucgcucucggccaggggacgacucugaacaaucgacauucaaacgacaccgugcacgaucguacaccauauagaacucuucugaugaaugaauugggaguucccuuucaucucggcaccaaacagguguguaucgccuggagcaguuccucuugccacgacgguaaggcauggcugcaugucugugugacagggcacgaugagaacgccaccgcuagcuucauuuacgacggaaggcugguagauuccaucggcucauggaguaaaaagauccuccggacgcaggaaagcgagugcguuuguauuaauggcacuugcacaguggucaugaccgacgggucugcauccggacgcgccgauacuaaaguguuauuuauagaggaagguaagaucgugcacauuucaccucugagcggcagugcucaacaugucgaggaaugcucuuguuauccaagauacccggggguuaggugcgugugucgggacaacuggaagggauccaaucgccccaucguagauauaaacgugaaagacuacagcauugucucgucuuaugugugcuccggccuuguuggugacacaccucgaaagaacgauucaaguagcuccucucacuguuugaauccaaacaaugaggaagggggacauggcgugaaaggcugggccuucgacgaugggaacgacgucuggaugggaagaaccaucagcgagaaguuuaggucagguuacgagacguucaaagugaucgaaggcuggaguaagcccaauuccaaacugcagauuaaccggcagguaaucguugaucgugggaaucgcagcggauauucuggcauauuuucaguggaggguaagaguugcauuaacagauguuucuacgucgaacuaaucagggggcggaagcaggagaccgaagugugguggacaagcaauuccauugucguguuuugcggcacuucuggaaccuauggcacagggucguggccugacggagcggauaucaaccucaugccaaucuga

SEQ ID NO: 142590 - RNA, 1410 nt, Artificial Sequence
  derived and/or modified CDS sequence (opt3) from neuraminidase__InfluenzaA__ABB80675
augaaccccaaucagaagaucauuaccauaggcagcgugucccugacaaucgccacuauuugcuuccucaugcaaaucgcuauucuugucacgaccguuacacugcacuuuaaacaguacgaguguaacucuccuccaaauaaccaggugauguugugcgaaccgacuaucauagagagaaauaucaccgaaauuguauauuuaacaaacaccacuaucgagaaggaaauuugucccaaacuggcagaguacaggaauuggucaaagccucagugcaaaaucacaggguucgccccauuuaguaaggacaacagcauacggcuagcggcuggaggugauauuugggugacccgcgagcccuaugucuccugugacccugauaagugcuaccaauucgcccucggccaggggacgacucugaauaaccgacauucuaaugacaccgugcacgaucguacaccauauagaacucuucugaugaacgaauugggaguucccuuucaucucggcaccaaacagguguguaucgcauggucgucaagcaguugccacgacgguaaggccuggcugcaugucugugugacagggcacgaugagaaugcuaccgcauccuucauuuacgacggaaggcugguagauucuaucggcagcugguccaaaaagauccuccggacgcaggaaucagagugcguuuguauuaacggcacuugcacaguggucaugaccgacgggagugccagcggacgcgcugauacuaaaauauuauuuaucgaggaagguaagauugugcacaucucucaacuguccggcucagcccagcauguggaggaaugcagcuguuauccuagauacccaggggucaggugcguuugucgggacaauuggaagggaaguaaccgcccgauaguggauauuaacguaaaagacuacucuaucguguccagcuaugucugcucgggccuugugggugacacaccccgaaagaaugauucuuccucaaguagcuacuguuugaacccuaauaacgaggaagggggacacggcguuaaaggcugggcguucgacgauggggacgauguguggaugggaagaaccaucuccgagaagcugaggucugguuaugagacguuuaaagucauugaaggcuggagcaagccaaauucaaaacuacagaucaaccgucaggugauuguagaccgggggaaucgcaguggauacuccggcauauucagcguugaggguaagucuugcaucaacagauguuuuuauguggaacucauuagggggcggaagcaagagaccgaagucugguggacaucaaauaguaucguggucuucugcggcacuagcggaaccuacggcacaggguccuggcccgauggagcagacaucaaccugaugccuauuuga

SEQ ID NO: 142591 - RNA, 1410 nt, Artificial Sequence
  derived and/or modified CDS sequence (opt3) from neuraminidase__InfluenzaA__ABB80685
augaaccccaaucagaagaucauuaccauaggcagcgugucccugacaaucgccacuauuugcuuccucaugcaaaucgcuauucuugucaucacgguuacccugcacuuuaaacaguacgaguguaacucuccuccaaauaaccaggugauguugugcgaaccgacaauaaucgagagaaauauuacugaaaucguauauuuaaccaacacaaccauugagaaggaaaucugucccaaacuggcagaguacaggaauuggucaaagccucagugcaaaauaacuggguucgccccauuuaguaaggacaacagcauucggcuauccgcgggaggugauaucugggugacacgcgagcccuaugucucuugugacccugauaagugcuaccaauucgcucucggccaggggaccacgcugaauaacggacauucgaaugacacugugcacgaucgaaccccauaucguacacuucugaugaacgaauugggcguucccuuucaucucgguacuaaacagguguguauugccuggucaagcaguuccugccacgacgggaaggcauggcugcaugucugugugaccggacacgaugagaaugccacagcuucuuucaucuacgacggcagacugguagauagcaucggcuccuggaguaaaaagauucucaggacccaggaaucagagugcguuuguauaaacgggacgugcacuguggucaugacagacggaagcgcaucuggucgggccgauaccaaaaucuuauuuauugaggaaggcaagaucgugcacauaucccaacugucagggagcgcucagcauguggaggaaugcaguuguuauccucgcuacccaggagucagaugcguuuguagggacaauuggaagggcucuaaccggccgauuguggauaucaacguaaaagaccacuccaucgugagcucguacgucugcucuggucuugugggggacacuccccgcaagaaugauuccucaaguagcucccauuguuugaacccuaauaacgaggaaggaggccacggcguuaaagggugggccuucgacgauggaaaugacguguggaugggucgaacaauuucugagaagcugagaagcggcuaugagaccuuuaaagucaucgaaggguggucaaagccaaacaguaaacuacagauuaauaggcaagugauaguagaucggggaaaccguuccggcuacagcgguaucuucucuguugaggggaagucaugcauuaaucgcuguuuuuauguggaacucaucagaggcaggaagcaggagacggaagucugguggaccaguaacagcaucguggucuucugcggaacauccggcacuuacgggaccggaucuuggcccgacggugcggauauuaaucugaugccuauauga

SEQ ID NO: 142592 - RNA, 1410 nt, Artificial Sequence; identical to SEQ ID NO: 142562
  derived and/or modified CDS sequence (opt3) from neuraminidase__InfluenzaA__ABB80696

SEQ ID NO: 142593 - RNA, 1410 nt, Artificial Sequence
  derived and/or modified CDS sequence (opt3) from neuraminidase__InfluenzaA__ABB80707
augaaccccaaucagaagaucauuaccauaggcagcgugucccugacaaucgccacuauuugcuuccucaugcaaaucgcuauucuugucacgaccguuacacugcacuuuaaacaguacgaguguucuucaccuccaaacaaucaggugauguugugcgaaccgacuaucauagagagaaacaucaccgaaauuguauauuuaacaaauaccacuaucgagaaggaaauuugucccaaacuggcagaguacaggaacuggaguaagccucagugcaaaaucacaggguucgccccauuuagcaaggacaauuccauacggcuaucugcgggaggugauauuugggugacccgcgagcccuaugucucguguggcccugacaagugcuaccaauucgcucucgggcagggaacgacucugaacaaucgacauucaaacgauaccgugcacgaccguacaccauauagaacucuucugaugaaugaauugggcguucccuuucaucucgguaccaaacagguguguaucgccuggagcaguuccucuugccacgaugggaaggcauggcugcaugucugugugacaggacacgacgagaacgccaccgcuagcuucauuuacgauggcaggcugguagacuccaucggcucauggaguaaaaagauccuccggacgcaggaaagcgagugcguuuguauuaaugggacuugcacaguggucaugaccgauggaucugcauccggucgcgccgacacuaaaauauuauuuaucgaggaaggcaagauugugcacaucucaccucugagcgggagugcucaacauguggaggaaugcucuuguuauccaagauacccgggagucaggugcguuugucgggauaacuggaagggcuccaaucgccccauaguggacauuaacguaaaagauuacagcaucgugucgucuuaugucugcuccggucuugugggggacacaccucgaaagaacgacucaaguagcuccucucacuguuugaauccaaacaaugaggaaggaggccauggcguuaaagggugggccuucgaugacggaaacgauguguggauggguagaaccaucagcgagaaguuuaggucaggcuacgagacguucaaagucauugaaggguggaguaagcccaauuccaaacugcagaucaaccgucaggugauuguagaccggggaaaucgcagcggcuauucugguauauuuucaguugaggggaagaguugcaucaacagauguuucuacguggaacuaauuaggggccggaagcaggagaccgaagucugguggacaagcaauuccaucguggucuuuugcggaacuucuggcaccuaugggacaggaucguggccugauggugcggacaucaaccucaugccaauuuga

SEQ ID NO: 142594 - RNA, 1410 nt, Artificial Sequence; identical to SEQ ID NO: 142562
  derived and/or modified CDS sequence (opt3) from neuraminidase__InfluenzaA__ABB80716

SEQ ID NO: 142595 - RNA, 1410 nt, Artificial Sequence
  derived and/or modified CDS sequence (opt3) from neuraminidase__InfluenzaA__ABB80725
augaaccccaaucagaagaucauuaccauaggcagcgugucccugacaaucgccacuauuugcuuccucaugcaaaucgcuauucuugucacgaccguuacacugcacuuuaaacaguacgaguguucuucaccuccaaacaaucaggugauguugugcgaaccgacuguaaucgagagaaacauaaccgaaaucguguauuuaacaaauaccacuauugagaaggaaaucugucccaaacuggcagaguacaggaacuggaguaagccucagugcaaaauuacaggguucgccccauuuagcaaggacaauuccauccggcuaucugcgggaggugauauaugggucacccgcgagcccuaugugucgugugacccugauaagugcuaccaauucgcucucggccaggggacgacucugaacaaucgacauucaaacgacaccguucacgaucguacaccauauagaacucuucugaugaaugaauugggagugcccuuucaucucggcaccaaacaggucuguauugccuggagcaguuccucuugccacgacgguaaggcauggcugcauguguguguaacagggcacgaugagaacgccaccgcuagcuucaucuacgacggaaggcugguugauuccauuggcucauggaguaaaaagauccuccggacgcaggaaagcgagugcguguguaucaauggcacuugcacagucgugaugaccgacgggucugcauccggacgcgccgauacuaaaauuuuauuuauagaggaagguaagaucgugcacauuucaccucugagcggcagugcucaacaugucgaggaaugcucuuguuauccaagauacccggggguuaggugcgugugucgggacaacuggaagggauccaaucgccccaucguagauauaaacgugaaagacuacagcauugucucgucuuaugugugcuccggccuuguuggugacacaccucgaaagaacgauucaaguagcuccucucacuguuugaauccaaacaaugaggaagggggacauggcgugaaaggcugggccuucgacgaugggaacgacgucuggaugggaagaaccaucagcgagaaguuuaggucagguuacgagacguucaaagugaucgaaggcuggaguaagcccaauuccaaacugcagauuaaccggcagguaaucguugaucgugggaaucgcagcggauauucuggcauauuuucaguggaggguaagaguugcauuaacagauguuucuacgucgaacuaaucagggggcggaagcaggagaccgaagugugguggacaagcaauuccauugucgcguuuugcggcacuucuggaaccuauggcacagggucguggccugacggagcagauaucaaccucaugccaaucuga

SEQ ID NO: 142596 - RNA, 1410 nt, Artificial Sequence
  derived and/or modified CDS sequence (opt3) from neuraminidase__InfluenzaA__ABB80740
augaaccccaaucagaagaucauuaccauaggcagcgugucccugacaaucgccacuauuugcuuccucaugcaaaucgcuauucuugucacgaccguuacacugcacuuuaaacaguacgaguguugcucuccuccaaacaaucaggugauguugugugaaccgacuaucauagagagaaacaucaccgaaauuguauauuuaacaaauaccacuaucgagaaggaaauuugccccaaacuggcagaguacaggaacuggucaaagccucaguguaaaaucacaggguucgccccauuuaguaaggacaauagcauacggcuauccgcgggaggugauauuugggugacccgcgagcccuaugucucuugcgacccugauaaguguuaccaauucgcucucggccaggggacgacucugaacaaucgacauucgaacgacaccgugcacgaucguacaccauauagaacucuucugaugaaugaauugggaguucccuuucaucucggcaccaaacaggugugcaucgccuggucaagcaguuccugucacgacgguaaggcauggcugcaugucugcgugacagggcacgaugagaacgccaccgcuucuuucauuuacgacggaaggcugguagauagcaucggcuccuggaguaaaaagauccuccggacgcaggaaucagaguguguuugcauuaauggcacuugcacaguggucaugaccgacgggagcgcaucuggacgcgccgauacuaaaauauuauuuaucgaggaagguaagauugugcacaucuccccucugucaggcagcgcucaacauguggaggaauguaguugcuauccaagauacccgggggucagguguguuugccgggacaacuggaagggaucuaaucgccccauaguggauauuaacguaaaagacuacuccaucgugagcucguaugucuguucuggccuugugggugacacaccucgaaagaacgauuccucaaguagcucccacugcuugaauccaaacaaugaggaagggggacauggcguuaaaggcugggccuucgacgaugggaacgacguguggaugggaagaaccaucucugagaaguuuaggagcgguuacgagacguucaaagucauugaaggcuggucaaagcccaauaguaaacugcagaucaaccgucaggugauuguagaucgggggaaucgcuccggauauagcggcauauuuucuguugaggguaagucauguaucaacagaugcuucuacguggaacuaauuagggggcggaagcaggagaccgaagucugguggacaaguaauagcaucguggcguuuuguggcacuuccggaaccuauggcacagggucuuggccugacggagcagauaucaaccucaugccaauuuga

SEQ ID NO: 142597 - RNA, 1410 nt, Artificial Sequence; identical to SEQ ID NO: 142562
  derived and/or modified CDS sequence (opt3) from neuraminidase__InfluenzaA__ABB80751

SEQ ID NO: 142598 - RNA, 1410 nt, Artificial Sequence; identical to SEQ ID NO: 142281
  derived and/or modified CDS sequence (opt3) from neuraminidase__InfluenzaA__ABB82186

SEQ ID NO: 142599 - RNA, 1413 nt, Artificial Sequence; identical to SEQ ID NO: 142444
  derived and/or modified CDS sequence (opt3) from neuraminidase__InfluenzaA__ABB82197

SEQ ID NO: 142600 - RNA, 1413 nt, Artificial Sequence; identical to SEQ ID NO: 142434
  derived and/or modified CDS sequence (opt3) from neuraminidase__InfluenzaA__ABB82208

SEQ ID NO: 142601 - RNA, 1413 nt, Artificial Sequence
  derived and/or modified CDS sequence (opt3) from neuraminidase__InfluenzaA__ABB82219
augaaccccaaucagaagaucauuaccauaggcagcaucuccauugccaucgggauuaucucucugaugcuccaaauaggaaacaucauuucaaucugggcuagucacagcauucagacagguucccagaaucauacuggcaucugcaaccagagaauaauuacguacgaaaauucuaccugggugaaccacacauaugucaauaucaacaauacuaacguuauugcagagaaagacaagaccucggugacacuugccggaaauucaagccuguguaguaucuccggaugggcgaucuacaccaaagauaacucuauuaggauaggcagcaagggugacguauucgugauccgggagccuuuuauuuccugcucaaauuuggaaugucgcacuuucuuuuuaacacaaggggcucugcuaaacgauaaacauaguaauggaaccgucaaggaccgaagcccauaucgugcccucaugucuugcccgcugggcgaggcacccuccccuuacaacucaaaguucgaaagcguggccuggagugcuucugcaugucacgauggcaugggguggcuuacgaucggaauauccgguccagacaacggcgccguugcugugcugaaauauaaugggauuaucacugagaccaucaagagcuggaaaaagagaauuuugaggacacaggagucggaaugcgucugugugaacggaucuugcuuuacuaucaugaccgauggccccuccaauggugccgcgucauacaaaauuuucaagauagagaaggggaaaguaacaaagaguaucgaacucaacgcaccuaauuuucauuaugaggaguguagcugcuacccagacaccggaacgguuaugugugugugccgggauaacuggcacggcuccaaucgccccugggucucuuucaaccagaaucuggacuaccagauuggcuauaucugcagcgggguguuuggagauaacccuagaccaaaagacggugaaggcucauguaauccggugacugucgauggggccgacggaguuaagggcuucaguuacaaauaugguaacgggguguggaucggcaggacaaaguccaaucggcugcgcaaaggauuugagaugauuugggaccccaacggcuggaccgauacugacagcgauuucucuguaaagcaagacguggucgcuauaacagauuggucaggguacagugggagcuuugugcagcacccugaacucaccgguuuagacugcauccgaccauguuucuggguugagcuggugagaggccuucccagggaaaauacgaccauuuggacauccgggucuucgaucagcuucugcggagucaacuccgaugccgcagacuggucauggccugauggcgcugaguugccauuuacuauugacaaguga

SEQ ID NO: 142602 - RNA, 1410 nt, Artificial Sequence
  derived and/or modified CDS sequence (opt3) from neuraminidase__InfluenzaA__ABB82230
augaaccccaaucagaagaucauuaccauaggcagcgugucccugacaaucgccacugucugcuuccucaugcaaauugcuauccuuguuacgaccgugacacugcacuuuaaacaguacgagugugacucuccugcaaacaaucagguaaugccaugcgaaccgauuaucauagagagaaacaucacugaaauuguguauuugaccaauacaaccaucgagaaggaaauuugucccaaauuagucgaguacaggaacuggucaaagccucagugcaaaaucacuggguucgccccauuuaguaaggauaauagcauacggcuguccgcgggaggugacauuugggugacacgcgagcccuauguuucuugugauccuggcaagugcuaccaauucgcucuagggcagggaaccacgcucgacaacaaacauucgaaugauacuauccacgaccgaaucccacaucguacccugcuuaugaacgaacugggcgugcccuuucacuuggguacaagacaggucuguauugccuggucaagcaguuccugccaugaugggaaggcauggcuccacguguguguaacuggagacgauaaaaaugccaccgcuucuuucaucuaugacggcaggcugguugauagcauuggcuccuggucacagaacauacugcggacacaagagagugaaugcguguguaucaaugggaccugcacggucgugaugacugacggaagcgcaucuggucgcgccgauacaaggauucucuuuaucgaggagggcaagauagugcacauuuccccuuuaucagggagcgcucagcaugucgaagagugcaguuguuacccaagauauccgggaguucggugcaucugucgcgacaacuggaaaggcucuaaucgacccaucguggacauuaacguaaaggauuacuccaucgacagcagauacgugugcucgggucuggucggggauaccccuaggaacaaugaccggucuuccaacucaaauugucguaacccaaauaacgauaagggaaaucacggcgugaaaggcugggccuucgacgaugggaacgacguuuggaugggacgcacuauuaguaaggauagcagauccgguuaugaaacauuuaaagugauaggcggguggucuacccccaauagcaagucacagaucaacaggcaggucauuguggacagugauaaucgguccggauacagcggcaucuucucuguagaggguaaaucaugcaucaaccgauguuuuuauguugaacuuauucgcgggagagagcaagagacgagggugugguggaccaguaauagcauagucguguucugcggcacauccggaacuuacggcaccgggucuuggccugacggagcggacaucaacuugaugccaauuuga

SEQ ID NO: 142603 - RNA, 1410 nt, Artificial Sequence
  derived and/or modified CDS sequence (opt3) from neuraminidase__InfluenzaA__ABB83018
augaaccccaaucagaagaucauuaccauaggcagcgugucccugacaaucgccacuauuugcuuccucacgcaaaucgcuauucuugucaccacaguuacucugcacuuuaaacaguacggguguaacucuccuccaaauaaccaggugauguugugcgagccgaccaucauagaaagaaauaucacagagauuguauauuuaaccaacacuacaaucgaaaaggagauuugucccaaacuggcagaauacaggaauuggucaaagccucagugcaacaucaccggauucgccccauuuaguaaagacaauagcauacggcuauccgcggguggcgauauuugggugacgcgcgagcccuaugucucuugugacccugauaagugcuaccaauucgcucucgggcagggaacuacccugaacaauggccauucgaacgacacagugcacgaucgaacuccauaucguacccuucugaugaaugaguuggguguucccuuucaucucgggacaaaacagguguguaucgccuggucaagcaguuccugccacgacggaaaagcauggcugcaugucugugugaccggcgaugacaagaacgccacggcuucuuucauuuacaauggcagacugguagauagcaucggguccuggucaaagaagauccucaggacucaggaaagugagugcguuuguauuaacggaacaugcaccguggucaugacugacgguagcgcaucuggcaaagccgauacaaagauauuauuuaucgaagaggggaagauugugcacaccucccugcuuucaggaagcgcucaacacguggaggaaugcaguuguuauccucgguacccaggcguccgcugcguuuguagagacaacuggaaagguucuaauaggccgaucguggauauaaacguaaaggacuacuccauugugagcucguaugucugcucuggguuggugggagacacgccccggaaaaaugauuccucaaguagcucccauugucuggacccuaacaaugaggaaggcggccacgggguuaagggaugggccuucgaugacgguaacgauguguggaugggccgcaccaucucugagaaacuacgaagcggguacgaaacauuuaaggucaucgagggauggucaaaaccaaauaguaagcuccagauuaacagacaggugaucguagacaggggcaaucgguccgguuauagcgggauuuucucuguugagggcaagucaugcauaaaccguuguuuuuacguggaacugauccgcggaagaaaucaggagacugaaguccuuuggaccaguaacagcauuguggucuucugcggcacauccgggacuuauggaaccgguucuuggcccgauggcgcggacaucaaucugaugccuaucuga

SEQ ID NO: 142604 - RNA, 1410 nt, Artificial Sequence; identical to SEQ ID NO: 142603
  derived and/or modified CDS sequence (opt3) from neuraminidase__InfluenzaA__ABB83029

SEQ ID NO: 142605 - RNA, 1410 nt, Artificial Sequence; identical to SEQ ID NO: 142430
  derived and/or modified CDS sequence (opt3) from neuraminidase__InfluenzaA__ABB83130

SEQ ID NO: 142606 - RNA, 1410 nt, Artificial Sequence
  derived and/or modified CDS sequence (opt3) from neuraminidase__InfluenzaA__ABB83141
augaaccccaaucagaagaucauuaccauaggcagcgugucccugacaaucgccacuauuugcuuccucucucaaaucgcuauucuugucacgaccguuacacugcacuuuaaacaguacgaguguaacucaccuccaaauaaccaggugauguugugcgaaccgacuaucauagagagaaauaucaccgaaauuguauauuuaacaaacaccacuaucgagaaggaaauuugucccaaacuggcagaguacaggaauuggaguaagccucagugcaacaucacaggguucgccccauuuagcaaagacaauuccauacggcuaucugcgggaggugauauuugggugacccgcgagcccuaugucucgugugacccugauaagugcuaccaauucgcucucggccaggggacgacucugaacaauggacauucaaacgacaccgugcacgaucgaacaccauaucguacucuucugaugaaugaauugggcguucccuuucaucucgguaccaaacagguguguaucgccuggagcaguuccucuugccacgacgggaaggcauggcugcaugucugugugacaggagaugacaagaacgccaccgcuagcuucauuuacaauggcagacugguagauuccaucggcucauggaguaaaaagauccucaggacgcaggagagcgaaugcguuuguauuaacgggacuugcacaguggucaugaccgacggaucugcauccgguaaagccgauacuaagauauuauuuaucgaggagggcaagauugugcacacaucacugcuuagcgggagugcucaacacguggaagagugcucuuguuauccucgguacccaggaguccgcugcguuuguagagacaacuggaaaggcuccaauaggccgaucguggauauaaacguaaaggacuacagcauugugucgucuuaugucugcuccgguuuggugggggacacgccccggaaaaaugauucaaguagcuccucucauugucuggacccuaacaaugaagagggaggccacggcguuaaggggugggccuucgaugacggaaacgauguguggaugggucgcaccaucagcgaaaaacuacgaucaggcuacgagaccuuuaaggucaucgagggguggaguaaaccaaauuccaagcuccagauuaacagacaggugaucguagacagggauaaucggagcggauauucuggcauuuucucaguugaagguaagaguugcauaaaccguuguuuuuacguggagcugauccgcgggagaaaucaggaaacagagguccuuuggacuagcaacuccauuguggucuucugcggcaccucuggaacauauggcacugggucguggcccgacggagcggauaucaaucugaugccuaucuga

SEQ ID NO: 142607 - RNA, 1410 nt, Artificial Sequence
  derived and/or modified CDS sequence (opt3) from neuraminidase__InfluenzaA__ABB86876
augaacaccaaucagagaaucauuacaauaggcacugugugccugaucgucgggauuaucagccuccuucugcaaauuggaaacaucguuuccuuguggauaucucacucaauccagacggguggcaagaaucauagugagauguguaaccagaaugugauuaccuacguaaacaauacaugggugaacaggacuuaugucaauaucagcaacaccaauauugccacagugcaggacguuaccuccgugaucuuagcugggaacucuucgcugugcucagucagcggaugggcaauauacaguaaagauaauuccauucggaucggcucuaagggugacauuuucgugauccgcgaacccuuuaucagcuguucccaccuagagugccgaacuuucuuucucacacaaggggcccugcuuaacgauaaacauucaaauggaaccguaaaggaccguaguccuuauagaacgcugaugagcuguccaauuggcgaagcgccgucucccuacaacuccagguucgagucaguugcuuggagcgccagugcaugccacgauggcauggggugguugacuauaggaaucucugguccugacaacggcgccguggcuguccucaaauauaaugggauuaucaccgauacaauaaaguccuggcggaacaagauucugcgcacucaggaaagcgagugugugugcaugaauggaucguguuuuaccgugcugacagacggcccaucuaacggucaggcauccuacaaaaucuucaaggucgagaaagggaagaucauuaaaucaaucgaacucgaugcccccaauuaucauuacgaggaaugcaguuguuacccugacaccggaaagguuaugugcgugugcagagauaacuggcacgcuagcaauaggccauggguauccuuugaccagaacuuagauuaucaaauuggcuacauauguucuggcguguucggggacaauccccggagcaacgacggaaaggguaauugcggcccuguccugucaaacggggccaauggagugaaaggcuuuaguuuccgcuaugguaacgggguuuggaucggccgaacgaaguccauuaauagcagaucuggauuugagaugaucugggauccaaacggcuggacugggacagacucaaguuucagcaugaaacaggauaucauugcgcuuaccgacugguccggauacucugguucguuugugcagcacccggaguugacuggcaugaacuguauaaggcccugcuucugggucgaacugauccgggggcagccuaaggagagcacaauuugggcauccggaucaaguaucucuuucuguggcguggauagcgaaaccacguccuggucauggccagacggugccgaucuacccuuuaccauugacaaauga

SEQ ID NO: 142608 - RNA, 1410 nt, Artificial Sequence
  derived and/or modified CDS sequence (opt3) from neuraminidase__InfluenzaA__ABB86886
augaacaccaaucagagaaucauuacaauaggcacugccugccuggcuaucgggauugugagccuccuucugcaaaucggaaacauugucuccuuguggaucucucacucaauacagacggaggaaaagaaucauagugagaccuguagccagaacuucaucacacacgaaaauaacacuuggguuaaucagaccuacauuaacaucuccaauacaaacaaugugguaggucaaggcgugaccucuauuauguuagcagggaacucgucacugugccccaucagcggaugggccauauauaguaaagacaauuccauuaggaucggcucuaagggugauauuuuugucauccgggagccuuucaucagcuguucccaucuagaaugccgcacguuuuuccucacacagggggcgcugcuuaacgacaaacacucaaauggaaccgugaaggaucgaaguccauaccguacgcugaugagcuguccgauuggcgaggcucccucuccuuauaacuccagauuugagucaguugccuggagcgcaagugccugccaugacggcauggggugguugacuauaggaaucucugguccagauaacggcgcuguggcagucuucaaauacaaugggauuaucaccgacacaauaaaguccuggaggaacaagauucuccggacucaggaaagcgagugugugugcaucaauggaucguguuuuaccaucaugacagauggccccucuaacggucaggccuccuauaaaauuuucaagauggaaaaagggaagaucauuaaaucaguagagcuggacgcuccuaauuaccacuaugaggaaaguagcugcuacccagauaccggaaagguugugugugucugccgcgacaacuggcacgccuccaauagacccugggugucuuuugaucaaaaccuggacuaccagauaggcuauaucugcagcggcguguucggggauaauccuaggucaaacgacggaaaggguaauuguggcccaguccucaguaacggggcgaauggaguuaaagagguguccuuucgguacggcaacgguguauggauugggcgcacuaagagcaucucuucacgaaguggcuucgaaaugaucugggacccgaauggauggacugagacagauagcuccuuuucuauuaaacaggacauaaucgcauuaaccgauuggucgggcuauagcggguccuucgugcagcaucccgaacugacuggaaugaacugcauuaagccuuguuucugggucgagcuuaucagaggucaaccaaaagagucaacaauuuggaccaguggcucuagcaucuccuuuugcgggguggacucagaaacggccagcuggucuuggcccgauggagcugacuugccuuucaccauagauaaguga

SEQ ID NO: 142609 - RNA, 1410 nt, Artificial Sequence
  derived and/or modified CDS sequence (opt3) from neuraminidase__InfluenzaA__ABB86898
augaaccccaaucagaagaucauuaccauaggcagcgugucccugacacucgccacuaucugcuuccuuaugcaaauugcuauccuggucacgaccguuacauugcacuuuaaacagcaggaguguaacucuccuccaaauaaccaggugauguuaugcgaaccgacuauuaucgagagaaauauaaccgaaaucguauaccugacaaacaccacuauugagaaggaaaucugucccaaacuagcagaguauaggaauuggucaaagccucaaugcaacauuacaggguucgccccauuuaguaaagacaauagcauccggcucuccgcgggaggugauauaugggugacccgcgagcccuacgucucuugugacccugauaagugcuaucaguucgcucugggccaggggacgacucuuaacaauggacauucgaacaauaccgugcacgaccgaacaccauaccguacucuguugaugaacgaacucggcguucccuuucaucuggguaccagacagguguguauugccuggucaagcaguuccugccacgaugggaaggcauggcugcaugucuguaucacaggagacgauaaaaaugccaccgcuucuuucauuuauaacggcaggcucguggacagcaucggcuccuggucaaagaaaaucuuacggacgcaagagagugaaugcguauguauuaacgggacuugcacaguugugaugaccgauggaagcgcaucugguaaggccgacacuaaaauacuguuuaucgaggagggcaagauuguccacaucuccacacuuucagggagcgcucagcacguggaagagugcaguuguuacccucgcuauccaggagugagaugcgucuguagggauaauuggaagggcucuaaccggccgauaguugacauuaaugugaaagauuacuccaucguaagcucguacgugugcucugguuuggucggggacacuccccgcaagaacgacuccuucucaaguagccauugucuggauccuaauaacgaagagggaggccacggcgugaaagggugggccuuugacgauggaaaugacguuuggaugggucgaacgaucuccgaaaagcuaagaucuggcuaugagaccuucaaagugauugagggguggagcaagccaaacucaaaacuccagaucaauaggcaggucauuguggaacggggaagucguuccggcuacagcgguauauuuucuguagaggggaagucaugcaucaaccgcuguuucuauguugaacugauuagaggcaggaaggaggaaacaaaagugugguggaccaguaauagcaucgucguguuuugcggaaccuccggcacauacgggacuggaucuuggcccgauggugcggacaucaaccuuaugccuauuuga

SEQ ID NO: 142610 - RNA, 1410 nt, Artificial Sequence
  derived and/or modified CDS sequence (opt3) from neuraminidase__InfluenzaA__ABB86906
augaacaccaaucagagaaucauuacaauaggcacugugugccugaucgucgggauuaucagccuccuucugcaaauuggaaacaucguuuccuuguggauaucucacucaauccagacggguggcaagaaucauagugagauguguaaccagaaugugauuaccuacguaaacaauacaugggugaacaggacuuaugucaauaucagcaacaccaauauugccacagugcaggacguuaccuccgugaucuuagcugggaacucuucgcugugcucagucagcggaugggcaauauacaguaaagauaauuccauucggaucggcucuaagggugacauuuucgugauccgcgaacccuuuaucagcuguucccaccuagagugccgaacuuucuuucucacacaaggggcccugcuuaacgauaaacauucaaauggaaccguaaaggaccguaguccuuauagaacgcugaugagcuguccaauuggcgaagcgccgucucccuacaacuccagguucgagucaguugcuuggagcgccagugcaugccacgauggcauggggugguugacuauaggaaucucugguccugacaacggcgccguggcuguccucaaauauaaugggauuaucaccgauacaauaaaguccuggcggaacaagauucugcgcacucaggaaagcgagugugugugcaugaauggaucguguuuuaccgugcugacagacggcccaucuaacggucaggcauccuacgagaucuucaaagucgaaaaggggaaaaucauuaagucaaucgagcucgaugcccccaauuaucauuacgaagagugcaguuguuacccugacaccggaaaaguuaugugcgugugcagagauaacuggcacgcuagcaauaggccauggguauccuuugaccagaacuuaaauuaucaaauuggcuacauauguucuggcguguucggggauaacccccggagcaaugacggaaaggguaacugcggcccuguccugucaaauggggccaacggagugaagggcuuuaguuuccgcuaugguaaugggguuuggaucggccgaacgaaauccauuagcucuagaucaggauuugagauggugugggacccaaacggcuggacugggacagauaguagguucagcaugaagcaggacaucaucgcgcuuaccgauugguccggauacucugguucguuuguccagcacccggaauugacuggcaugaacuguauucggcccugcuucuggguggagcugauacgugggcagccuaaagaaagcacaaucugggcauccggaucaaguauuucuuucuguggcguaaauagcgagaccgccuccuggucauggccagacggugcugaucuacccuuuacgaucgacaaguga

SEQ ID NO: 142611 - RNA, 1410 nt, Artificial Sequence
  derived and/or modified CDS sequence (opt3) from neuraminidase__InfluenzaA__ABB86916
augaaccccaaucagaagaucauuaccauaggcagcgugucccugacaaucgccacuauuugcuuccucacgcaaaucgcuauucuugucaccacaguuacucugcacuuuaaacaguacgaguguaacucuccuccaaauaaccaggugauguugugcgaaccgaccaucauagagagaaauaucacagaaauuguauauuuaaccaacacuacaaucgagaaggaaauuugucccaaacuggcagaguacaggaauuggucaaagccucagugcaacaucaccggguucgccccauuuaguaaagacaauagcauacggcuauccgcgggaggugauauuugggugacgcgcgagcccuaugucucuugugacccugauaagugcuaccaauucgcucucggccaggggacuacccugaacaauggacauucgaacgacacagugcacgaucgaacuccauaucguacccuucugaugaaugaauugggcguucccuuucaucucgguacaaaacagguguguaucgccuggucaagcaguuccugccacgacgggaaggcauggcugcaugucuguauuaccggagaugacaagaacgccacggcuucuuucaucuacaauggcagacugguggauagcaucuccucauggaguaaaaagauucucaggacucaggagagcgaaugcguauguauaaacggcacaugcaccguugugaugacugacgggucugcauccggaaaagccgauacaaagaucuuauuuauugaggaggguaagaucguccacaccucacugcuuagcggcagugcucaacacguggaagagugcucuuguuauccucgguacccaggggugcgcugcgucuguagagacaacuggaaaggauccaauaggccgauaguugauauuaacgugaaggacuacagcaucguaucgucuuaugugugcuccggcuuggucggugacacgccccggaaaaaugauucaaguagcuccucucauugucuggacccuaacaaugaagaagggggacacggcgugaagggcugggccuucgaugacgggaacgauguuuggaugggacgcaccaucagcgagaaacuacgaucagguuacgagacauuuaaggugauugagggcuggaguaaaccaaauuccaagcuccagaucaacagacaggucauuguggacagggauaaucggagcggguauucuggaauauucucaguagaaggcaagaguugcaucaaccguuguuuuuacguugagcugauucgcgguagaaaucaggaaacugaggugcuuuggaccagcaacuccaucgucguguucugcgggacaucuggcacuuauggaaccggcucguggcccgacggggcggauaucaaucugaugccuauuuga

SEQ ID NO: 142612 - RNA, 1410 nt, Artificial Sequence
  derived and/or modified CDS sequence (opt3) from neuraminidase__InfluenzaA__ABB86928
augaaccccaaucagaagaucauuaccauaggcagcgugucccugacaaucgccacuauuugcuuccucaugcaaaucgcuauucuugucacgaccguuacacugcacuuuaaacaguacgaguguaacucuccuccaaauaaccaggugauguugugcgaaccgacuaucauagagagaaauaucaccgaaauuguauauuuaacaaacaccacuaucgagaaggaaauuugucccaaacuggcagaguacaggaauuggucaaagccucagugcaacaucacaggguucgccccauuuaguaaagacaauagcauacggcuauccgcgggaggugauauuugggugacccgcgagcccuaugucucuugugacccugauaagugcuaccaauucgcucucggccaggggacgacucugaacaauggacauucgaacgacaccgugcacgaucgaacaccauaucguacucuucugaugaaugaauugggcguucccuuucaucucgguaccagacagguguguaucgccuggucaagcaguuccugccacgacgggaaggcauggcugcaugucuguauuacaggagaugacaaaaacgccaccgcuucuuucaucuacaauggcaggcugguggauagcaucggcuccuggucaaagaaaauucuccggacgcaggagagugaaugcguauguauaaacgggacuugcacaguugugaugaccgacggaagcgcaucugguaaggccgauacuaaaaucuuauuuauugaggagggcaagaucguccacauauccacacugucagggagcgcucaacacguggaagagugcaguuguuauccucgcuacccaggagugagaugcgucuguagggacaacuggaagggcucuaaucggccgauuguugauaucaacgugaaagacuacuccaucguaagcucguaugugugcucuggucuugucggggacacgccccgcaagaaugauuccuucucaaguagccauuguuugaacccuaauaacgaagagggaggccacggcgugaaagggugggccuuugacgauggaaaugacguuuggaugggucgaaccauuuccgaaaagcugagaucuggcuacgagaccuucaaagugaucgagggguggagcaagccaaacucaaaacuacagauuaauaggcaggucauaguggaacggggaaaccguaguggcuauuccgguaucuuuagcauugaggggaagucuugcaucaaucgcuguuucuacguagaacucaucagaggcaggaaggaggaaacaaaaguuugguggacuucaaacaguauuguggucuuuugcggaaccagcggcacauaugggacuggauccuggcccgauggugcggacauaaaucugaugccuaucuga

SEQ ID NO: 142613 - RNA, 1410 nt, Artificial Sequence
  derived and/or modified CDS sequence (opt3) from neuraminidase__InfluenzaA__ABB86936
augaacaccaaucagagaaucauuacaauaggcacugugugccugaucgucgggauuaucagccuccuucugcaaauuggaaacaucguuuccuuguggauaaaucacucuauccagacggaggguaagaaccauucagaaauguguaaucagaacgugauuaccuacguaaauaacacaugggugaauaggacuuaugucaacaucaguaauaccaacauugccacagugcaggacguuaccagcgugaucuuagcuggcaauuccucucugugccccgucucggggugggcaauauacucaaaagauaacagcauucggaucggaaguaagggcgacauuuucgugauccgcgagccuuuuaucuccuguucucaccuagaaugccgaacuuucuuucucacacaaggugcccugcuuaaugauaaacauagcaacgggaccguacgugacagauccccauauaggacgcugaugucauguccgacuggagaggcgcccaguccuuacaacagccgguucgaaucuguugcuugguccgccucagcaugccacgauggcaugggcugguugaccauugggauaagcggaccagacaauggugccguggcuguccucaaguauaacggcaucauuacagauacuaucaaaaguuggcgcaauaagauacugagaacccaggagucugagugugugugcaugaacggguccuguuuuacagugcugaccgacggacccagcaauggccaggcaucguacaagauuuucaaagucgaaaaggguaaaaucaucaagucuauugagcucgaugccccuaacuaucauuacgaagagugcuccuguuacccagacacggggaaaguuaugugcgugugcagggauaauuggcacgcuucaaaccggcccuggaucuauuuugaccagaauuuagauuaccaaauuggauauauauguaguggcguauucggcgacaacccucgcagcaaugacgggaagggaaacugcgguccagugcuguccaauggcgccaacggggucaagggauuuucuuuccgauacggcaaugguguguggaucgggagaacuaaaagcauuaacucaaggaguggcuuugagaugaucugggauccgaacggauggacaggcaccgacuccagcuucucuaugaagcaggauauccuugcgacuacagacuggucaggguauagugguagcuuuguucagcaccccgaauugaccggaaugaauuguauucggccuugcuucuggguggagcugauacguggccagccaaaagaauccacgaucugggcaucugggucgagcauuuccuucuguggagucaacucagagaccgccaauuggaguuggcccgauggcgcugaccuaccuuuuacaaucgauaaguga

SEQ ID NO: 142614 - RNA, 1410 nt, Artificial Sequence
  derived and/or modified CDS sequence (opt3) from neuraminidase__InfluenzaA__ABB86947
augaacaccaaucagagaaucauuacaauaggcacugugugccugaucgucgggauuaucagccuccuuucccaaauuggaaacaucguuucucuguggauaauccacucaauucagacggguggcaagaaucauagugagauguguaaccagaaugugaucaccuacguaaacaauacaugggugaacaggacuuauauuaauaucagcaacaccaauauagccacagucaaagacgugaccuccguuauuuuggcugggaacucuucguuaugccccgugucaggaugggcaaucuacagcaaggauaauaguauucggaucggcuccaaaggugacaucuucgucauucgcgaaccuuuuauaucuuguagccaccuggagugccgaacuuucuuucuaacacagggggcccuccugaacgauaagcauuccaauggaaccgugaaagaccguucaccauauagaacgcuuaugaguuguccgaucggcgaagcgcccagcccuuacaacucuagguucgaguccguagcuuggucagccagcgcaugccacgauggcaugggguggcugacuauuggaaucagugguccagacaacggcgccguugcuguguugaaguauaaugggauaauuaccgauacaaucaagucuuggcggaacaaaauccuccgcacucaagaauccgagugugucugcaugaauggaagcuguuuuaccgugcugacagacggccccucgaacggucaggcaucuuacaagauuuucaaaguggagaaggggaaaaucauuaaguccauagaacuggaugccccuaauuaucauuacgaggaaugcucauguuacccagacgcuggaaaggucaugugcguuugcagagauaacuggcacgccaguaauaggcccugggugagcuuugaccagaaccucgauuaucagaugggcuacaucuguuccggcguauucggggacaauccucggucuaacgacggaaaagguaauugcggcccaguguuaagcaacggggcgaauggagucaagggcuuuucauuccgcuaugguaacgggguguggauuggccgaaccaaaaguaucaauuccagaagcggauuugagaugaucugggauccgaacggcuggacggggacugacucuucauucaguaugaagcaagauauuauagcacugacagacuggagcggauacuccgguucuuuuguucagcaccccgagcuuaccggcaugaacuguaucaggccuugcuucuggguggaauugauucgggggcagccaaaagagucgacuaucugggccagcggauccucaauuaguuucuguggcgucaauucugaaacagcuagcugguccuggcccgauggugccgaccugccuuuuaccaucgauaaguga

SEQ ID NO: 142615 - RNA, 1410 nt, Artificial Sequence
  derived and/or modified CDS sequence (opt3) from neuraminidase__InfluenzaA__ABB86957
augaacaccaaucagagaaucauuacagugggcacugucugccugauaguugggaucgugagccuccuucugcaaauuggaaacaucguauccuuguggauuucucacucaauccagacgggugagaagaaucauagugaaguguguaaccagaauauaaucaccuacgagaacaaaacaugggucaaucagacuuaugugaacauuagcaauaccaacaucgccgaaggccaagggguuacauccauuaucauggcuggaaauucuucguuaugccccgugucaggcugggcaauauacagcaaggacaacaguauuaggaucgguuccaaaggggauauuuucgucauccgggagccuuuuaucucuuguagccaccuggaaugccgcaccuucuuucuaacucagggagcccuccugaaugaccgacauuccaacggcacagugaaggaucguucaccauauagaacccuuaugaguuguccgauuggcgaggcgcccagcccuuacaauucuagguucgaguccguagcuuggucagccagcgcaugccacgacgggaugggauggcugacgauagguaucaguggcucugauaacgaagccguugcuguguugaaauauaacgggauuaucacugacaccauaaaguccuggcggaauaagauucuccgcacacaggagagcgaaugugucugcaucaacggaucguguuuuacuaucaugaccgauggcccaucuaauggucaggcauccuacaaaauuuucaagauggagaaagggaagaucauuaaaucaguggagcuggaagcccccaacuaucauuacgaggaaugcaguuguuacccugacacaggaaagguggucugcguuugcagagauaauuggcacgcuagcaacaggccauggguguccuuuaaucaaaaccuggacuaucagauaggcuacaucuguucuggcguauucggggauaauccccggagcaacgacggaaaggguaauugcggcccugugccaucaaacggggccaauggagucaaaggcuuuaguuuccgcuaugguaacgggguguggauuggccgaaccaaguccaucuuuagcagaucuggauucgagaugaucugggauccgaauggcuggacggaaacugacucaaguuuuagcauuaaacaggacauaaucgcgcucacagauugguccggguacucuggaucguucguucagcaccccgaguuaaccgguaugaacuguauuaggccuugcuucuggguggagcugauccggggccaaccaaaggaaagcacuauuuggacauccgggucaaguaucucuuuuuguggagucgacagcgagaccgcauccuggucauggcccgauggcgccgaccuuccuuucacgauagauaaauga

SEQ ID NO: 142616 - RNA, 1410 nt, Artificial Sequence
  derived and/or modified CDS sequence (opt3) from neuraminidase__InfluenzaA__ABB96333
augaaccccaaucagaagaucauuaccauaggcagcgugucccugacaaucgccacuauuugcuuccucaugcaaaucgcuauucuugucacgaccguuacacugcacuuuaaacaguacgacugugauucuccugcaaacaaucaggugaugccaugcgagccgaucauaaucgaaagaaacauuacugagaucguauauuugaccaauacaaccauugaaaaggagaucugucccaaauuaguggaauacaggaacuggucaaagccucagugcaaaauaacuggguucgccccauuuaguaaggacaauagcauucggcuguccgcgggaggugauaucugggucacacgcgagcccuaugugucuugugacccuggcaagugcuaccaauucgcucuagggcagggaaccacgcucgauaacaaacauucgaaugacacuauucacgaucgaaccccacaucguacacugcuuaugaacgagcugggcguucccuuucacuuggguacuagacagguguguaucgccuggucaagcaguuccugccaugacgggaaggcauggcuccacgucugugugaccggauaugauaaaaaugccacagcuucuuucaucuacgacggcaggcugguagauagcauuggcuccuggucaaagaacauacugcggacccaggaaagugagugcguuuguaucaaugggacgugcacuguggucaugacagacggaagcgcaucugaacgcgccgauaccaaaauucucuuuaucgaggaggguaagauagugcacauuuccccuuuaucaggcagcgcucaacauguggaagagugcaguuguuauccaagauacccgggggucaggugcguuugucgggacaacuggaagggaucuaaucgccccgugguagacaucaacgugaaagauuacuccaucgccagcucguaugucugcucuggccuggugggugacacuccucgaaagaacgauagauacuccucaaguuauuguaggaauccaaacaaugaaaaagggaaccacggaguuaagggcugggcguucgacgauggcaaugacguguggauggggcggacaauuagcgaugagucccguucuggauacgaaaccuuuaaagucaucgguggcuggagcacgcccaacucaaaacuucagauuaaucgccaggugauaguagacagugauaacagauccggguauagcggaaucuucucuguugagggcaagucaugcauuaauagguguuuuuacguggaguugauccggggucgagaacaggagacccgcgucugguggacaaguaacagcaucguggucuucugcgggacuuccggcaccuauggaacaggcucuuggccugacggggcagauauuaaucugaugccaauauga

SEQ ID NO: 142617 - RNA, 1410 nt, Artificial Sequence
  derived and/or modified CDS sequence (opt3) from neuraminidase__InfluenzaA__ABB96344
augaaccccaaucagaagaucauuaccauaggcagcgugucccugacaaucgccacuauuugcuuccucaugcaaaucgcuauucuugucacgaccguuacacugcacuuuaaacaguacgagugugacucuccugcaaacaaucaggugaugccaugcgaaccgaucauaaucgagagaaacauuacugaaaucguauauuugaccaauacaaccauugagaaggaaaucugucccaaauuaguggaguacaggaacuggucaaagccucagugcaaaauaacuggguucgccccauuuaguaaggauaauagcauucggcuguccgcgggaggugacaucugggucacacgcgagcccuaugugucuugugauccuggccgaugcuaccaauucgcucuagggcagggaaccacgcucgacaacaagcauucgaaugauacuauucacgaccguaccccacauagaacacugcuuaugaacgaacugggcguucccuuucacuuggguacuagacagguguguaucgccuggucaagcaguuccugccaugaugggaaagcauggcuccacgucugugugaccggauaugacaagaaugccacagcuucuuucaucuacgauggccggcugguagacagcauuggcuccuggaguaaaaacauacugcgcacccaggagucagaaugcguuuguaucaaugggacgugcacuguggucaugacagauggaagcgcaucugagagagccgacaccaaggugcucuuuauugaggaagguaaaaucgugcacauauccccuuuaucaggcagcgcucaacaugucgaggaaugcaguuguuauccaagguacccggggguucggugcgugugucgcgauaacuggaagggaucuaaucgacccguaguggacauuaacgucaaggacuacuccaucgccagcucguaugugugcucuggccugguuggugauacuccuaggaaaaacgacagguacuccucaaguuauugucggaauccaaacaaugagaaggggaaccacggagugaaaggcugggcguucgaugacggcaaugaugucuggauggggcguacaaucagcgacgaaucccgcucuggauacgagaccuuuaaggugauugguggcuggagcacgcccaacucaaaacuucagaucaauagacagguaauuguugauagugacaacagguccggguauagcggaauauucucuguggagggcaagucaugcaucaaucgguguuuuuacgucgaauugauucgaggucgcgagcaggaaaccagagugugguggacaaguaacagcaucgucguguucugcgggacuuccggcaccuauggaacaggcucuuggccugauggggcagacaucaaucugaugccaauuuga

SEQ ID NO: 142618 - RNA, 1410 nt, Artificial Sequence
  derived and/or modified CDS sequence (opt3) from neuraminidase__InfluenzaA__ABB96398
augaaccccaaucagaagaucauuaccauaggcagcgugucccugacaaucgccacuauuugcuuccucaugcaaaucgcuauucuugucacgaccguuacacugcacuuuaaacaguacgagugugacucuccugcaaacaaucaggugaugccaugcgaaccgaucauaaucgagagaaacauuacugaaaucguauauuugaccaauacaaccauugagaaggaaacuugucccaaauuaguggaguacaggaacuggucaaagccucagugcaaaaucacaggguucgccccauuuaguaaggauaauagcauacggcuguccgcgggaggugacauuugggucacccgcgagcccuaugugucuugugauccuggcaagugcuaccaauucgcucuagggcagggaacgacucucgacaacaaacauucgaaugauaccauccacgaccgaacaccauaucguacucugcuuaugaacgaacugggcguucccuuucauuuggguaccagacagguguguauugccuggucaagcaguuccugccacgaugggaaggcauggcuccaugucugugugacaggauacgacaaaaaugccaccgcuucuuucaucuaugauggcaggcugguagacagcaucggcuccuggucaaagaacauucugcggacgcaggagagugaaugcguuuguauaaaugggacuugcacaguggucaugaccgauggaagcgcaucugagcgcgccgacacuaaaauccucuuuauugaggaagguaagaucgugcacauauccccuuuaucaggcagcgcucaacacguggaggaaugcaguuguuacccaagauacccgggggucaggugcguuugucgggauaacuggaagggaucuaaucgccccgugguagacauuaacgugaaagacuauuccaucgccagcucguacgucugcucuggccuggugggugauacaccucgaaagaacgacagauccucaaguagcuauuguaggaauccaaacaaugagaaagggaaccauggaguuaagggcugggcguucgaugacggcaaugauguguggauggggcggaccaucuccgaagagucucguagcggauacgagacguuuaaagucauugguggcuggucaacccccaacaguaaacuucagaucaaucgccaggugauuguagacuccgauaacagaagcggguauucuggaauauucucaguugaaggcaagaguugcaucaauagguguuuuuacguggaguugauucggggucgagaacaggagacacgcgucugguggacuagcaacuccaucguggucuucugcgggaccucuggcacauauggaacuggcucguggccugacggggcagauaucaaucugaugccaauuuga

SEQ ID NO: 142619 - RNA, 1410 nt, Artificial Sequence; identical to SEQ ID NO: 142430
  derived and/or modified CDS sequence (opt3) from neuraminidase__InfluenzaA__ABB96490

SEQ ID NO: 142620 - RNA, 1410 nt, Artificial Sequence
  derived and/or modified CDS sequence (opt3) from neuraminidase__InfluenzaA__ABB96501
augaaccccaaucagaagaucauuaccauaggcagcgugucccugacaaucgccacuauuugcuuccucaugcaaaucgcuauucuugucacgaccguuacacugcacuuuaaacaguacgaguguucuucaccuccaaacaaucaggugaugccgugcgaacccaucauaaucgagagaaacauuacugaaaucguauauuugaccaauacaaccauugagaaggaaaucuguccuaaauuaguggaguacaggaacuggaguaagccacagugcaaaauaacuggguucgcacccuuuagcaaggacaauuccauucggcugucugccggaggugauaucugggucacacgcgagccuuaugugucgugugacccaucaaagugcuaccaauucgcgcuaggccaggggaccacgcucgauaacaaacauagcaaugacacuauucacgaucgaacaccccaucguacccugcuuaugaacgaacugggaguuccuuuucacuugggcacuagacagguguguaucgcuuggaguuccucuagcugccaugacgguaaggccuggcuccacgucugugugaccggguaugauaaaaaugcaacagccuccuucaucuacgacggaaggcugguagauucaauuggcaguuggagcaagaacauacugcggacccaggagucugaaugcguuuguaucaauggcacgugcacuguggucaugacagacggguccgcuucagagcgcgcagauaccaaaauucucuuuaucgaggaaggaaagauagugcacauuagcccauuaagugguucugcccaacauguggaggaaugcuccuguuauccgagauaccccggcgucaggugcguuugucgggacaacuggaaggggagcaaucgcccugugguagauaucaacgugaaagacuacucgaucgucucuuccuaugugugcucaggacugguuggcgacacuccacgaaagaacgauagaaguagcuccucuuacuguaggaaucccaacaaugagaaagguaaccacggggugaagggaugggcuuucgacgauggcaaugacgucuggaugggccggacaauuagcgaagagucacguaguggguaugagaccuuuaaagugaucggagguugguccacgccuaacagcaagucucagauuaaucgccagguaauaguugauucaggcaacagaaguggguacagcggaaucuucuccguggaaggcaaaucuugcauuaauagguguuuuuaugucgagcuuauccggggucgagaacaggagacccgcgugugguggacaucgaacagcaucgucguguucugcgggacuuccggcaccuacggaacaggcucauggccagacggggccgauauuaauuugaugcccauauga

SEQ ID NO: 142621 - RNA, 1410 nt, Artificial Sequence
  derived and/or modified CDS sequence (opt3) from neuraminidase__InfluenzaA__ABB96534
augaaccccaaucagaagaucauuaccauaggcagcgugucccugacaaucgccacuauuugcuuccucaugcaaaucgcuauucuugucacgaccguuacacugcacuuuaaacaguacgaguguucuucaccuccaaacaaucaggugauguugugcgaaccgacuaucauagagagaaacaucaccgaaauuguauauuuaacaaauaccacuaucgagaaggaaauuugucccaaacuggcagaguacaggaacuggaguaagccucagugcaaaaucacaggguucgccccauuuagcaaggacaauuccauacggcuaucugcgggaggugauauuugggugacccgcgagcccuaugucucgugugacccugauaagugcuaccaauucgcucucggccaggggacgacucugaacaaucgacauucaaacgacaccgugcacgaucguacaccauauagaacucuucugaugaaugaauugggaguucccuuucaucucggcaccaaacagguguguaucgccuggagcaguuccucuugccacgacgguaaggcauggcugcaugucugugugacagggcacgaugagaacgccaccgcuagcuucauuuacgacggaaggcugguagauuccaucggcucauggaguaaaaagauccuccggacgcaggaaagcgagugcguuuguauuaauggcacuugcacaguggucaugaccgacgggucugcauccggacgcgccgauacuaaaauauuauuuaucgaggaagguaagauugugcacaucucaccucugagcggcagugcucaacauguggaggaaugcucuuguuauccaagauacccgggggucaggugcguuugucgggacaacuggaagggauccaaucgccccauaguggauauuaacguaaaagacuacagcaucgugucgucuuaugucugcuccggccuugugggugacacaccucgaaagaacgauucaaguagcuccucucacuguuugaauccaaacaaugaggaagggggacauggcguuaaaggcugggccuucgacgaugggaacgacguguggaugggaagaaccaucagcgagaaguuuaggucagguuacgagacguucaaagucauugaaggcuggaguaagcccaauuccaaacugcagaucaaccgucaggugauuguagaucgggggaaucgcagcggauauucuggcauauuuucaguugaggguaagaguugcaucaacagauguuucuacguggaacuaauuagggggcggaagcaggagaccgaagucugguggacaagcaauuccaucguggucuuuugcggcacuucuggaaccuauggcacagggucguggccugacggagcggauaucaaccucaugccaauuuga

SEQ ID NO: 142622 - RNA, 1410 nt, Artificial Sequence
  derived and/or modified CDS sequence (opt3) from neuraminidase__InfluenzaA__ABC02237
augaaccccaaucagaagaucauuaccauaggcagcgugucccugacaaucgccacuauuugcuuccucaugcaaaucgcuauucuugucacgaccguuacacugcacuuuaaacaguacgaguguucuucaccuccaaacaaucaggugauguugugcgaaccgacuaucauagagagaaacaucaccgaaauuguauauuuaacaaauaccacuaucgagaaggaaauuugucccaaacuggcagaguacaggaacuggaguaagccucagugcaaaaucacaggguucgccccauuuagcaaggacaauuccauacggcuaucugcgggaggugauauuugggugacccgcgagcccuaugucucgugugacccugauaagugcuaccaauucgcucucggccaggggacgacucugaacaaucgacauucaaacgacaccgugcacgaucguacaccauauagaacucuucugaugaaugaauugggaguucccuuucaucucggcaccaaacagguguguaucgccuggagcaguuccucuugccacgacgguaaggcauggcugcaugucugugugacagggcacgaugagaacgccaccgcuagcuucauuuacgacggaaggcugguagauuccaucggcucauggaguaaaaagauccuccggacgcaggaaagcgagugcguuuguauuaauggcacuugcacaguggucaugaccgacgggucugcauccggacgcgccgauacuaaaauauuauuuaucgaggaagguaagauugugcacaucucacaacugagcggcagugcucagcauguggaggaaugcucuuguuauccuagauacccaggggucaggugcguuugucgggacaacuggaagggauccaaucgcccgauaguggauauuaacaucaaagacuacagcaucguaucgucuuaugugugcuccggccuugucggugacacaccccgaaagaacgauucaaguagcuccucucacuguuugaauccuaacaaugaggaagggggacauggcgugaaaggcugggccuucgacgaugggaacgacguuuggaugggaagaaccauuagcgagaaguuuaggucagguuacgagacguucaaagugaucgaaggcuggaguaagccaaauuccaaacugcagauuaaccggcaggucauaguggaucgugggaaucgcagcggauauucuggcaucuuuucaguagaggguaagaguugcauuaacagauguuucuacguugaacuaaucagggggcggaagcaagagaccgaagugugguggacaagcaauuccaucgucgcguuuugcggcacuucuggaaccuauggcacagggucguggcccgacggagcagauauuaaccucaugccuauauga

SEQ ID NO: 142623 - RNA, 1410 nt, Artificial Sequence
  derived and/or modified CDS sequence (opt3) from neuraminidase__InfluenzaA__ABC02258
augaaccccaaucagaagaucauuaccauaggcagcgugucccugacaaucgccacuauuugcuuccucaugcaaaucgcuauucuugucacgaccguuacacugcacuuuaaacaguacgagugugacucuccugcaaacaaucagaucaugccaugcgaaccgacuauaaucgagagaaacauuaccgaaaucguguauuugacaaauauuaccaucgagaaggaaauaugucccaaauuaguagaguacaggaacuggucaaagccucagugcaaaauuacuggguucgccccauuuaguaaggauaauagcauccggcuguccgcgggaggugacauuugggugacacgcgagcccuaugucucuugugauccuucgaagugcuaccaauucgcucuaggccaggggaccacgcucgacaacaaacauucaaaugauacuauccacgaccgaaccccacaucguacacugcuuaugaacgaacugggagugcccuuucacuugggcacuagacagguuuguaucgccuggagcaguuccucuugccaugaugguaaggcauggcuccacgugugugucaccggguaugacaaaaaugccacagcuagcuucauuuacgauggaaggcugguggacuccauaggcucauggagucagaacauccugcggacccaagagagcgaaugcguauguauuaauggcacgugcacuguugugaugacagaugggucugcauccggacgcgccgacaccaagauccucuuuauagaggaggguaaaauuguccacaucucaccuuuaagcggcagugcucagcauguggaagagugcucuuguuauccaagauacccgggggugaggugcaucugucgggauaacuggaagggauccaaucgccccgucguugacauuaacgugaaggacuacagcaucgauucgucuuauguaugcuccggccuggugggugacacuccucgaaagaacgauagaucaaguaauagcuacuguaggaacccaaauaacgaaaaagggaaucacggagucaaaggcugggccuucgacgauggcaacgacguguggauggggcggacaauuuccgaggauucucguagcggauaugaaaccuuuaagguuauagguggcuggucaacgcccaauaguaaacuucagaucaaccgccaggugauugucgacuccgauaauagaagcggguacucuggaaucuucucaguggagggcaagaguugcaucaacagguguuuuuauguagaguugauucggggucgagaacaagagacccgcguuugguggacaagcaauuccauaguggucuucugcgggacuucuggcaccuacggagcgggcucguggccugacggggcagauaucaaccugaugccaauuuga

SEQ ID NO: 142624 - RNA, 1410 nt, Artificial Sequence
  derived and/or modified CDS sequence (opt3) from neuraminidase__InfluenzaA__ABC02269
augaaccccaaucagaagaucauuaccauaggcagcgugucccugacaaucgccacuauuugcuuccucaugcaaaucgcuauucuugucacgaccguuacacugcacuuuaaacaguacgagugugacucuccugcaaacaaucaggugaugccaugcgaaccgaucauaaucgagagaaacauuacugaaaucguauauuugaccaauacaaccauugagaaggaaaucugucccaaauuaguggaguacaggaacuggucaaagccucagugcaaaauaacuggguucgccccauuuaguaaggauaauagcauucggcuguccgcgggaggugacaucugggucacacgcgagcccuaugugucuugugauccuggcaagugcuaccaauucgcucuagggcagggaaccacgcucgacaacaaacauucgaaugauacuauucacgaccgaaccccacaucguacacugcuuaugaacgaacugggcguucccuuucacuuggguacuagacagguguguaucgccuggucaagcaguuccugccaugaugggaaggcauggcuccacgucugugugaccggauaugacaaaaaugccacagcuucuuucaucuacgauggcaggcugguagacagcauuggcuccuggucacagaacauacugcggacccaagagagugaaugcguuuguaucaaugggacgugcacuguggucaugacagauggaagcgcaucuggucgcgccgacaccaagauucucuuuaucgaggagggcaaaauagugcacacuuccccuuuaucagggagcgcucagcauguggaagagugcaguuguuauccaagauacccgggagucaggugcauuugucgggauaacuggaagggcucuaaucgccccguuguggacaucaacguaaaggacuacuccaucgauagcucguaugugugcucuggucuggucggggacacaccucgaaacaaugauagauccucaaguagcuacuguaggaacccaaauaacgaaaaaggaacccacggcgugaagggcugggccuucgacgaugggaaugacguuuggaugggacggacgauuuccgaggauucucguagcgguuaugaaaccuuuaaagugaucggcggguggucaacacccaacaguaaacuucagauuaaucgccaggucauaguggacuccgauaacagaagcggauacucuggcaucuucucaguagaggguaagaguugcauuaauagguguuuuuauguugaguugauccgggggcgagaacaagagacucgcgugugguggaccagcaacuccaucgucguguucugcggcacaucuggaacuuacggcaccgggucguggccugacggagcggauauuaaucugaugccaauauga

SEQ ID NO: 142625 - RNA, 1413 nt, Artificial Sequence
  derived and/or modified CDS sequence (opt3) from neuraminidase__InfluenzaA__ABC02280
augaaccccaaucagaagaucauuaccauaggcagcaucuccauugccaucgggauuaucucucugaugcuccaaauaggaaacaucauuucaaucugggcuagucacagcauucagacagguucccagaaucauacuggcgugugcaaccagagaaucauaacguacgaaaauucuaccugggucaaccacacauauguuaauauuaacaauacuaacgugaucgcagggaaagacaagaccucgguaacacuugccggaaauucaagccuguguaguauuuccggcugggcgaucuacaccaaagauaacucuaucaggauugguagcaagggggacguguucgucauacgggagccuuuuaucuccugcucacauuuggagugucgcacuuucuuuuuaacacaaggaagucugcuaaaugauaaacacagcaacggcaccgugaaggaccgaucuccauaucgugcucucauguccugcccgcugggcgaagcccccucaccuuacaauagcaaguucgagaguguugcauggucugccuccgcuugucaugaugggaugggauggcuuacgauugguaucagcggcccagacaacggggcaguggccguccugaaauauaacggaauaauuacugaaaccaucaagucguggaaaaagcagaucuugagaacacaggagucugagugcguguguguaaauggcuccugcuuuacuauuaugaccgauggucccucaaacggggcugccaguuacaaaaucuucaagauugaaaagggaaaaguuacaaagagcauagagcucaaugcgccuaacuuucacuaugaagaguguuccugcuacccagacaccggcacggugaugugugucugcagggauaauuggcacggcucuaaccggcccugggugagcuucaaucagaaccuggacuaccaaaucggguauauuugcucaggaguguuuggugauaauccucgcccaaaagacggcgaggggaguuguaacccggucacuguugauggagcaaauggcgugaaggguuucuccuacaaauaugggaacggcguauggaucggaagaacaaagagcaauaggcugcggaaaggcuuugaaaugaucugggaccccaacggguggaccgacacugauucugacuucucagugaagcaggaugucguggccauuacagacuggaguggauacagcgguuccuuuguucagcauccugagcucaccggcuuagauugcauacgcccauguuucuggguggaacugguccgagggcuucccaaggagaauacgaccaucuggacaucuggaucgagcauuuccuucugcggcgugaacucagacacugcuaacuggaguuggccugauggugccgaauugccauuuaccaucgacaaauga

SEQ ID NO: 142626 - RNA, 1410 nt, Artificial Sequence; identical to SEQ ID NO: 142621
  derived and/or modified CDS sequence (opt3) from neuraminidase__InfluenzaA__ABC02302

SEQ ID NO: 142627 - RNA, 1410 nt, Artificial Sequence; identical to SEQ ID NO: 142618
  derived and/or modified CDS sequence (opt3) from neuraminidase__InfluenzaA__ABC02313

SEQ ID NO: 142628 - RNA, 1410 nt, Artificial Sequence; identical to SEQ ID NO: 142623
  derived and/or modified CDS sequence (opt3) from neuraminidase__InfluenzaA__ABC02324

SEQ ID NO: 142629 - RNA, 1410 nt, Artificial Sequence
  derived and/or modified CDS sequence (opt3) from neuraminidase__InfluenzaA__ABC02335
augaaccccaaucagaagaucauuaccauaggcagcgugucccugacaaucgccacuauuugcuuccucaugcaaaucgcuauucuugucacgaccguuacacugcacuuuaaacaguacgagugugacucuccugcaaacaaucaggugaugccaugcgaaccgaucauaaucgagagaaacauuacugaaaucguauauuugaccaauacaaccauugagaaggaaaucugucccaaauuaguggaguacaggaacuggucaaagccucagugcaaaauaacuggguucgccccauuuaguaaggauaauagcauucggcuguccgcgggaggugacaucugggucacacgcgagcccuaugugucuugugauccuggcaagugcuaccaauucgcucuagggcagggaaccacgcucgacaacaaacauucgaaugauacuauucacgaccgaaccccacaucguacacugcuuaugaacgaacugggcguucccuuucacuuggguacuagacagguguguaucgccuggucaagcaguuccugccaugaugggaaggcauggcuccacgucugugugaccggauaugacaaaaaugccacagcuucuuucaucuacgauggcaggcugguagacagcauuggcuccuggucacagaacauacugcggacccaagagagugaaugcguuuguaucaaugggacgugcacuguggucaugacagauggaagcgcaucuggucgcgccgacaccaagauucucuuuaucaaagagggcaagauagugcacauuuccccuuuaucagggagcgcucagcauguggaggaaugcaguuguuauccaagauacccgggagucaggugcaucugucgggauaacuggaagggcucuaaucgccccguuguggacaucaacguaaaagacuacuccauugauagcucguaugugugcucuggucuggucggggacacuccucgaaacaaugauagauccucaaacaguuacuguaggaauccaaacaaugagaagggaaaccacggcgugaaaggcugggccuucgacgaugggaaugacguuuggaugggacggacaaucagcgaagauucccguucugguuaugagaccuuuaaggugauuggcggguggagcacgcccaacucaaaacuucagauaaaucgccaggucaucguggacagugauaacagauccggauacagcggcauuuucucuguagaagguaagucaugcaucaauagguguuuuuauguugaguugauccgggggcgagagcaagaaacccgcgugugguggacaaguaacagcauugucguguucugcggcacuuccggaaccuacggcacagggucuuggccugacggagcggauauaaaucugaugccaaucuga

SEQ ID NO: 142630 - RNA, 1410 nt, Artificial Sequence
  derived and/or modified CDS sequence (opt3) from neuraminidase__InfluenzaA__ABC39808
augaaccccaaucagaagaucauuaccauaggcagcgugucccugacaaucgccacuauuugcuuccucaugcaaaucgcuauucuugucacgaccguuacacugcacuuuaaacaguacgaguguucuucaccuccaaacaaucaggugaugccgugcgaacccaucauaaucgagagaaacauuacugaaaucguauauuugaccaauacaaccauugagaaggaaaucuguccuaaauuaguggaguacaggaacuggaguaagccacagugcaaaauaacuggguucgcacccuuuagcaaggacaauuccauucggcugucugccggaggugauaucugggucacacgcgagccuuaugugucgugugacccaucaaagugcuaccaauucgcgcuaggccaggggaccacgcucgauaacaaacauagcaaugacacuauucacgaucgaacaccccaucguacccugcuuaugaacgaacugggaguuccuuuucacuugggcacuagacagguguguaucgcuuggaguuccucuagcugccaugacgguaaggccuggcuccacgucugugugaccggguaugauaaaaaugcaacagccuccuucaucuacgacggaaggcugguagauucaauuggcaguuggagcaagaacauacugcggacccaggagucugaaugcguuuguaucaauggcacgugcacuguggucaugacagacggguccgcuucagagcgcgcagauaccaaaauucucuuuaucgaggaaggaaagauagugcacauuagcccauuaagugguucugcccaacauguggaggaaugcuccuguuauccgagauaccccggcgucaggugcguuugucgggacaacuggaaggggagcaaucgcccugugguagauaucaacgugaaagacuacucgaucgucucuuccuaugugugcucaggacugguuggcgacacuccacgaaagaacgauagaaguagcuccucuuacuguaggaaucccaacaaugagaaaggugaccacggggugaagggaugggcuuucgaugacggcaacgaugucuggaugggccggacaauuagcgaagagucacguaguggguaugagaccuuuaaagugaucggagguugguccacgccuaauagcaagucucagauuaaccgccagguaauaguugacucaggcaauagaaguggguacagcggaaucuucuccguggaaggcaaaucuugcauuaacagguguuuuuaugucgagcuuauccggggucgaaagcaggaaacccgcgugugguggacaucgaauagcaucgucguguucugcgggacuuccggcaccuacggaacaggcucauggccagauggggccgacauuaacuugaugcccauauga

SEQ ID NO: 142631 - RNA, 1410 nt, Artificial Sequence; identical to SEQ ID NO: 142430
  derived and/or modified CDS sequence (opt3) from neuraminidase__InfluenzaA__ABC40525

SEQ ID NO: 142632 - RNA, 1413 nt, Artificial Sequence
  derived and/or modified CDS sequence (opt3) from neuraminidase__InfluenzaA__ABC40536
augaaccccaaucagaagaucauuaccauaggcagcaucuccauugccaucgggauuaucucucugaugcuccaaauaggaaacaucauuucaaucugggcuagucacagcauucagacagguucccagaaucauacuggcgugugcaaccagagaaucauaacguacgaaaauucuaccugggucaaccacacauauguuaauauuaacaauacuaacgugaucgcagggaaagacaagaccucgguaacacuugccggaaauucaagccuguguaguauuuccggcugggcgaucuacaccaaagauaacucuaucaggauugguagcaagggggacguguucgucauacgggagccuuuuaucuccugcucacauuuggagugucgcacuuucuuuuuaacacaaggagcucugcuaaaugauaaacacaguaacggcaccgugaaggaccgaagcccauaucgugcccucaugucuugcccgcugggcgaagcacccuccccuuacaauucaaaguucgagagcguugccuggagugcuucugcaugucaugaugggaugggauggcuuacgauugguaucuccggcccagacaacggggccguggcuguccugaaauauaacggaauaauuacugaaaccaucaagagcuggaaaaagcagaucuugagaacacaggagucggagugcguguguguaaauggcucuugcuuuacuauuaugaccgauggucccuccaacggggccgcgucauacaaaaucuucaagauugaaaagggaaaaguuauaaagaguaucgagcucaaugcaccuaacuuucacuaugaagaguguagcugcuacccagacacaggcaccgugaugugugucugcagggauaauuggcacggcuccaaccggcccugggugucuuucaaucagaaccuggacuaccaaauuggguauaucugcagcggaguguuuggugauaauccucgcccaaaagacggcgaggggucauguaacccggucacgguugauggagccaauggcgugaaggguuucaguuacaaauaugggaacggcguauggaucggaagaacuaaguccaauaggcugcggaaaggcuuugaaaugauuugggaccccaacggguggacagacaccgauagcgacuucucugugaagcaggaugucguggcuauaacugacuggucaggauacagugguagcuuuguucagcauccugagcucacaggcuuagauugcauccgcccauguuucuggguggaacugguccgagggcuucccaaggagaauaccacgauuuggaccuccggaucuucgaucagcuucugcggcgugaacuccgacacagccaacuggucauggccugauggugcagaauugccauuuacuauugacaaauga

SEQ ID NO: 142633 - RNA, 1410 nt, Artificial Sequence; identical to SEQ ID NO: 142624
  derived and/or modified CDS sequence (opt3) from neuraminidase__InfluenzaA__ABC40547

SEQ ID NO: 142634 - RNA, 1410 nt, Artificial Sequence
  derived and/or modified CDS sequence (opt3) from neuraminidase__InfluenzaA__ABC40558
augaaccccaaucagaagaucauuaccauaggcagcgugucccugacaaucgccacuauuugcuuccucaugcaaaucgcuauucuugucacgaccguuacacugcacuuuaaacaguacgaguguucuucaccuccaaacaaucaggugaugccgugcgaacccaucauaaucgagagaaacauuacugaaaucguauauuugaccaauacaaccauugagaaggaaaucuguccuaaauuaguggaguacaggaacuggaguaagccacagugcaaaauaacuggguucgcacccuuuagcaaggacaauuccauucggcugucugccggaggugauaucugggucacacgcgagccuuaugugucgugugacccaggcaagugcuaccaauucgcgcuagggcagggaaccacgcucgauaacaaacauucaaaugacacuauucacgaucgaacccccuaucguacacugcuuaugaacgaacugggcguuccuuuucauuuggguacuagacagguguguaucgcuuggagcaguuccucuugccacgacgggaaggccuggcuccaugucugugugaccggacacgauaaaaaugcaacagccagcuucaucuacgacggcaggcugguagauuccauuggcucauggaguaagagcauacugcggacccaggagucugaaugcguuuguaucaacgggacgugcacuguggucaugacagacggauccgcuucagagcgcgcagauaccaaaauucucuuuaucgaggaagguaagauagugcacauuagcccauuaaguggcucugcccaacauguggaggaaugcuccuguuauccgagauaccccggggucaggugcguuugucgggacaauuggaagggaagcaaccgcccugugguagauaucaaugugaaagacuacucgaucgucucuuccuaugugugcucaggccugguuggugacacuccacgaaagaacgauagaaguagcuccucuuacugucagaaccccaauaacgagaaagggaaucacggagugaagggcugggcuuucgacgauggcaacgacgucuggauggggaggacaauuagcgaagagucacggaguggauaugagaccuuuaaagugaucgguggcugguccacgccuaauagcaaacuucagauuaaccgucagguaauaguugauaucgacaaucgcucuggguacucaggaauuuucaguguggaaggcaagagcugcaucaacagauguuuuuaugucgaguugaucaggggucgggaacaagagacccgagugugguggacauccaauucuauugucguguucugcgggacuucgggcaccuacggaacaggcagcuggccagauggggccgacauaaaccugaugcccaucuga

SEQ ID NO: 142635 - RNA, 1410 nt, Artificial Sequence
  derived and/or modified CDS sequence (opt3) from neuraminidase__InfluenzaA__ABC40611
augaaccccaaucagaagaucauuaccauaggcagcaucucccugacaauugccacuaucugcuuccucaugcaaauugcuauccuugugacgaccgucacacugcacuuuaaacaguacgaguguaacucuuugccuaauaaccagguuauguuaugcgaaccaacuauaaucgagagaaauauuaccgaaaucguguaucugacaaacaccacuauugagaaggaaaucuguccgaaacuagcagaguacaggaauuggucaaagccccagugcaaaauaacaggguucgccccuuuuaguaaggacaacagcauucggcucuccgcgggaggugauaucuggguaacccgcgagccauaugugucuugugaccccgauaagugcuaccaauucgcucugggccaggggacgacucuuaauaaccgacauucgaaugacaccguccacgaucguacaccuuauagaacucuguugaugaacgaacucggagugccauuucaucugggcaccaaacagguuuguauugccuggucaagcaguuccugccacgacgguaaggcauggcugcaugugugugucacagggcacgaugagaaugccaccgcuucuuucaucuacgacggaaggcucguggauagcaucggcuccuggaguaaaaagauuuuacggacgcaggaaucagagugcguauguauaaacggcacuugcacaguugugaugaccgacgggagcgcaucuggacgcgccgauacuaaaauccuguuuauugaggaagguaagaucauacacauuucccaacuuucaggcagcgcucagcaugucgaggaaugcaguuguuaucccagauacccuggggugaggugcgugugucgggacaauuggaagggaucuaaccgcccaaucgucgauaucaacguuaaagacuacuccauugugagcucguauguaugcucuggcuuggugggugacacaccgcgaaagaaugauuccucaaguagcucccacugucugaaccccaauaacgaggaagggggacauggcgucaaaggcugggccuucgacgaugggaaugacguguggaugggaagaaccaucucugagaaguuuaggagcgguuacgagacguucaaaguuauugaaggcuggucaaagccuaacaguaaacuacagauaaaucgucaggugaucgucgaucgggacaaccgcuccggguauagcggaaucuuuucuguggagggcaagucaugcauuaauagauguuucuacguagaacucaucaggggucggaagcaagagaccgaaguuugguggacaaguaacagcauuguggucuuuugcgggacuuccggcaccuauggaacaggcucuuggccagauggggcggacauaaaucugaugcccaucuga

SEQ ID NO: 142636 - RNA, 1410 nt, Artificial Sequence
  derived and/or modified CDS sequence (opt3) from neuraminidase__InfluenzaA__ABC40622
augaaccccaaucagaagaucauuaccauaggcagcgugucccugacaaucgccacuauuugcuuccucaugcaaaucgcuauucuugucacgaccguuacacugcacuuuaaacaguacgagugugacucuccugcaaacaaucaggugaugccaugcgaaccgaucauaaucgagagaaacauuacugaaaucguauauuugaccaauacaaccauugagaaggaaaucugucccaaauuaguggaguacaggaacuggucaaagccucagugcaaaauaacuggguucgccccauuuaguaaggauaauagcauucggcuguccgcgggaggugacaucugggucacacgcgagcccuaugugucuugugauccuggcaagugcuaccaauucgcucuagggcagggaaccacgcucgacaacaaacauucgaaugauacuauucacgaccgaaccccacaucguacacugcuuaugaacgaacugggcguucccuuucacuuggguacuagacagguguguaucgccuggucaagcaguuccugccaugaugggaaggcauggcuccacgucugugugaccggauaugacaaaaaugccacagcuucuuucaucuacgauggcaggcugguagacagcauuggcuccuggucacagaacauacugcggacccaagagagugaaugcguuuguaucaaugggacgugcacuguggucaugacagauggaaacgcaagcggucgcgccgacaccaagauucucuuuaucgaggagggcaaaauagugcacauuucuccuuuauccgggucagcucagcauguggaagagugcagcuguuauccaagauacccgggagucaggugcaucugucgggauaauuggaagggcaguaaccgccccguuguggacaucaacguaaaggacuacucuauugauuccagcuaugugugcucgggucuggucggggacacuccucgaaauaacgauagaucuuccaauucauacuguaggaacccaaauaacgaaaaaggaaaucacggcgugaagggcugggccuucgacgaugggaacgacguuuggaugggacggacaaucagugaggauagccguuccgguuaugaaaccuuuaaagugauuggcggguggucuacgcccaauagcaaacuucagauaaaccgccaggucaucguggacucagauaauagaaguggauacuccggcauuuucagcguagaggguaagucuugcaucaacagguguuuuuauguugaguugauccgggggcgagaacaagagacccgcgugugguggacaucaaauaguauugucguguucugcggcacuagcggaaccuacggcacaggguccuggccugacggagcggauauaaaccugaugccaaucuga

SEQ ID NO: 142637 - RNA, 1410 nt, Artificial Sequence
  derived and/or modified CDS sequence (opt3) from neuraminidase__InfluenzaA__ABC40634
augaaccccaaucagaagaucauuaccauaggcagcgugucccugacaaucgccacuauuugcuuccucacgcaaaucgcuauucuugucaccacaguuacucugcacuuuaaacaguacgaguguaacucuccuccaaauaaccaggugauguugugcgaaccgaccaucauagagagaaauaucacagaaauuguauauuuaaccaacacuacaaucgagaaggaaauuugucccaaacuggcagaguacaggaauuggucaaagccucagugcaacaucaccggguucgccccauuuaguaaagacaauagcauacggcuauccgcgggaggugauauuugggugacgcgcgagcccuaugucucuugugacccugauaagugcuaccaauucgcucucggccaggggacuacccugaacaauggacauucgaacgacacagugcacgaucgaacuccauaucguacccuucugaugaaugaauugggcguucccuuucaucucgguacaaaacagguguguaucgccuggucaagcaguuccugccacgacgggaaagcauggcugcaugucugugugaccggagaugacaagaacgccacggcuucuuucauuuacaauggcagacugguagauagcaucggcuccuggucaaagaagauccucaggacucaggagagugaaugcguuuguauugacgggacaugcaccguggucaugacugauggaagcgcaucugguaaagccgacacaaagauauuauuuaucgaggagggcaagauugugcacaccucccugcuuucagggagcgcucaacacguggaagagugcaguuguuauccucgguacccaggaguccgcugcguuuguagagauaacuggaaaggcucuaacaggccgaucguggacauaaauguaaaggacuacuccauugugagcucguaugucugcucugguuuggugggggauacgccccggaaaaacgacuccucaaguagcucccauugucuggauccuaauaacgaagagggaggccacggcguuaaggggugggccuucgacgauggaaaugacguguggaugggucgcaccaucucugaaaaacuacgaagcggcuacgagacauuuaaggucaucgagggguggucaaaaccaaacaguaagcuccagauuaauagacaggugaucguagauaggggaaaccgguccggcuauagcgguauuuucucuguugaagggaagucaugcauaaaucguuguuuuuacguggagcugauccgcggcagaaaccaggaaacugagguccuuuggaccaguaauagcauuguggucuucugcggaacauccggcacuuaugggaccggaucuuggcccgacggugcggauaucaaccugaugccuaucuga

SEQ ID NO: 142638 - RNA, 1410 nt, Artificial Sequence
  derived and/or modified CDS sequence (opt3) from neuraminidase__InfluenzaA__ABC40645
augaaccccaaucagaagaucauuaccauaggcagcgugucccugacaaucucuacuauuugcuucuuuaugcaaaucgccauucucaucacgaccgucacacuucacuucaaacaguacgaguuuaacucaccuccaaauaaccagguuaugcugugugaaccgacuauaaucgagagaaauauuaccgaaaucguguauuugacaaacaccacuauugagaaggaaaucugccccaaauuagcugaguacaggaauuggaguaagccucaguguaacauaacaggguucgcaccauuuagcaaagacaauuccauucggcugucugccggaggugauaucuggguaacccgcgagcccuaugugucgugcgacccugauaaguguuaccaauucgcgcuaggccaggggacgacucucaacaauguccauucaaacgacaccgugcacgaucgaacaccauaucguacucugcuuaugaaugaacugggaguucccuuucauuugggcaccaaacaggugugcauugcuuggagcaguuccucuugucacgacgguaaggccuggcuccaugucugcgugacaggggaugacgagaacgcaaccgccagcuucaucuacaauggaagacugguagauuccguugugucauggaguaagaaaauccugaggacgcaggaaagcgagugugucugcauuaacggcacuuguacaguggugaugaccgacggcucugcuuccgggaaggcagauacuaaaauacucuuuaucgaggaaggaaagauuguccacacaucaaccuuaagcgguagugcccaacacguugaggaaugcucuugcuauccucgguacccaggcgugcgcuguguaugcagagacaacuggaagggguccaauaggccgaucguggauauaaacauuaaagacuacagcaucgucucgucuuauguguguuccggacugguuggcgacacgccccggaagaaugauucaaguagcuccucucauugccuugacccuaacaaugaggaaggugggcacggagugaaaggcugggcuuucgaugacggcaacgaugucuggauggggcgcaccaucagcgagaaguugcgaucaggauacgagacauuuaaagugauugaagguuggaguaauccaaacuccaagcugcagaucaauagacagguaauuguugacaggggcaaccggagcggguauucuggaauauucucaguggagggcaaaaguuguaucaaucguugcuuuuacgucgaacuaauucgcgguagaaagcaggagacugaagugcucuggaccagcaacuccaucgucguguucugugggacaucuggcacuuauggaaccggcucguggcccgauggggccgacaucaaucugaugccuauuuga

SEQ ID NO: 142639 - RNA, 1410 nt, Artificial Sequence
  derived and/or modified CDS sequence (opt3) from neuraminidase__InfluenzaA__ABC41706
augaaccccaaucagaagaucauuaccauaggcagcgugucccugacaaucgccacuauuugcuuccucaugcaaaucgcuauucuugucacgaccguuacacugcacuuuaaacagcaugaguguaacucuccuccaaauaaccaggugauguugugcgaaccgacuaucauagagagaaauaucaccgaaauuguauacuuaacaaacaccacuaucgagaaggaaauuugucccaaacugguggaguauaggaauuggucaaagccucagugcaacaucacaggguucgcaccauuuaguaaagacaauagcauacggcuauccgccggaggugauauuugggucacccgcgagcccuacgugucuugugacccugauaagugcuaucaauucgcgcucggccaggggacgacucugaacaauggacacucgaacgacaccguucaugaucgaacaccauaccguacucuucugaugaaugaauugggcgugcccuuucaccucgguaccagacaggucuguaucgcuuggucaagcaguuccugccaugacgggaaggccuggcugcacguguguguaacaggagaugacaaaaacgcaaccgccucuuucauuuauaauggcaggcugguugauagcaucggcuccuggucaaagaaaauccuccggacgcaggagagugaaugcguguguauuaacgggacuugcacagucgugaugaccgacggaagcgcuucugguaaggcagauacuaaaauauuauuuaucgaggagggcaagauugugcacaucuccacacugucagggagcgcccaacaugucgaagagugcaguuguuacccucgcuauccaggaguuagaugcguguguagggacaacuggaagggcucuaaucggccgauaguagauauuaacgugaaagacuacuccaucgucagcucguacgugugcucuggucuuguuggggacacgccccgcaagaaugauuccuucucaaguagccacuguuuggacccuaacaaugaagagggaggccauggcgugaaagggugggcuuuugaugacggaaacgaugucuggaugggucgaaccaucuccgaaaagcugagaucuggcuaugagaccuucaaagugauugagggguggagcaagccaaauucaaaacuacagaucaacaggcagguaauuguugaacggggaaaucguaguggcuacuccgguauauuuagcguggaggggaagucuugcaucaaccgcuguuucuaugucgaacucauuagaggcaggaaggaggaaacagaggugugguggacuucaaauaguaucgucguguuuugcggaaccagcggcacauacgggacuggauccuggcccgacggugccgauaucaaccugaugccuauuuga

SEQ ID NO: 142640 - RNA, 1413 nt, Artificial Sequence
  derived and/or modified CDS sequence (opt3) from neuraminidase__InfluenzaA__ABC41717
augaaccccaaucagaagaucauuaccauaggcagcaucuccauugccaucgggauuaucucucugaugcuccaaauaggaaacaucauuucaaucugggcuagucacagcauucagacagguucccagaaucauacuggcaucugcaaccagagaauaauuacguacgaaaauucuaccugggugaaccacacauaugucaauaucaacaauacuaacguuguggcagggaaagacaagaccucgguaacacuugccggaaauucaagccuguguaguauuuccggcugggcgaucuacaccaaagauaacucuaucaggauugguagcaagggggacguguucgucauacgggagccuuuuaucuccugcucacauuuggagugucgcacuuucuuuuuaacacaaggagcucugcuaaaugauaaacacaguaacggcaccgugaaggaccgaagcccauaucgugcccucaugucuugcccgcugggcgaagcacccuccccuuacaauucaaaguucgagagcguugccuggagugcuucugcaugucaugaugggaugggauggcuuacgauugguaucuccggcccagacaacggggccguggcuguccugaaauauaacggaauaauuacugaaaccaucaagagcuggaaaaagagaaucuugaggacacaggagucggagugcguguguguaaauggcucuugcuuuacuauuaugaccgauggucccuccaacggggccgcgucauacaaaaucuucaagauugaaaagggaaaaguuacaaagaguauagagcucaaugcaccuaacuuucacuaugaagaguguagcugcuacccagacaccggcacggugaugugugucugccgggauaauuggcacggcuccaaccgccccugggugucuuucaaucagaaccuggacuaccagaucggguauauuugcagcggaguguuuggugauaauccuagaccaaaagacggcaaggggucauguaacccggucacuguugauggagccgacggcgugaaagguuucaguuacaaguaugggaauggcguauggaucggaaggacaaaauccaaccggcugcgcaagggcuuugagaugaucugggaccccaauggguggaccgauacugacagcgauuucucugugaagcaagacgucguggcuguuacagauuggucaggauacagugguagcuuugugcagcauccugaacucaccggcuuagacugcauucgaccauguuucugggucgagcuggugagagggcuucccagggaaaacacgaccauauggacauccggaucuucgaucagcuucugcggcguagauuccgacacugccaauuggucauggccugauggugcagaguugccauuuaccauugacaaauga

SEQ ID NO: 142641 - RNA, 1410 nt, Artificial Sequence
  derived and/or modified CDS sequence (opt3) from neuraminidase__InfluenzaA__ABC41728
augaaccccaaucagaagaucauuaccauaggcagcgugucccugacaaucgccacuauuugcuuccucaugcaaaucgcuauucuugucacgaccguuacacugcacuuuaaacagcaugaguguaacucuccuccaaauaaccaggugauguugugcgaaccgacuaucauagagagaaauaucaccgaaauuguauacuuaacaaacaccacuaucgagaaggaaauuugucccaaacugguggaguauaggaauuggucaaagccucagugcaacaucacaggguucgcaccauuuaguaaagacaauagcauacggcuauccgccggaggugauauuugggucacccgcgagcccuacgugucuugugacccugauaagugcuaucaauucgcgcucggccaggggacgacucugaacaauggacacucgaacgacaccguucaugaucgaacaccauaccguacucuucugaugaaugaauugggcgugcccuuucaccucgguaccagacaggucuguaucgcuuggucaagcaguuccugccaugacgggaaggccuggcugcacguguguguaacaggagaugacaaaaacgcaaccgccucuuucauuuauaauggcaggcugguugauagcaucggcuccuggucaaagaacauccuccggacgcaggagagugaaugcguguguauuaacgggacuugcacagucgugaugaccgacggaagcgcuucugguaaagcagauacuaagauauuauuuaucgaggagggcaaaauugugcacaucuccacacugucagggagcgcccaacaugucgaagagugcaguuguuacccucgcuauccaggaguuagaugcguguguagggacaauuggaagggcucuaaccggccgauaguagauauuaaugugaaggacuacuccaucgucagcucguacgugugcucuggucuuguuggggacacgccccgcaaaaacgauuccuucucaaguagccacuguuuggacccuaauaacgaagagggaggccauggcgugaaggggugggcuuuugaugacggaaaugaugucuggaugggucgaaccaucuccgaaaaacugagaucuggcuaugagaccuucaaggugauugagggguggagcaaaccaaacucaaagcuacagaucaauaggcagguaauuguugaacggggaaaccguaguggcuacuccgguauauuuagcguggaggggaaaucuugcaucaaucgcuguuucuaugucgaacucauuagaggcaggaaggaggaaacagaggugugguggacuucaaacaguaucgucguguuuugcggaaccagcggcacauacgggacuggauccuggcccgacggugccgauaucaaucugaugccuauuuga

SEQ ID NO: 142642 - RNA, 1410 nt, Artificial Sequence; identical to SEQ ID NO: 142639
  derived and/or modified CDS sequence (opt3) from neuraminidase__InfluenzaA__ABC41742

SEQ ID NO: 142643 - RNA, 1410 nt, Artificial Sequence; identical to SEQ ID NO: 142639
  derived and/or modified CDS sequence (opt3) from neuraminidase__InfluenzaA__ABC41956

SEQ ID NO: 142644 - RNA, 1410 nt, Artificial Sequence; identical to SEQ ID NO: 142639
  derived and/or modified CDS sequence (opt3) from neuraminidase__InfluenzaA__ABC41967

SEQ ID NO: 142645 - RNA, 1410 nt, Artificial Sequence; identical to SEQ ID NO: 142639
  derived and/or modified CDS sequence (opt3) from neuraminidase__InfluenzaA__ABC42017

SEQ ID NO: 142646 - RNA, 1410 nt, Artificial Sequence; identical to SEQ ID NO: 142639
  derived and/or modified CDS sequence (opt3) from neuraminidase__InfluenzaA__ABC42117

SEQ ID NO: 142647 - RNA, 1410 nt, Artificial Sequence; identical to SEQ ID NO: 142639
  derived and/or modified CDS sequence (opt3) from neuraminidase__InfluenzaA__ABC42128

SEQ ID NO: 142648 - RNA, 1410 nt, Artificial Sequence; identical to SEQ ID NO: 142639
  derived and/or modified CDS sequence (opt3) from neuraminidase__InfluenzaA__ABC42139

SEQ ID NO: 142649 - RNA, 1410 nt, Artificial Sequence
  derived and/or modified CDS sequence (opt3) from neuraminidase__InfluenzaA__ABC42150
augaaccccaaucagaagaucauuaccauaggcagcgugucccugacaaucgccacuauuugcuuccucaugcaaaucgcuauucuugcaacgaccgucacacugcacuuuaaacagcaugaguguaacucuccuccaaauaaccagguuauguugugcgaaccgacuaucauagagagaaauaucaccgaaauuguguacuuaacaaacaccacuaucgagaaggaaauuugucccaaacugguagaguauaggaauuggucaaagccucagugcaacaucacaggguucgccccauuuaguaaagacaauagcauacggcuauccgcgggaggugauauuugggugacccgcgagcccuacgucucuugugacccugauaagugcuaucaauucgcucucggccaggggacgacucugaacaauggacacucgaacgacaccgugcaugaucgaacaccauaccguacucuucugaugaaugaauugggcguucccuuucaccucgguaccagacagguguguaucgccuggucaagcaguuccugccaugacgggaaggcauggcugcacgucugugugacaggagaugacaaaaacgccaccgcuucuuucauuuauaauggcaggcugguagauagcaucggcuccuggucaaagaaaauccuccggacgcaggagagugaaugcguuuguauuaacgggacuugcacaguggucaugaccgacggaagcgcaucugguaaggccgauacuaaaauauuauuuaucgaggagggcaagauugugcacaucuccacacugucagggagcgcucaacauguggaagagugcaguuguuacccucgcuauccaggagucagaugcguuuguagggacaacuggaagggcucuaaucggccgauaguggauauuaacguaaaagacuacuccaucgugagcucguacgucugcucuggucuugugggggacacccccaggaagaaugauuccuucucaaguagccacuguuuggacccuaacaaugaagagggaggccauggcguuaaagggugggccuuugaugacggaaacgauguguggaugggucgaacgaucuccggcaagcugagaucuggguaugaaaccuucaaagucauugagggauggagcaagccaaauucaaaacuacagaucaaccgccaggugauuguagagcggggcaaucguagugguuacuccgggauauuuagcguugaaggcaagucuugcaucaaccgcuguuucuauguggagcucauuagaggaaggaaggaagagacagaagucugguggacuucaaauaguaucguggucuuuugcggcaccagcgggacauacggaacugguuccuggcccgacggcgcggauaucaaccugaugccuauuuga

SEQ ID NO: 142650 - RNA, 1410 nt, Artificial Sequence; identical to SEQ ID NO: 142639
  derived and/or modified CDS sequence (opt3) from neuraminidase__InfluenzaA__ABC42161

SEQ ID NO: 142651 - RNA, 1410 nt, Artificial Sequence
  derived and/or modified CDS sequence (opt3) from neuraminidase__InfluenzaA__ABC42172
augaaccccaaucagaagaucauuaccauaggcagcgugucccugacaaucgccacuauuugcucucucaugcaaaucgcuauucuugucacgaccguuacacugcacuucaaacagcaugaguguaacucaccuccaaauaaccaggugauguugugcgaaccgacuaucauagagagaaauaucaccgaaauuguauacuuaacaaacaccacuaucgagaaggaaauuugucccaaacugguggaguauaggaauuggaguaagccucagugcaacaucacaggguuugcaccauucagcaaagacaauuccauacggcuaucugccggaggugauauuugggucacccgcgagcccuacgugucgugugacccugauaagugcuaucaauuugcgcucggccaggggacgacucugaacaauggacacucaaacgacaccguucaugaucgaacaccauaccguacucuucugaugaaugaauugggcgugcccuuccaccucgguaccagacaggucuguaucgcuuggagcaguuccucuugccaugacgggaaggccuggcugcacguguguguaacaggagaugacaaaaacgcaaccgccagcuuuauuuauaauggcaggcugguugauuccaucggcucauggaguaagaaaauccuccggacgcaggagagcgaaugcguguguauuaacgggacuugcacagucgugaugaccgacggaucugcuuccgguaaggcagauacuaaaauauuauucaucgaggagggcaagauugugcacaucucaacacugagcgggagugcccaacaugucgaagagugcucuuguuacccucgcuauccaggaguuagaugcguguguagggacaacuggaagggcuccaaucggccgauaguagauauuaacgugaaagacuacagcaucgucucgucuuacgugugcuccggucuuguuggggacacuccccgcaagaaugauucauuuaguagcucccacuguuuggacccuaacaaugaagagggaggccauggcgugaaagggugggcuuucgaugacggaaacgaugucuggaugggucgaacgaucucugaaaagcugagaagcggcuaugagaccuuuaaagugauugagggguggucaaagccaaauaguaaacuacagaucaacaggcagguaauuguugaacggggaaaucguuccggcuacagcgguauauucucuguggaggggaagucaugcaucaaccgcuguuuuuaugucgaacucauuagaggcaggaaggaggaaacagaggugugguggaccaguaauagcaucgucguguucugcggaaccuccggcacauacgggacuggaucuuggcccgacggugccgauaucaaccugaugccuauuuga

SEQ ID NO: 142652 - RNA, 1410 nt, Artificial Sequence; identical to SEQ ID NO: 142639
  derived and/or modified CDS sequence (opt3) from neuraminidase__InfluenzaA__ABC42183

SEQ ID NO: 142653 - RNA, 1410 nt, Artificial Sequence; identical to SEQ ID NO: 142639
  derived and/or modified CDS sequence (opt3) from neuraminidase__InfluenzaA__ABC42195

SEQ ID NO: 142654 - RNA, 1410 nt, Artificial Sequence; identical to SEQ ID NO: 142639
  derived and/or modified CDS sequence (opt3) from neuraminidase__InfluenzaA__ABC42310

SEQ ID NO: 142655 - RNA, 1410 nt, Artificial Sequence; identical to SEQ ID NO: 142639
  derived and/or modified CDS sequence (opt3) from neuraminidase__InfluenzaA__ABC42321

SEQ ID NO: 142656 - RNA, 1410 nt, Artificial Sequence; identical to SEQ ID NO: 142639
  derived and/or modified CDS sequence (opt3) from neuraminidase__InfluenzaA__ABC42349

SEQ ID NO: 142657 - RNA, 1410 nt, Artificial Sequence; identical to SEQ ID NO: 142639
  derived and/or modified CDS sequence (opt3) from neuraminidase__InfluenzaA__ABC42464

SEQ ID NO: 142658 - RNA, 1410 nt, Artificial Sequence; identical to SEQ ID NO: 142639
  derived and/or modified CDS sequence (opt3) from neuraminidase__InfluenzaA__ABC42497

SEQ ID NO: 142659 - RNA, 1410 nt, Artificial Sequence; identical to SEQ ID NO: 142639
  derived and/or modified CDS sequence (opt3) from neuraminidase__InfluenzaA__ABC42508

SEQ ID NO: 142660 - RNA, 1410 nt, Artificial Sequence; identical to SEQ ID NO: 142639
  derived and/or modified CDS sequence (opt3) from neuraminidase__InfluenzaA__ABC42519

SEQ ID NO: 142661 - RNA, 1410 nt, Artificial Sequence; identical to SEQ ID NO: 142639
  derived and/or modified CDS sequence (opt3) from neuraminidase__InfluenzaA__ABC42530

SEQ ID NO: 142662 - RNA, 1410 nt, Artificial Sequence; identical to SEQ ID NO: 142639
  derived and/or modified CDS sequence (opt3) from neuraminidase__InfluenzaA__ABC42577

SEQ ID NO: 142663 - RNA, 1410 nt, Artificial Sequence; identical to SEQ ID NO: 142639
  derived and/or modified CDS sequence (opt3) from neuraminidase__InfluenzaA__ABC42588

SEQ ID NO: 142664 - RNA, 1410 nt, Artificial Sequence; identical to SEQ ID NO: 142375
  derived and/or modified CDS sequence (opt3) from neuraminidase__InfluenzaA__ABC42599

SEQ ID NO: 142665 - RNA, 1410 nt, Artificial Sequence; identical to SEQ ID NO: 142375
  derived and/or modified CDS sequence (opt3) from neuraminidase__InfluenzaA__ABC42610

SEQ ID NO: 142666 - RNA, 1410 nt, Artificial Sequence; identical to SEQ ID NO: 142375
  derived and/or modified CDS sequence (opt3) from neuraminidase__InfluenzaA__ABC42621

SEQ ID NO: 142667 - RNA, 1410 nt, Artificial Sequence; identical to SEQ ID NO: 142375
  derived and/or modified CDS sequence (opt3) from neuraminidase__InfluenzaA__ABC42632

SEQ ID NO: 142668 - RNA, 1410 nt, Artificial Sequence; identical to SEQ ID NO: 142375
  derived and/or modified CDS sequence (opt3) from neuraminidase__InfluenzaA__ABC42643

SEQ ID NO: 142669 - RNA, 1410 nt, Artificial Sequence; identical to SEQ ID NO: 142375
  derived and/or modified CDS sequence (opt3) from neuraminidase__InfluenzaA__ABC42654

SEQ ID NO: 142670 - RNA, 1410 nt, Artificial Sequence; identical to SEQ ID NO: 142375
  derived and/or modified CDS sequence (opt3) from neuraminidase__InfluenzaA__ABC42665

SEQ ID NO: 142671 - RNA, 1410 nt, Artificial Sequence; identical to SEQ ID NO: 142375
  derived and/or modified CDS sequence (opt3) from neuraminidase__InfluenzaA__ABC42676

SEQ ID NO: 142672 - RNA, 1410 nt, Artificial Sequence; identical to SEQ ID NO: 142375
  derived and/or modified CDS sequence (opt3) from neuraminidase__InfluenzaA__ABC42687

SEQ ID NO: 142673 - RNA, 1410 nt, Artificial Sequence; identical to SEQ ID NO: 142375
  derived and/or modified CDS sequence (opt3) from neuraminidase__InfluenzaA__ABC42698

SEQ ID NO: 142674 - RNA, 1410 nt, Artificial Sequence; identical to SEQ ID NO: 142375
  derived and/or modified CDS sequence (opt3) from neuraminidase__InfluenzaA__ABC42709

SEQ ID NO: 142675 - RNA, 1410 nt, Artificial Sequence; identical to SEQ ID NO: 142375
  derived and/or modified CDS sequence (opt3) from neuraminidase__InfluenzaA__ABC42720

SEQ ID NO: 142676 - RNA, 1410 nt, Artificial Sequence
  derived and/or modified CDS sequence (opt3) from neuraminidase__InfluenzaA__ABC42742
augaaccccaaucagaagaucauuaccauaggcagcgugucccugacaaucucuacuauuugcuucuuuaugcagaucgccauucucaugacgaccgucacacuucacuucaaacaguacgaguuuaacucaccuccaaauaaccagguuaugcugugugaaccgacuaucauagagagaaauaucaccgaaauuguguauuugacaaacaccacuaucgagaaggaaauuugccccaaauuagcugaguacaggaauuggaguaagccucagugugacaucacaggguucgcaccauuuagcaaagauaacuccauacggcugucugccggaggugacauuuggguaacccgcgagcccuaugugucgugcgauccugacaaguguuaccaauucgcgcuaggccaggggacgacucucaauaacguccauucaaaugauaccgugcacgaccgaacaccauaucguacucugcuuaugaacgaacugggaguucccuuucauuugggcaccaaacaggugugcaucgcuuggagcaguuccucuugucacgaugguaaggccuggcuccaugucugcgugacaggggacgauaagaaugcaaccgccagcuucauuuacaacggaagacugguagacuccaucguuucauggaguaaagagauccugaggacgcaggaaagcgagugugugugcauuaauggcacuuguacagucgugaugaccgauggcucugcuuccgggaaggcagacacuaaaauacucuuuaucgaggaaggaaagauugugcacacaucaaccuuaagcgguagugcccaacacgucgaggaaugcucuugcuauccucgguacccaggcguucgcugugugugcagagauaacuggaagggguccaacaggccgaucguagacauaaauauuaaagacuacagcaucgugucgucuuaugucuguuccggacuggugggcgauacgccccggcgcaacgacucaaguagcuccucucauugccuugauccuaauaacgaggaaggugggcacggaguuaagggcugggcuuucgacgauggcaaugacguguggauggggcgaaccaucagcgagaaauugagaucaggauacgagacauuuaaggucauugaagguuggaguaacccaaauuccaaacugcagaucaacaggcaagugauuguagaucggggcaaucguagcggguauucuggaauauucucaguugagggcaagaguuguaucaaccgcugcuuuuacguggaacuaauuagagguaggaaagaggaaacugagguccucuggaccagcaauuccaucguggucuucugugggacaucuggcacuuauggaaccggcucguggcccgacggggccgauaucaaccugaugccuauuuga

SEQ ID NO: 142677 - RNA, 1410 nt, Artificial Sequence; identical to SEQ ID NO: 142375
  derived and/or modified CDS sequence (opt3) from neuraminidase__InfluenzaA__ABC42764

SEQ ID NO: 142678 - RNA, 1410 nt, Artificial Sequence; identical to SEQ ID NO: 142375
  derived and/or modified CDS sequence (opt3) from neuraminidase__InfluenzaA__ABC42775

SEQ ID NO: 142679 - RNA, 1410 nt, Artificial Sequence; identical to SEQ ID NO: 142375
  derived and/or modified CDS sequence (opt3) from neuraminidase__InfluenzaA__ABC42786

SEQ ID NO: 142680 - RNA, 1410 nt, Artificial Sequence; identical to SEQ ID NO: 142375
  derived and/or modified CDS sequence (opt3) from neuraminidase__InfluenzaA__ABC42797

SEQ ID NO: 142681 - RNA, 1410 nt, Artificial Sequence; identical to SEQ ID NO: 142375
  derived and/or modified CDS sequence (opt3) from neuraminidase__InfluenzaA__ABC42808

SEQ ID NO: 142682 - RNA, 1410 nt, Artificial Sequence; identical to SEQ ID NO: 142375
  derived and/or modified CDS sequence (opt3) from neuraminidase__InfluenzaA__ABC42819

SEQ ID NO: 142683 - RNA, 1410 nt, Artificial Sequence
  derived and/or modified CDS sequence (opt3) from neuraminidase__InfluenzaA__ABC42841
augaaccccaaucagaagaucauuaccauaggcagcgugucccugacaaucucuacuauuugcuucuuuaugcagaucgccauucucaucacgaccgucacacuucacuucaaacaguacgaguuuaacucaccuccaaauaaccagguuaugcugugugaaccgacuauaaucgagagaaauauuaccgaaaucguguauuugacaaacaccacuauugagaaggaaaucugccccaaauuagcugaguacaggaauuggaguaagccucagugugacauaacaggguucgcaccauuuagcaaagauaacuccauucggcugucugccggaggugacaucuggguaacccgcgagcccuaugugucgugcgauccugacaaguguuaccaauucgcgcuaggccaggggacgacucucaauaacguccauucaaaugauaccgugcacgaccgaacaccauaucguacucugcuuaugaacgaacugggaguucccuuucauuugggcaccaaacaggugugcauugcuuggagcaguuccucuugucacgaugguaaggccuggcuccaugucugcgugacaggggacgauaagaaugcaaccgccagcuucaucuacaacggaagacugguagacuccaucguuucauggaguaaagagauucugaggacgcaggaaagcgagugugugugcauaaauggcacuuguacagucgugaugaccgauggcucugcuucccggaaggcagacacuaaaauccucuuuauugaggaagggaagaucgugcacacaucaaccuuaagcggaagugcccaacacgucgaggaaugcucuugcuauccucgcuacccagguguuagaugugugugcagggauaacuggaagggcuccaaccggccgauaguagacauuaauaucaaagacuacagcaucgugucgucuuaugucuguuccgggcuggugggagauacgccccgcaagaacgacucaaguagcuccucucauugccuugauccuaauaacgaggaaggcggucacgggguuaaaggaugggcuuucgacgauggcaaugacguguggaugggccgaaccauuagcgagaaguugagaucaggguacgagacauuuaaagucaucgaaggauggaguaacccaaauuccaagcugcagauuaacaggcaagugauaguagaucgggguaaucguagcggcuauucugggaucuucucaguugagggaaaaaguuguauuaaccgcugcuuuuacguggaacuaaucagaggcaggaaggaggaaacugagguccucuggaccagcaauuccaucguggucuucugugguacaucugggacuuauggcaccggaucguggcccgacggcgccgauauuaaccugaugccuauauga

SEQ ID NO: 142684 - RNA, 1410 nt, Artificial Sequence; identical to SEQ ID NO: 142375
  derived and/or modified CDS sequence (opt3) from neuraminidase__InfluenzaA__ABC42852

SEQ ID NO: 142685 - RNA, 1410 nt, Artificial Sequence; identical to SEQ ID NO: 142375
  derived and/or modified CDS sequence (opt3) from neuraminidase__InfluenzaA__ABC42863

SEQ ID NO: 142686 - RNA, 1410 nt, Artificial Sequence; identical to SEQ ID NO: 142214
  derived and/or modified CDS sequence (opt3) from neuraminidase__InfluenzaA__ABC42874

SEQ ID NO: 142687 - RNA, 1410 nt, Artificial Sequence; identical to SEQ ID NO: 142214
  derived and/or modified CDS sequence (opt3) from neuraminidase__InfluenzaA__ABC42885

SEQ ID NO: 142688 - RNA, 1410 nt, Artificial Sequence; identical to SEQ ID NO: 142214
  derived and/or modified CDS sequence (opt3) from neuraminidase__InfluenzaA__ABC42896

SEQ ID NO: 142689 - RNA, 1410 nt, Artificial Sequence; identical to SEQ ID NO: 142639
  derived and/or modified CDS sequence (opt3) from neuraminidase__InfluenzaA__ABC42914

SEQ ID NO: 142690 - RNA, 1410 nt, Artificial Sequence; identical to SEQ ID NO: 142639
  derived and/or modified CDS sequence (opt3) from neuraminidase__InfluenzaA__ABC42932

SEQ ID NO: 142691 - RNA, 1410 nt, Artificial Sequence
  derived and/or modified CDS sequence (opt3) from neuraminidase__InfluenzaA__ABC42943
augaaccccaaucagaagaucauuaccauaggcagcgugucccugacaaucgccacuauuugcuuccucaugcaaaucgcuauucuugucacgaccguuacacugcacuuuaaacagcaugaguguaacucuccuccaaauaaccaggugauguugugcgaaccgacuaucauagagagaaauaucaccgaaauuguauacuuaacaaacaccacuaucgagaaggaaauuugucccaaacuggugggguauaggaauuggucaaagccucagugcaacaucacaggauucgcaccauuuaguaaagacaauagcauacggcuauccgccgguggcgauauuugggucacccgcgagcccuacgugucuugugacccugauaagugcuaucaauucgcgcucgggcagggaacgacucugaacaauggccacucgaacgacaccguucaugaucgaacaccauaccguacucuucugaugaaugaguugggugugcccuuucaccucgggaccagacaggucuguaucgcuuggucaagcaguuccugccaugacggaaaggccuggcugcacguguguguaacaggcgaugacaaaaacgcaaccgccucuuucauuuauaauggcaggcugguugauagcaucggguccuggucaaagaaaauccuccggacgcaggaaagugagugcguguguauuaacggaacuugcacagucgugaugaccgacgguagcgcuucuggcaaggcagauacuaaaauauuauuuaucgaagaggggaagauugugcacaucuccacacugucaggaagcgcccaacaugucgaggaaugcaguuguuacccucgcuauccaggcguuagaugcguguguagggacaacuggaaggguucuaaucggccgauaguagauauuaacgugaaagacuacuccaucgucagcucguacgugugcucugggcuuguuggagacacgccccgcaagaaugauuccuucucaaguagccacuguuuggacccuaacaaugaggaaggcggccauggggugaaaggaugggcuuuugaugacgguaacgaugucuggaugggccgaaccaucuccgagaagcugagaucuggguaugaaaccuucaaagugauugagggauggagcaagccaaauucaaaacuacagaucaacaggcagguaauuguugagcggggcaaucguagugguuacuccgggauauuuagcguggaaggcaagucuugcaucaaccgcuguuucuaugucgagcucauuagaggaaggaaggaagagacagaagugugguggacuucaaauaguaucgucguguuuugcggcaccagcgggacauacggaacugguuccuggcccgacggcgccgauaucaaccugaugccuauuuga

SEQ ID NO: 142692 - RNA, 1410 nt, Artificial Sequence; identical to SEQ ID NO: 142639
  derived and/or modified CDS sequence (opt3) from neuraminidase__InfluenzaA__ABC42954

SEQ ID NO: 142693 - RNA, 1410 nt, Artificial Sequence; identical to SEQ ID NO: 142639
  derived and/or modified CDS sequence (opt3) from neuraminidase__InfluenzaA__ABC42965

SEQ ID NO: 142694 - RNA, 1410 nt, Artificial Sequence
  derived and/or modified CDS sequence (opt3) from neuraminidase__InfluenzaA__ABC42976
augaaccccaaucagaagaucauuaccauaggcagcgugucccugacaaucgccacuauuugcuuccucaugcaaaucgcuauucuugucacgaccguuacacugcacuuuaaacagcaugaguguaacucuccuccaaauaaccaggcaauguugugcgaaccgacuaucauagagagaaauaucaccgaaauuguguacuuaacaaacaccacuaucgagaaggaaauuugucccaaacugguagaguauaggaauuggucaaagccucagugcaacaucacaggguucgccccauuuaguaaagacaauagcauacggcuauccgcgggaggugauauuugggugacccgcgagcccuacgucucuugugacccugauaagugcuaucaauucgcucucggccaggggacgacucugaacaauggacacucgaacgacaccgugcaugaucgaacaccauaccguacucuucugaugaaugaauugggcguucccuuucaccucgguaccagacagguguguaucgccuggucaagcaguuccugccaugacgggaaggcauggcugcacgucugugugacaggagaugacaaaaacgccaccgcuucuuucauuuauaauggcaggcugguagauagcaucggcuccuggucaaagaaaauccuccggacgcaggagagugaaugcguuuguauuaacgggacuugcacaguggucaugaccgacggaagcgcaucugguaaggccgauacuaaaauauuauuuaucgaggagggcaagauugugcacaucuccacacugucagggagcgcucaacauguggaagagugcaguuguuacccucgcuauccaggagucagaugcguuuguagggacaacuggaagggcucuaaucggccgauaguggauauuaacguaaaagacuacuccaucgugagcucguacgucugcucuggucuugugggggacacccccaggaagaaugauuccuucucaaguagccacuguuuggacccuaacaaugaagagggaggccauggcguuaaagggugggccuuugaugacggaaacgauguguggaugggucgaacgaucuccgaaaagcugagaucuggcuaugagaccuucaaagucauugagggguggagcaagccaaauucaaaacuacagaucaaccgccaggugauuguagaacggggaaaucguaguggcuacuccgguauauuuagcguugaggggaagucuugcaucaaccgcuguuucuauguggaacucauuagaggcaggaaggaggaaacagaggucugguggacuucaaauaguaucguggucuuuugcggaaccagcggcacauacgggacuggauccuggcccgacggugcggauaucaaccugaugccuauuuga

SEQ ID NO: 142695 - RNA, 1410 nt, Artificial Sequence; identical to SEQ ID NO: 142639
  derived and/or modified CDS sequence (opt3) from neuraminidase__InfluenzaA__ABC42987

SEQ ID NO: 142696 - RNA, 1410 nt, Artificial Sequence; identical to SEQ ID NO: 142639
  derived and/or modified CDS sequence (opt3) from neuraminidase__InfluenzaA__ABC42998

SEQ ID NO: 142697 - RNA, 1410 nt, Artificial Sequence; identical to SEQ ID NO: 142639
  derived and/or modified CDS sequence (opt3) from neuraminidase__InfluenzaA__ABC43009

SEQ ID NO: 142698 - RNA, 1410 nt, Artificial Sequence; identical to SEQ ID NO: 142639
  derived and/or modified CDS sequence (opt3) from neuraminidase__InfluenzaA__ABC43020

SEQ ID NO: 142699 - RNA, 1410 nt, Artificial Sequence
  derived and/or modified CDS sequence (opt3) from neuraminidase__InfluenzaA__ABC43042
augaaccccaaucagaagaucauuaccauaggcagcgugucccugacaaucgccacuauuugcuuccucaugcaaaucgcuauucuugucacgaccguuacacugcacuuuaaacagcaugaguguaacucuccuccaaauaaccaggugauguugugcgaaccgacuaucauagagagaaauaucaccgaaauuguauacuuaacaaacaccacuaucgagaaggaaauuugucccaaacugguggaguauaggaauuggucaaagccucagugcaacaucacaggguucgcaccauuuaguaaagacaauagcauacggcuauccgccggaggugauauuugggucacccgcgagcccuacgugucuugugacccugauaagugcuaucaauucgcgcucggccaggggacgacucugaacaauggacacucgaacgacaccguucaugaucgaacaccauaccguacucuucugaugaaugaauugggcgugcccuuucaccucgguaccagacaggucuguaucgcuuggucaagcaguuccugccaugacgggaaggccuggcugcacguguguguaacaggagaugacaaaaacgcaaccgccucuuucauuuauaauggcaggcugguugauagcaucggcuccuggucaaagaaaauccuccggacgcaggagagugaaugcguguguauuaacgggacuugcacagucgugaugaccgacggaagcgcuucugguaaggcagauacuaaaauauuauuuaucgaggagggcaagauugugcacaucuccacacugucagggagcgcccaacaugucgaagagugcaguuguuacccucgcuauccaggaguuagaugcguguguagggacaacuggaagggcucuaaucggccgauaguagauauuaacgugaaagacuacuccaucgucagcucguacgugugcucuggucuuguuggggacacgccccgcaagaaugauuccuucucaaguagccacuguuuggacccuaacaaugaagagggaggccauggcgugaaagggugggcuuuugaugacggaaacgaugucuggaugggucgaaccaucuccgaaaagcugagaucuggcuaugagaccuucaaagugauugagggguggagcaagccaaauucaaaacuacagaucaacaggcagguaauuguugaacggggaaaucguaguggcuacuccgguauauuuagcguggaggggaagucuugcaucaaccgcuguuucuaugucgaacucauuagaggcaggaaggaggaaacagaggugugguggacuucaaauaguaucgucguguuuugcggaaccagcggcacauacgggacuggauccuggcccgacggugccgauaucaaccugaugucuauuuga

SEQ ID NO: 142700 - RNA, 1410 nt, Artificial Sequence; identical to SEQ ID NO: 142639
  derived and/or modified CDS sequence (opt3) from neuraminidase__InfluenzaA__ABC43053

SEQ ID NO: 142701 - RNA, 1410 nt, Artificial Sequence
  derived and/or modified CDS sequence (opt3) from neuraminidase__InfluenzaA__ABC43064
augaaccccaaucagaagaucauuaccauaggcagcgugucccugacaaucgccacuauuugcuuccucaugcaaaucgcuauucuugucacgaccguuacacugcacuuuaaacagcaugaguguaacucuccuccaaauaaccaggugauguugugcgaaccgacuaucauagagagaaauaucaccgaaauuguauacuuaacaaacaccacuaucgagaaggaaauuugucccaaacugguggaguauaggaauuggucaaagccucagugcaacaucacaggguucgcaccauuuaguaaagacaauagcauacggcuauccgccggaggugauauuugggucacccgcgagcccuacgugucuugugacccugauaagugcuaucaauucgcgcucggccaggggacgacucugaacaauggacacucgaacgacaccguucaugaucgaacaccauaccguacucuucugaugaaugaauugggcgugcccuuucaccucgguaccagacaggucuguaucgcuuggucaagcaguuccugccaugacgggaaggccuggcugcacguguguguaacaggagaugacaaaaacgcaaccgccucuuucauuuauaauggcaggcugguugauagcaucggcuccuggucaaagaaaauccuccggacgcaggagagugaaugcguguguauuaacgggacuugcacagucgugaugaccgacggaagcgcuucugguaaggcagauacuaaaauauuauuuaucgaggagggcaagauugugcacaucuccacacugucagggagcgcccaacaugucgaagagugcaguuguuacccucgcuauccaggaguuagaugcguguguagggacaacuggaagggcucuaaucggccgauaguagauauuaacgugaaagacuacuccaucgucagcucguacgugugcucuggucuuguuggggacacgccccgcaagaaugauuccuucucaaguagccacuguuuggacccuaacaaugaagagggaggccauggcgugaaagggugggcuuuugaugacggaaacgaugucuggaugggucgaaccaucuccgaaaagcugagaucuggcuaugagaccuucaaagugauugagggguggagcaagccaaauucaaaacuacagaucaacaggcagguaauuguugaacggggaaaucguaguggcuacuccgguauauuuagcguggaggggaagucuugcaucaaccgcuguuucuaugucgaacucauuagaggcaggaaggagaaaacagaagugugguggacuucaaauaguaucgucguguuuugcggaaccagcggcacauacgggacuggauccuggcccgacggugccgauaucaaccugaugccuauuuga

SEQ ID NO: 142702 - RNA, 1410 nt, Artificial Sequence; identical to SEQ ID NO: 142639
  derived and/or modified CDS sequence (opt3) from neuraminidase__InfluenzaA__ABC43075

SEQ ID NO: 142703 - RNA, 1410 nt, Artificial Sequence
  derived and/or modified CDS sequence (opt3) from neuraminidase__InfluenzaA__ABC43086
augaaccccaaucagaagaucauuaccauaggcagcgugucccugaucauugccacaaucugcuuccucaugcaaauugcuauccuugucacuacgguuacccugcacuuuaaacagcaugaguguaacucuccuccaaauaaccaggugauguugugcgaaccgacaauaaucgagagaaauauuacugaaaucguauacuuaaccaacacaaccauugagaaggaaaucugucccaaacugguggaguauaggaauuggucaaagccucagugcaacauaacuggguucgcaccauuuaguaaagacaauagcauucggcuauccgccggaggugauaucugggucacacgcgagcccuacgugucuugugacccugauaagugcuaucaauucgcgcucggccaggggaccacgcugaacaauggacacucgaacgacacuguucaugaucgaaccccauaccguacacuucugaugaaugaauugggcgugcccuuucaccucgguacuagacaggucuguauugcuuggucaagcaguuccugccaugacgggaaggccuggcugcacguguguguaaccggagaugacaaaaacgcaacagccucuuucaucuauaauggcaggcugguugauagcaucggcuccuggucaaagaaaauucuccggacccaggagagugaaugcguguguauaaacgggacgugcacugucgugaugacagacggaagcgcuucugguaaggcagauaccaaaaucuuauuuauugaggagggcaagaucgugcacauauccacucugucagggagcgcccaacaugucgaagagugcaguuguuacccucgcuauccaggaguuagaugcguguguagggacaacuggaagggcucuaaucggccgauuguagauaucaacgugaaagacuacuccaucgucagcucguacgugugcucuggucuuguuggggacacaccccgcaagaaugauuccuucucaaguagccacuguuuggacccuaacaaugaagagggaggccauggcgugaaagggugggcuuuugaugacggaaacgaugucuggaugggucgaaccauuuccgaaaagcugagaucuggcuaugagacguucaaagugaucgagggguggagcaagccaaauucaaaacuacagauuaacaggcagguaauaguugaacggggaaaucguaguggcuacuccgguaucuuuagcguggaggggaagucuugcauuaaccgcuguuucuaugucgaacucaucagaggcaggaaggaggaaaccgaggugugguggacaucaaauaguaucgucguguuuugcggaacuagcggcaccuacgggacaggauccuggcccgacggugccgauauuaaccugaugccuauauga

SEQ ID NO: 142704 - RNA, 1410 nt, Artificial Sequence; identical to SEQ ID NO: 142639
  derived and/or modified CDS sequence (opt3) from neuraminidase__InfluenzaA__ABC43097

SEQ ID NO: 142705 - RNA, 1410 nt, Artificial Sequence; identical to SEQ ID NO: 142639
  derived and/or modified CDS sequence (opt3) from neuraminidase__InfluenzaA__ABC43108

SEQ ID NO: 142706 - RNA, 1410 nt, Artificial Sequence; identical to SEQ ID NO: 142639
  derived and/or modified CDS sequence (opt3) from neuraminidase__InfluenzaA__ABC43119

SEQ ID NO: 142707 - RNA, 1410 nt, Artificial Sequence; identical to SEQ ID NO: 142375
  derived and/or modified CDS sequence (opt3) from neuraminidase__InfluenzaA__ABC43130

SEQ ID NO: 142708 - RNA, 1410 nt, Artificial Sequence; identical to SEQ ID NO: 142375
  derived and/or modified CDS sequence (opt3) from neuraminidase__InfluenzaA__ABC43141

SEQ ID NO: 142709 - RNA, 1410 nt, Artificial Sequence; identical to SEQ ID NO: 142375
  derived and/or modified CDS sequence (opt3) from neuraminidase__InfluenzaA__ABC43152

SEQ ID NO: 142710 - RNA, 1410 nt, Artificial Sequence; identical to SEQ ID NO: 142375
  derived and/or modified CDS sequence (opt3) from neuraminidase__InfluenzaA__ABC43163

SEQ ID NO: 142711 - RNA, 1410 nt, Artificial Sequence; identical to SEQ ID NO: 142375
  derived and/or modified CDS sequence (opt3) from neuraminidase__InfluenzaA__ABC43174

SEQ ID NO: 142712 - RNA, 1410 nt, Artificial Sequence
  derived and/or modified CDS sequence (opt3) from neuraminidase__InfluenzaA__ABC43185
augaaccccaaucagaagaucauuaccauaggcagcgugucccugacaaucucuacuauuugcuucuuuaugcagaucgccauucucaucacgaccgucacacuucacuucaaacaguacgaguuuaacucaccuccaaauaaccagguuaugcugugugaaccgacuauaaucgagagaaauauuaccgaaaucguguauuugacaaacaccacuauugagaaggaaaucugccccaaauuagcugaguacaggaauuggaguaagccucagugugacauaacaggguucgcaccauuuagcaaagauaacuccauucggcugucugccggaggugacaucuggguaacccgcgagcccuaugugucgugcgauccugacaaguguuaccaauucgcgcuaggccaggggacgacucucaauaacguccauucaaaugauaccgugcacgaccgaacaccauaucguacucugcuuaugaacgaacugggaguucccuuucauuugggcaccaaacaggugugcauugcuuggagcaguuccucuugucacgaugguaaggccuggcuccaugucugcgugacaggggacgauaagaaugcaaccgccagcuucaucuacaacggaagacugguagacuccaucguuucauggaguaaagagauucugaggacgcaggaaagcgagugugugugcauaaauggcacuuguacagucgugaugaccgauggcucugcuuccgggaaggcagacacucggauccucuuuauugaggaaggaaaaaucgugcacacaucaaccuuaagcgguagugcccaacacgucgaggaaugcucuugcuauccucgcuacccaggcguuagaugugugugcagggauaacuggaagggguccaaccggccgauaguagacauuaauaucaaggacuacagcaucgugucgucuuaugucuguuccggacuggugggcgauacgccccgcaaaaacgacucaaguagcuccucucauugccuugauccuaauaacgaggaaggugggcacggaguuaagggcugggcuuucgacgauggcaaugacguguggauggggcgaaccauuagcgagaaauugagaucaggauacgagacauuuaaggucaucgaagguuggaguaacccaaauuccaaacugcagauuaacaggcaagugauaguagaucggggcaaucguagcggguauucuggaaucuucucaguugagggcaagaguuguauuaaccgcugcuuuuacguggaacuaaucagagguaggaaagaggaaacugagguccucuggaccagcaauuccaucguggucuucugugggacaucuggcacuuauggaaccggcucguggcccgacggggccgauauuaaccugaugccuauauga

SEQ ID NO: 142713 - RNA, 1410 nt, Artificial Sequence; identical to SEQ ID NO: 142375
  derived and/or modified CDS sequence (opt3) from neuraminidase__InfluenzaA__ABC43478

SEQ ID NO: 142714 - RNA, 1410 nt, Artificial Sequence; identical to SEQ ID NO: 142375
  derived and/or modified CDS sequence (opt3) from neuraminidase__InfluenzaA__ABC43489

SEQ ID NO: 142715 - RNA, 1410 nt, Artificial Sequence; identical to SEQ ID NO: 142375
  derived and/or modified CDS sequence (opt3) from neuraminidase__InfluenzaA__ABC43500

SEQ ID NO: 142716 - RNA, 1410 nt, Artificial Sequence
  derived and/or modified CDS sequence (opt3) from neuraminidase__InfluenzaA__ABC43511
augaaccccaaucagaagaucauuaccauaggcagcgugucccugacaaucucuacuauuugcuucuuuaugcaaaucgccauucucaucacgaccgucacacuucacuucaaacaguacgaguuuaacucaccuccaaauaaccagguuaugcugugugaaacuaccauaaucgagagaaauauuacagaaaucguguauuugaccaacacuacaauugagaaggaaaucugcccgaaauuagcugaguacaggaauuggaguaagccccagugugacauaaccggguucgcaccuuuuagcaaagauaacuccauucggcugucugccggaggugacaucuggguaacgcgcgagccauaugugucgugcgaucccgacaaguguuaccaauucgcgcuaggccaggggacuacccucaauaacguccauucaaaugauacagugcacgaccgaacuccuuaucguacccugcuuaugaacgaacugggaguuccauuucauuugggcacaaaacaggugugcauugcuuggagcaguuccucuugucacgaugguaaggccuggcuccaugucugcgugaccggggacgauaagaaugcaacggccagcuucaucuacaacggaagacugguagacuccaucguuucauggaguaaagagauucugaggacucaggaaagcgagugugugugcauaaauggcacauguaccgucgugaugacugauggcucugcuuccgggaaggcagacacaaaaauccucuuuauugaggaaggaaagaucgugcacaccucaacguuaagcgguagugcccaacacgucgaggaaugcucuugcuauccccgguacccuggcguucgcugugugugcagagauaacuggaagggguccaacaggccaauaguagacauuaauaucaaagacuacagcaucgugucgucuuaugucuguuccggacuggugggcgauaccccgcggaagaacgacucaaguagcuccucucauugccuugaucccaauaacgaggaaggugggcacggaguuaaaggcugggcuuucgacgauggcaaugacguguggauggggcgcacaauuagcgagaaguugcgaucaggauacgagacuuuuaaagucaucgaagguuggaguaacccuaauuccaagcugcagauuaacagacaggugauaguagauaggggcaaucggagcggguauucuggaaucuucucaguugagggcaaaaguuguauuaaccguugcuuuuacguggaacuaauccgcgguagaaaggaggaaaccgagguccucuggacaagcaauuccaucguggucuucugugggacuucuggcaccuauggaacaggcucguggccagacggggccgauauuaaccugaugcccauauga

SEQ ID NO: 142717 - RNA, 1410 nt, Artificial Sequence; identical to SEQ ID NO: 142375
  derived and/or modified CDS sequence (opt3) from neuraminidase__InfluenzaA__ABC43522

SEQ ID NO: 142718 - RNA, 1410 nt, Artificial Sequence; identical to SEQ ID NO: 142375
  derived and/or modified CDS sequence (opt3) from neuraminidase__InfluenzaA__ABC43533

SEQ ID NO: 142719 - RNA, 1410 nt, Artificial Sequence; identical to SEQ ID NO: 142375
  derived and/or modified CDS sequence (opt3) from neuraminidase__InfluenzaA__ABC43544

SEQ ID NO: 142720 - RNA, 1410 nt, Artificial Sequence; identical to SEQ ID NO: 142375
  derived and/or modified CDS sequence (opt3) from neuraminidase__InfluenzaA__ABC43555

SEQ ID NO: 142721 - RNA, 1410 nt, Artificial Sequence; identical to SEQ ID NO: 142618
  derived and/or modified CDS sequence (opt3) from neuraminidase__InfluenzaA__ABC46557

SEQ ID NO: 142722 - RNA, 1410 nt, Artificial Sequence
  derived and/or modified CDS sequence (opt3) from neuraminidase__InfluenzaA__ABC46579
augaaccccaaucagaagaucauuaccauaggcagcgugucccugacaaucgccacuauuugcuuccucaugcaaaucgcuauucuugucacgaccguuacacugcacuuuaaacaguacgaguguucuucaccuccaaacaaucaggugaugccgugcgaacccaucauaaucgagagaaacauuacugaaaucguauauuugaccaauacaaccauugagaaggaaaucuguccuaaauuaguggaguacaggaacuggaguaagccacagugcaaaauaacuggguucgcacccuuuagcaaggacaauuccauucggcugucugccggaggugauaucugggucacacgcgagccuuaugugucgugugacccaggcaagugcuaccaauucgcgcuagggcagggaaccacgcucgauaacaaacauucaaaugacacuauucacgaucgaacccccuaucguacacugcuuaugaacgaacugggcguuccuuuucauuuggguacuagacagguguguaucgcuuggagcaguuccucuugccacgacgggaaggccuggcuccaugucugugugaccggacacgauaaaaaugcaacagccagcuucaucuacgacggcaggcugguagauuccauuggcucauggaguaagaacauacugcggacccaggagagcgaaugcguuuguaucaaugggacgugcacuguggucaugacagacggaucugcuuccgagcgcgcagauaccaaaauucucuuuaucgaggaagguaagauagugcacauuucaccauuaagcggcagugcccaacauguggaggaaugcucuuguuauccgagauaccccggggucaggugcguuugucgggacaacuggaagggauccaaucgcccugugguagauaucaacgugaaagacuacagcaucgucucgucuuaugugugcuccggccugguuggugacacuccacgaaagaacgauagaucaaguagcuccuacuguaggaaucccaacaaugagaaagggaaccacggagugaagggcugggcuuucgacgauggcaaugacgucuggauggggcggacaauuucugaagagagccguucaggauaugagaccuuuaaagugaucgguggcuggaguacgccuaacuccaaacuucagauuaaucgccagguaauaguugauagcgacaacagaucuggguacucaggaaucuucaguguggaaggcaagagcugcauuaauagguguuuuuaugucgaguugauccggggucgagaacaggagacccgcgugugguggacauccaacucuaucgucguguucugcgggacuucgggcaccuacggaacaggcagcuggccagauggggccgacauuaaucugaugcccauauga

SEQ ID NO: 142723 - RNA, 1410 nt, Artificial Sequence; identical to SEQ ID NO: 142562
  derived and/or modified CDS sequence (opt3) from neuraminidase__InfluenzaA__ABC50170

SEQ ID NO: 142724 - RNA, 1410 nt, Artificial Sequence; identical to SEQ ID NO: 142562
  derived and/or modified CDS sequence (opt3) from neuraminidase__InfluenzaA__ABC50181

SEQ ID NO: 142725 - RNA, 1410 nt, Artificial Sequence; identical to SEQ ID NO: 142562
  derived and/or modified CDS sequence (opt3) from neuraminidase__InfluenzaA__ABC50192

SEQ ID NO: 142726 - RNA, 1410 nt, Artificial Sequence; identical to SEQ ID NO: 142214
  derived and/or modified CDS sequence (opt3) from neuraminidase__InfluenzaA__ABC50203

SEQ ID NO: 142727 - RNA, 1410 nt, Artificial Sequence
  derived and/or modified CDS sequence (opt3) from neuraminidase__InfluenzaA__ABC50214
augaaccccaaucagaagaucauuaccauaggcagcgugucccugacaaucgccacuauuugcuuccucaugcaaaucgcuauucuugucacgaccguuacacugcacuuuaaacaguacgaguguaacucuccuccaaauaaccaggugauguugugcgaaccgacuaucauagagagaaauaucaccgaaauuguauauuuaacaaacaccacuaucgagaaggaaauuugucccaaacuggcagaguacaggaauuggucaaagccucagugcaacaucacaggguucgccccauuuaguaaagacaauagcauacggcuauccgcgggaggugauauuugggugacccgcgagcccuaugucucuugugacccugauaagugcuaccaauucgcucucggccaggggacgacucugaacaauggacauucgaacgacaccgugcacgaucgaacaccauaucguacucuucugaugaaugaauugggcguucccuuucaucucgguaccagacagguguguaucgccuggucaagcaguuccugccacgacgggaaggcauggcugcaugucugugugacaggagaugacgagaacgccaccgcuucuuucauuuacaauggcaggcugguagauagcaucggcuccuggaguaaaaagauccuccggacgcaggaaucagagugcguuuguauuaacgggacuugcacaguggucaugaccgacggaagcgcaucugguaaagccgauacuaagauauuauuuaucgaggaaggcaaaauugugcacaucuccacacugucagggagcgcucaacacguggaggaaugcaguuguuauccucgcuacccaggagucagaugcguuuguagggacaacuggaagggcucuaaucggccgauaauugauaucaacgugaaggacuacuccaucguaagcucguaugugugcucuggucuugucggggacacgccccgcaaaaaugauuccuucucaaguagccauuguuuggacccuaacaaugaggaaggaggccacggcgugaaggggugggccuuugaugacggaaacgauguuuggaugggucgaaccauuuccgagaaacugagaucuggcuacgagaccuucaaggugaucgaaggguggagcaaaccaaaucccaagcuacagacaaacaggcaggucauuguggagcggggaaaucguucaggcuauagugguauauuuuccguagaagggaaaagcugcaucaaccgcuguuucuacguugagcucauuagaggcaggaaggaagagacugaggugugguggaccucuaauucaaucgucguguuuugcggaacaaguggcacuuaugggaccggaagcuggccugacggugcggauaucaaccugaugccaauuuga

SEQ ID NO: 142728 - RNA, 1410 nt, Artificial Sequence; identical to SEQ ID NO: 142214
  derived and/or modified CDS sequence (opt3) from neuraminidase__InfluenzaA__ABC50225

SEQ ID NO: 142729 - RNA, 1410 nt, Artificial Sequence; identical to SEQ ID NO: 142214
  derived and/or modified CDS sequence (opt3) from neuraminidase__InfluenzaA__ABC50247

SEQ ID NO: 142730 - RNA, 1410 nt, Artificial Sequence
  derived and/or modified CDS sequence (opt3) from neuraminidase__InfluenzaA__ABC50258
augaaccccaaucagaagaucauuaccauaggcagcgugucccugacaaucgccacuauuugcuuccucaugcaaaucgcuauucuugucacgaccguuacacugcacuuuaaacaguacgaguguaacucuccuccaaauaaccaggugauguugugcgaaccgacuaucauagagagaaauaucaccgaaauuguauauuuaacaaacaccacuaucgagaaggaaauuugucccaaacuggcagaguacaggaauuggucaaagccucagugcaacaucacaggguucgccccauuuaguaaagacaauagcauacggcuauccgcgggaggugauauuugggugacccgcgagcccuaugucucuugugacccugauaagugcuaccaauucgcucucggccaggggacgacucugaacaauggacauucgaacgacaccgugcacgaucgaacaccauaucguacucuucugaugaaugaauugggcguucccuuucaucucgguaccagacagguguguaucgccuggucaagcaguuccugccacgacgggaaggcauggcugcaugucugugugacaggagaugacgagaacgccaccgcuucuuucauuuacaauggcaggcugguagauagcaucggcuccuggaguaaaaagauccuccggacgcaggaaucagagugcguuuguauuaacgggacuugcacaguggucaugaccgacggaagcgcaucugguaaagccgauacuaagauauuauuuaucgaggaaggcaaaauugugcacaucuccacacugucagggagcgcucaacacguggaggaaugcaguuguuauccucgcuacccaggagucagaugcguuuguagggacaacuggaagggcucuaaucggccgauaauugauaucaacgugaaggacuacuccaucguaagcucguaugugugcucuggucuugucggggacacgccccgcaaaaaugauuccuucucaaguagccauuguuuggacccuaacaaugaggaaggaggccacggcgugaaggggugggccuuugaugacggaaacgauguuuggaugggucgaaccauuuccgagaaacugagaucuggcuacgagaccuucaaggugaucgaaggguggagcaaaccaaauucaaagcuacagacaaacaggcaggucauuguggagcggggaaaucguaguggcuauuccgguauauuuagcaucgaagggaaaucuugcauuaaccgcuguuucuacguagagcucaucagaggcaggaaggaagagacugagguuugguggaccucaaauaguaucguggucuuuugcggaacaagcggcacuuaugggaccggauccuggcccgacggugcggauauuaaccugaugccuauauga

SEQ ID NO: 142731 - RNA, 1410 nt, Artificial Sequence; identical to SEQ ID NO: 142214
  derived and/or modified CDS sequence (opt3) from neuraminidase__InfluenzaA__ABC50280

SEQ ID NO: 142732 - RNA, 1410 nt, Artificial Sequence; identical to SEQ ID NO: 142214
  derived and/or modified CDS sequence (opt3) from neuraminidase__InfluenzaA__ABC50291

SEQ ID NO: 142733 - RNA, 1410 nt, Artificial Sequence
  derived and/or modified CDS sequence (opt3) from neuraminidase__InfluenzaA__ABC50302
augaaccccaaucagaagaucauuaccauaggcagcgugucccugacaaucgccacuauuugcuuccucaugcaaaucgcuauucuuaucacgaccgucacacugcacuuuaaacaguacgaguguaacucuccuccaaauaaccagguuauguugugcgaaccgacuauaaucgagagaaauauuaccgaaaucguguauuuaacaaacaccacuauugagaaggaaaucugucccaaacuggcagaguacaggaauuggucaaagccucagugcaacauaacaggguucgccccauuuaguaaagacaauagcauucggcuauccgcgggaggugauaucuggguaacccgcgagcccuaugugucuugugacccugauaagugcuaccaauucgcucucggccaggggacgacucugaacaauggacauucgaacgacaccguccacgaucgaacaccauaucguacucuucugaugaaugaauugggcgugcccuuucaucucgguaccagacagguuuguauugccuggucaagcaguuccugccacgacgggaaggcauggcugcaugugugugucacaggagaugacgagaacgccaccgcuucuuucaucuacaauggcaggcugguggauagcaucggcuccuggaguaaaaagauucuccggacgcaggaaucagagugcguauguauaaacgggacuugcacaguugugaugaccgacggaagcgcaucugguaaagccgauacuaagaucuuauuuauugaggaaggcaaaaucguccacauauccacacugucagggagcgcucaacacguggaggaaugcaguuguuauccucgcuacccaggagugagaugcgucuguagggacaacuggaagggcucuaaucggccgauuguugauaucaacgugaaggacuacuccaucguaagcucguaugugugcucuggucuugucggggacacgccccgcaaaaaugauuccuucucaaguagccauuguuuggacccuaacaaugaggaaggaggccacggcgugaaggggugggccuuugaugacggaaacgauguuuggaugggucgaaccauuuccgagaaacugagaucuggcuacgagaccuucaaggugaucgaaggguggagcaaaccaaauucaaagcuacagacaaacaggcaggucauuguggagcggggaaaucguaguggcuauuccgguauauuuagcguagaagggaaaucuugcaucaaccgcuguuucuacguugagcucauuagaggcaggaaggaagagacugaggugugguggaccucaaauaguaucgucguguuuugcggaacaagcggcacuuaugggaccggauccuggcccgacggugcggauaucaaccugaugccuauuuga

SEQ ID NO: 142734 - RNA, 1410 nt, Artificial Sequence
  derived and/or modified CDS sequence (opt3) from neuraminidase__InfluenzaA__ABC50313
augaaccccaaucagaagaucauuaccauaggcagcgugucccugacaaucgccacuauuugcuuccucaugcaaaucgcuauucuugucacgaccguuacacugcacuuuaaacagcaugaguguaacucuccuccaaauaaccaggugauguugugcgaaccgacuaucauagagagaaauaucaccgaaauuguauacuuaacaaacaccacuaucgagaaggaaauuugucccaaacuggcagaguauaggaauuggucaaagccucagugcaacaucacaggguucgccccauuuaguaaagacaauagcauacggcuauccgcgggaggugauauuugggugacccgcgagcccuacgucucuugugacccugauaagugcuaucaauucgcucucggccaggggacgacucugaacaauggacacucgaacgacaccgugcaugaucgaacaccauaccguacucuucugaugaaugaauugggcguucccuuucaccucgguaccagacagguguguaucgccuggucaagcaguuccugccaugacgggaaggcauggcugcacgucugugugacaggagaugacgagaacgccaccgcuucuuucauuuauaauggcaggcugguagauagcaucggcuccuggaguaaaaagauccuccggacgcaggaaucagagugcguuuguauuaacgggacuugcacaguggucaugaccgacggaagcgcaucugguaaagccgauacuaagauauuauuuaucgaggaaggcaaaauugugcacaucuccacacugucagggagcgcucaacauguggaggaaugcaguuguuacccucgcuauccaggagucagaugcguuuguagggacaacuggaagggcucuaaucggccgauaguggauauuaacguaaaggacuacuccaucgugagcucguacgucugcucuggucuugugggggacacccccaggaaaaaugauuccuucucaaguagccacuguuuggacccuaacaaugaggaaggaggccauggcguuaaggggugggccuuugaugacggaaacgauguguggaugggucgaacgaucuccgagaaacugagaucuggcuaugagaccuucaaggucauugaaggguggagcaaaccaaauucaaagcuacagacaaaccgccaggugaucguagagcggggaaaucguaguggcuacuccgguauuuuuagcguugaagggaaaucuugcauaaaccgcuguuucuauguggagcucaucagaggcaggaaggaagagacugaggucugguggaccucaaauaguauuguggucuuuugcggaacaagcggcacuuacgggaccggauccuggcccgacggugcggauaucaaccugaugccuaucuga

SEQ ID NO: 142735 - RNA, 1410 nt, Artificial Sequence; identical to SEQ ID NO: 142214
  derived and/or modified CDS sequence (opt3) from neuraminidase__InfluenzaA__ABC50324

SEQ ID NO: 142736 - RNA, 1410 nt, Artificial Sequence; identical to SEQ ID NO: 142202
  derived and/or modified CDS sequence (opt3) from neuraminidase__InfluenzaA__ABC50335

SEQ ID NO: 142737 - RNA, 1410 nt, Artificial Sequence
  derived and/or modified CDS sequence (opt3) from neuraminidase__InfluenzaA__ABC50346
augaaccccaaucagaagaucauuaccauaggcagcgugucccugacaaucgccacuauuugcuuccucaugcaaaucgcuauucuugucacgaccguuacacugcacuuuaaacaguacgaguguaacucuccuccaaauaaccaggugauguugugcgaaccgacuaucauagagagaaauaucaccgaaauuguauauuuaacaaacaccacuaucgagaaggaaauuugucccaaacuggcagaguacaggaauuggucaaagccucagugcaacaucacaggguucgccccauuuaguaaagacaauagcauacggcuauccgcgggaggugauauuugggugacccgcgagcccuaugucucuugugacccugauaagugcuaccaauucgcucucggccaggggacgacucugaacaauggacauucgaacgacaccgugcacgaucgaacaccauaucguacucuucugaugaaugaauugggcguucccuuucaucucgguaccagacagguguguaucgccuggucaagcaguuccugccacgacgggaaggcauggcugcaugucugugugacaggagaugacgagaacgccaccgcuucuuucauuuacaauggcaggcugguagauagcaucggcuccuggaguaaaaagauccuccggacgcaggaaucagagugcguuuguauuaacgggacuugcacaguggucaugaccgacggaagcgcaucugguaaagccgauacuaagauauuauuuaucgaggaaggcaaaauugugcacaucuccacacugucagggagcgcucaacacguggaggaaugcaguuguuauccucgcuacccaggagucagaugcguuuguagggacaacuggaagggcucuaaucggccgauaauugauaucaacgugaaggacuacuccaucguaagcucguaugugugcucuggucuugucggggacacgccccgcaaaaaugauuccuucucaaguagccauuguuuggacccuaacaaugaggaaggaggccacggcgugaaggggugggccuuugaugacggaaacgauguuuggaugggucgaaccauuuccgagaaacugagaucuggcuacgagaccuucaaggugaucgaaggguggagcaaaccaaauucaaagcuacagacaaacaggcaggucauuguggagcggggaaaucguaguggcuauuccgguauauuuagcguagaagggaaaucuugcaucaaccgcuguuucuacguugagcucauuagaggcaggaaggaagagacugaggugugguggaccucaaauaguaucgucguguuuugcggaacaagcggcacuuaugggaccggauccuggcccgacggugcggauaucaaccugaugccuauuuga

SEQ ID NO: 142738 - RNA, 1410 nt, Artificial Sequence; identical to SEQ ID NO: 142214
  derived and/or modified CDS sequence (opt3) from neuraminidase__InfluenzaA__ABC50357

SEQ ID NO: 142739 - RNA, 1410 nt, Artificial Sequence; identical to SEQ ID NO: 142214
  derived and/or modified CDS sequence (opt3) from neuraminidase__InfluenzaA__ABC50368

SEQ ID NO: 142740 - RNA, 1410 nt, Artificial Sequence; identical to SEQ ID NO: 142214
  derived and/or modified CDS sequence (opt3) from neuraminidase__InfluenzaA__ABC50379

SEQ ID NO: 142741 - RNA, 1410 nt, Artificial Sequence; identical to SEQ ID NO: 142214
  derived and/or modified CDS sequence (opt3) from neuraminidase__InfluenzaA__ABC50390

SEQ ID NO: 142742 - RNA, 1410 nt, Artificial Sequence
  derived and/or modified CDS sequence (opt3) from neuraminidase__InfluenzaA__ABC50412
augaaccccaaucagaagaucauuaccauaggcagcgugucccugacaaucucuacuauuugcuucuuuaugcaaaucgccauucucaucacgaccgucacacuucacuucaaacaguacgaguuuaacucaccuccaaauaaccagguuaugcugugugaaccgacuauaaucgagagaaauauuaccgaaaucguguauuugacaaacaccacuauugagaaggaaaucugccccaaauuagcugaguacaggaauuggaguaagccucagugugacauaacaggguucgcaccauuuagcaaagauaacuccauucggcugucugccggaggugacaucuggguaacccgcgagcccuaugugucgugcgauccugacaaguguuaccaauucgcgcuaggccaggggacgacucucaauaacguccauucaaaugauaccgugcacgaccgaacaccauaucguacucugcuuaugaacgaacugggaguucccuuucauuugggcaccaaacaggugugcauugcuuggagcaguuccucuugucacgaugguaaggccuggcuccaugucugcgugacaggggacgauaagaaugcaaccgccagcuucaucuacaacggaagacugguagacuccaucguuucauggaguaaagagauucugaggacgcaggaaagcgagugugugugcauaaauggcacuuguacagucgugaugaccgauggcucugcuuccgggaaggcagacacuaaaauccucuuuauugaggaaggaaagaucgugcacacaucaaccuuaagcgguagugcccaacacgucgaggaaugcucuugcuauccucgguacccaggcguucgcugugugugcagagauaacuggaagggguccaacaggccgauaguagacauuaauaucaaagacuacagcaucgugucgucuuaugucuguuccggacuggugggcgauacgccccggaagaacgacucaaguagcuccucucauugccuugauccuaauaacgaggaaggugggcacggaguuaaaggcugggcuuucgacgauggcaaugacguguggauggggcgcaccauuagcgagaaguugcgacugggauacgagacauuuaaagucaucgaagguuggucaaacccaaauaguaagcuacagauuaacagacaggugauaguagauaggggcaaucgguccggguauagcggaaucuucucuguugagggcaaaucauguauuaaccguugcuuuuacguggaacucauccgcgguagaaaggaggaaacugagguccuguggaccaguaauagcaucguggucuucugugggacauccggcacuuauggaaccggcucuuggcccgacggggccgauauuaaccuuaugccuauauga

SEQ ID NO: 142743 - RNA, 1410 nt, Artificial Sequence; identical to SEQ ID NO: 142742
  derived and/or modified CDS sequence (opt3) from neuraminidase__InfluenzaA__ABC50423

SEQ ID NO: 142744 - RNA, 1410 nt, Artificial Sequence; identical to SEQ ID NO: 142327
  derived and/or modified CDS sequence (opt3) from neuraminidase__InfluenzaA__ABC54671

SEQ ID NO: 142745 - RNA, 1410 nt, Artificial Sequence; identical to SEQ ID NO: 142459
  derived and/or modified CDS sequence (opt3) from neuraminidase__InfluenzaA__ABC54682

SEQ ID NO: 142746 - RNA, 1410 nt, Artificial Sequence; identical to SEQ ID NO: 142639
  derived and/or modified CDS sequence (opt3) from neuraminidase__InfluenzaA__ABC67322

SEQ ID NO: 142747 - RNA, 1410 nt, Artificial Sequence; identical to SEQ ID NO: 142214
  derived and/or modified CDS sequence (opt3) from neuraminidase__InfluenzaA__ABC67474

SEQ ID NO: 142748 - RNA, 1410 nt, Artificial Sequence; identical to SEQ ID NO: 142737
  derived and/or modified CDS sequence (opt3) from neuraminidase__InfluenzaA__ABC67546

SEQ ID NO: 142749 - RNA, 1410 nt, Artificial Sequence
  derived and/or modified CDS sequence (opt3) from neuraminidase__InfluenzaA__ABC67557
augaaccccaaucagaagaucauuaccauaggcagcgugucccugacaaucucuacuauuugcuucuuuaugcaaaucgccauucucgucacgaccguuacacuucacuucaaacaguacgaguuuaacucaccuccaaauaaccaggugaugcugugugaaccgacuaucauagagagaaauaucaccgaaauuguauauuugacaaacaccacuaucgagaaggaaauuugccccaaauuagcugaguacaggaauuggaguaagccucagugugacaucacaggguucgcaccauuuagcaaagauaacuccauacggcugucugccggaggugacauuugggugacccgcgagcccuaugucucgugcgauccugacaaguguuaccaauucgcgcuaggccaggggacgacucucaauaacgugcauucaaaugauaccguucacgaccgaacaccauaucguacucugcuuaugaacgaacugggagugcccuuucauuugggcaccaagcaggucugcaucgcuuggagcaguuccucuugucacgaugguaaagccuggcuccaugugugcguaacaggggacgauaagaaugcaaccgccagcuucauuuacaacggaagacugguugacuccaucgugucauggaguaaaaagauccugaggacgcaggagagcgaaugugucugcauuaauggcacuuguacaguggugaugaccgauggcucugcuuccgggaaagcagacacuaagauacucuuuaucgaggagggaaagauuguccacacaucaaccuuaagcgguagugcccaacacguugaagagugcucuugcuauccucgguacccaggcgugcgcuguguaugcagagauaacuggaaaggguccaacaggccgaucguggacauaaauauuaaggacuacagcaucgucucgucuuauguguguuccggacugguuggcgauacgccccggaaaaacgacucaaguagcuccucucauugccuugauccuaauaacgaagagggugggcacggagugaagggcugggcuuucgacgauggcaaugacgucuggauggggcgcaccaucagcgaaaaauugcgaucaggauacgagacauuuaaggugauugaggguuggaguaacccaaauuccaaacugcagaucaacagacagguaauuguugauaggggcaaucggagcggguauucuggaauauucucaguggaaggcaagaguuguaucaaccguugcuuuuacgucgagcuaauucgcgguagaaaggaagagacugaagugcucuggaccagcaauuccaucgucguguucugugggacaucuggcacuuauggaaccggcucguggcccgacggggccgauaucaaccugaugccuauuuga

SEQ ID NO: 142750 - RNA, 1410 nt, Artificial Sequence
  derived and/or modified CDS sequence (opt3) from neuraminidase__InfluenzaA__ABC67568
augaaccccaaucagaagaucauuaccauaggcagcgugucccugacaaucgccacuauuugcuuccucaugcaaaucgcuauucuugucacgaccguuacacugcacuuuaaacaguacgagugugacucuccugcaaacaaucaggugaugccaugcgaaccgaucauaaucgagagaaacauuacugaaaucguauauuugaccaauacaaccauugagaaggaaaucugucccaaauuaguggaguacaggaacuggucaaagccucagugcaaaauaacuggguucgccccauuuaguaaggauaauagcauucggcuguccgcgggaggugacaucugggucacacgcgagcccuaugugucuugugauccuggcaagugcuaccaauucgcucuagggcagggaaccacgcucgacaacaaacauucgaaugauacuauucacgaccgaaccccacaucguacacugcuuaugaacgaacugggcguucccuuucacuuggguacuagacagguguguaucgccuggucaagcaguuccugccaugaugggaaggcauggcuccacgucugugugaccggauaugacaaaaaugccacagcuucuuucaucuacgauggcaggcugguagacagcauuggcuccuggucacagaacauacugcggacccaagagagugaaugcguuuguaucaaugggacgugcacuguggucaugacagauggaagcgcaucuggucgcgccgacaccaagauucucuuuaucgaggagggcaaaauagugcacauuuccccuuuaucagggagcgcucagcauguggaagagugcaguuguuauccaagauacccgggagucaggugcaucugucgggauaacuggaagggcucuaaucgccccguuguggacaucaacguaaaggacuacuccauugauagcucguaugugugcucuggucuggucggggacacuccucgaaacaaugauagauccucaaacaguuacuguaggaauccaaacaaugaaaaaggaaaccacggcgugaagggcugggccuucgacgaugggaaugacguuuggaugggacggacaaucagcgaggauucccguucugguuaugaaaccuuuaaagugauuggcggguggagcacgcccaacucaaaacuucagauaaaucgccaggucaucguggacagugauaacagauccggauacagcggcauuuucucuguagaggguaagucaugcaucaauagguguuuuuauguugaguugauccgggggcgagaacaagagacccgcgugugguggacaaguaacagcauugucguguucugcggcacuuccggaaccuacggcacagggucuuggccugacggagcgaauauaaaccugaugccaaucuga

SEQ ID NO: 142751 - RNA, 1410 nt, Artificial Sequence
  derived and/or modified CDS sequence (opt3) from neuraminidase__InfluenzaA__ABC67579
augaaccccaaucagaagaucauuaccauaggcagcgugucccugacaaucgccacuauuugcuuccucaugcaaaucgcuauucuugucacgaccguuacacugcacuuuaaacaguacgaguguaacucuccuccaaauaaccaggugauguugugcgaaccgacuaucauagagagaaauaucaccgaaauuguauauuuaacaaacaccacuaucgagaaggaaauuugucccaaaccugcagaguacaggaauuggucaaagccacagugcaaaaucacaggguucgcccccuuuaguaaggacaacagcauacggcuguccgcgggaggugauauuugggugacccgcgagccuuaugucucuugugacccagauaagugcuaccaauucgcucuaggccaggggacgacucucaauaacggacauucgaaugacaccgugcacgaucgaacacccuaucguacucugcuuaugaacgaacugggcguuccuuuucauuuggguaccaaacagguguguaucgccuggucaagcaguuccugccacgacgggaaggcauggcuccaugucugugugacaggacacgaugagaaugccaccgcuucuuucauuuacgacggcagacugguagauagcaucggcuccuggaguaaaaagauccugaggacgcaggaaucagagugcguuuguauuaacgggacuugcacaguggucaugaccgacggaagcgcaucuggucgggccgauacuaaaauacucuuuaucgaggaaggcaagauugugcacaucucccaauuaucagggagcgcucagcauguggaggaaugcaguuguuauccacgcuacccgggagucagaugcguuuguagggacaauuggaagggcucuaaccggcccauaguggauauuaacguaaaagaccacuccaucgugagcucguacgucugcucuggucuggugggggacacaccucgcaagaaugauuccucaaguagcucccauugucuuaacccaaauaacgaggaaggaggccacggcguuaaagggugggccuucgacgauggaaaugacguguggaugggucgaaccaucucugagaaguugagaagcggcuaugagacguuuaaagucauugaaggguggucaaagcccaacaguaaacugcagaucaauaggcaagugauuguagaucggggaaaccguuccggcuacagcgguauauucucuguugaggggaagucaugcaucaaucgcuguuuuuauguggaacuaauuagaggcaggaagcaggagaccgaagucugguggacaaguaacagcaucguggucuucugcggaacuuccggcaccuacgggacaggaucuuggccugacggugcggauaucaaucucaugccaauuuga

SEQ ID NO: 142752 - RNA, 1410 nt, Artificial Sequence; identical to SEQ ID NO: 142375
  derived and/or modified CDS sequence (opt3) from neuraminidase__InfluenzaA__ABC67590

SEQ ID NO: 142753 - RNA, 1410 nt, Artificial Sequence; identical to SEQ ID NO: 142375
  derived and/or modified CDS sequence (opt3) from neuraminidase__InfluenzaA__ABC67601

SEQ ID NO: 142754 - RNA, 1410 nt, Artificial Sequence; identical to SEQ ID NO: 142214
  derived and/or modified CDS sequence (opt3) from neuraminidase__InfluenzaA__ABC67612

SEQ ID NO: 142755 - RNA, 1410 nt, Artificial Sequence; identical to SEQ ID NO: 142214
  derived and/or modified CDS sequence (opt3) from neuraminidase__InfluenzaA__ABC67623

SEQ ID NO: 142756 - RNA, 1410 nt, Artificial Sequence
  derived and/or modified CDS sequence (opt3) from neuraminidase__InfluenzaA__ABC67634
augaaccccaaucagaagaucauuaccauaggcagcgugucccugacaaucgccacuauuugcuuccucaugcagaucgcuauucuugucacgaccguuacacugcacuuuaaacaguacgaguguaacccuccaccgaauaaccaggugauguugugcgaacccacuaucauagagagaaauaucaccgaaauuguauauuuaacaaacaccacuaucgagaaggaaauuuguccuaaacuggcagaguacaggaauuggucuaagccacagugcaacaucacaggguucgcccccuuuucaaaagacaauaguauacggcuaagcgcgggaggugauauuugggugacccgcgagccuuaugucuccugugacccagauaagugcuaccaauucgcucucggccaggggacgacucugaacaauggacauucuaacgacaccgugcacgaucgaacacccuaucguacucuucugaugaaugaauugggcguuccuuuucaucucgguaccagacagguguguaucgccuggucgucaagcaguugccacgacgggaaggcauggcugcaugucugugugacaggagaugacgagaacgccaccgcuuccuucauuuacaauggcaggcugguagauucuaucggcagcugguccaaaaagauccuccggacgcaggaaucagagugcguuuguauuaacgggacuugcacaguggucaugaccgacggaagugcaagcgguaaagccgauacuaagauauuauuuaucgaggaaggcaaaauugugcacaucucuacacuguccgggucagcucaacacguggaggaaugcagcuguuauccacgcuacccgggagucagaugcguuuguagggacaacuggaagggcaguaaucggcccauaguggauauuaacguaaaggacuacucuaucguguccagcuaugucugcucgggucuugugggggacaccccucgcaaaaaugauucuuucuccucaagucauuguuuggacccaaacaaugaggaaggaggccacggcguuaaggggugggccuuugaugacggaaacgauguguggaugggucgaacgaucagcgagaaacugagauccggcuacgagaccuucaaggucauugaaggguggucuaaacccaauagcaagcuacagacaaacaggcaagugaucguagagcggggaaaucguucaggcuauagugguauauuuuccguugaagggaaaagcugcauuaaccgcuguuucuacguggagcucaucagaggcaggaaggaagagacugaggucugguggaccucuaauucaauuguggucuuuugcggaacaaguggcacuuaugggaccggaagcuggccugacggugcggauaucaaccugaugccaaucuga

SEQ ID NO: 142757 - RNA, 1410 nt, Artificial Sequence; identical to SEQ ID NO: 142214
  derived and/or modified CDS sequence (opt3) from neuraminidase__InfluenzaA__ABC67645

SEQ ID NO: 142758 - RNA, 1410 nt, Artificial Sequence; identical to SEQ ID NO: 142214
  derived and/or modified CDS sequence (opt3) from neuraminidase__InfluenzaA__ABC67656

SEQ ID NO: 142759 - RNA, 1410 nt, Artificial Sequence
  derived and/or modified CDS sequence (opt3) from neuraminidase__InfluenzaA__ABC67700
augaaccccaaucagaagaucauuaccauaggcagcgugucccugacaaucucuacuauuugcuucuuuaugcaaaucgccauucucaucacgaccgucacacuucacuucaaacaguacgaguuuaacucaccuccaaauaaccagguuaugcugugugaaccgacuauaaucgagagaaauauuaccgaaaucguguauuugacaaacaccacuauugagaaggaaaucugccccaaauuagcugaguacaggaauuggaguaagccucaguguaacauaacaggguucgcaccauuuagcaaagacaauuccauucggcugucugccggaggugauaucuggguaacccgcgagcccuaugugucgugcgacccugauaaguguuaccaauucgcgcuaggccaggggacgacucucaacaauguccauucaaacgacaccgugcacgaucgaacaccauaucguacucugcuuaugaaugaacugggaguucccuuucauuugggcaccaaacaggugugcauugcuuggagcaguuccucuugucacgacgguaaggccuggcuccaugucugcgugacaggggaugacaagaacgcaaccgccagcuucaucuacaauggaagacugguagauuccaucguuucauggaguaaagagauucugaggacgcaggaaagcgagugugugugcauaaacggcacuuguacagucgugaugaccgacggcucugcuuccgggaaggcagauacuaaaauccucuuuauugaggaaggaaagaucgugcacacaucaaccuuaagcgguagugcccaacacgucgaggaaugcucuugcuauccucgguacccaggcguucgcugugugugcagagacaacuggaagggguccaauaggccgauaguagauauuaacaucaaagacuacagcaucgugucgucuuaugucuguuccggacuggugggcgacacgccccggaagaaugauucaaguagcuccucucauugccuugacccuaacaaugaggaaggugggcacggaguuaaaggcugggcuuucgaugacggcaacgauguguggauggggcgcaccauuagcgagaaguugcgaucaggauacgagacauuuaaagucaucgaagguuggaguaauuccaacagcaagcugcagauuaauagacaggugauaguagacaggggcaaccggucuggguauucaggaaucuucaguguugagggcaaaagcuguauuaaucguugcuuuuacguggaacuaauccgcgguagaaaggaggaaacugagguccucuggaccuccaacucuaucguggucuucugugggacaucgggcacuuauggaaccggcagcuggccagauggggccgacauuaaucugaugcccauauga

SEQ ID NO: 142760 - RNA, 1410 nt, Artificial Sequence
  derived and/or modified CDS sequence (opt3) from neuraminidase__InfluenzaA__ABC67711
augaaccccaaucagaagaucauuaccauaggcagcgugucccugacaaucucuacuauuugcuucuuuaugcaaaucgccauucucaucacgaccgucacacuucacuucaaacaguacgaguuuaacucaccuccaaauaaccagguuaugcugugugaaccgacuauaaucgagagaaauauuaccgaaaucguguauuugacaaacaccacuauugagaaggaaaucugccccaaauuagcugaguacaggaauuggaguaagccucaguguaacauaacaggguucgcaccauuuagcaaagacaauuccauucggcugucugccggaggugauaucuggguaacccgcgagcccuaugugucgugcgacccugauaaguguuaccaauucgcgcuaggccaggggacgacucucaacaauguccauucaaacgacaccgugcacgaucgaacaccauaucguacucugcuuaugaaugaacugggaguucccuuucauuugggcaccaaacaggugugcauugcuuggagcaguuccucuugucacgacgguaaggccuggcuccaugucugcgugacaggggaugacaagaacgcaaccgccagcuucaucuacaauggaagacugguagauuccaucguuucauggaguaaagagauucugaggacgcaggaaagcgagugugugugcauaaacggcacuuguacagucgugaugaccgacggcucugcuuccgggaaggcagauacuaaaauccucuuuauugaggaaggaaagaucgugcacacaucaaccuuaagcgguagugcccaacacgucgaggaaugcucuugcuauccucgguacccaggcguucgcugugugugcagagacaacuggaagggguccaauaggccgauaguagauauuaacaucaaagacuacagcaucgugucgucuuaugucuguuccggacuggugggcgacacgccccggaagaaugauucaaguagcuccucucauugccuugacccuaacaaugaggaaggugggcacggaguuaaaggcugggcuuucgaugacggcaacgauguguggauggggcgcaccauuagcgagaaguugcgaucaggauacgagacauuuaaagucaucgaagguuggaguaauccaaacuccaagcugcagauuaauagacaggugauaguagacaggggcaaccggagcggguauucuggaaucuucucaguugagggcaaaaguuguauuaaucguugcuuuuacguggaacuaauccgcgguagaaaggaggaaacugagguccucuggaccagcaacuccaucguggucuucugugggacaucuggcacuuauggaaccggcucguggcccgauggggccgacauuaaucugaugccuauauga

SEQ ID NO: 142761 - RNA, 1410 nt, Artificial Sequence
  derived and/or modified CDS sequence (opt3) from neuraminidase__InfluenzaA__ABC67736
augaaccccaaucagaagaucauuaccauaggcagcgugucccugacaaucucuacuauuugcuucuuuaugcaaaucgccauucucaucacgaccgucacacuucacuucaaacaguacgaguuuaacucaccuccaaauaaccagguuaugcugugugaaccgacuauaaucgagagaaauauuaccgaaaucguguauuugacaaacaccacuauugagaaggaaaucugccccaaauuagcugaguacaggaauuggaguaagccucaguguaacauaacaggguucgcaccauuuagcaaagacaauuccauucggcugucugccggaggugauaucuggguaacccgcgagcccuaugugucgugcgacccugauaaguguuaccaauucgcgcuaggccaggggacgacucucaacaauguccauucaaacgacaccgugcacgaucgaacaccauaucguacucugcuuaugaaugaacugggaguucccuuucauuugggcaccaaacaggugugcgucgcuuggagcaguuccucuugucacgacgguaaggccuggcuccaugugugcguaacaggggaugacaagaacgcaaccgccagcuucauuuacaauggaagacugguugauuccaucgugucauggaguaaagagauccugaggacgcaggaaagcgagugugucugcauuaacggcacuuguacaguggugaugaccgacggcucugcuuccgggaaggcagauacuaaaauacucuuuaucgaggaaggaaagauuguccacacaucaaccuuaagcgguagugcccaacacguugaggaaugcucuugcuauccucgguacccaggcgugcgcuguguaugcagagacaacuggaagggguccaauaggccgaucguggauauaaacauuaaagacuacagcaucgucucgucuuauguguguuccggacugguuggcgacacgccccggaagaaugauucaaguagcuccucucauugccuugacccuaacaaugaggaaggugggcacggagugaaaggcugggcuuucgaugacggcaacgaugucuggauggggcgcaccaucagcgagaaguugcgaucaggauacgagacauuuaaagugauugaagguuggaguaauccaaacuccaagcugcagaucaauagacagguaauuguugacaggggcaaccggagcggguauucuggaauauucucaguggagggcaaaaguuguaucaaucguugcuuuuacgucgaacuaauucgcgguagaaaggaggaaacugaggugcucuggaccagcaacuccaucgucguguucugugggacaucuggcacuuauggaaccggcucguggcccgauggggccgacaucaaucugaugccuauuuga

SEQ ID NO: 142762 - RNA, 1410 nt, Artificial Sequence
  derived and/or modified CDS sequence (opt3) from neuraminidase__InfluenzaA__ABC67809
augaaccccaaucagaagaucauuaccauaggcagcgugucccugacaaucucuacuauuugcuucuuuaugcaaaucgccauucucaucacgaccgucacacuucacuucaaacaguacgaguuuaacucaccuccaaauaaccagguuaugcugugugaaccgacuauaaucgagagaaauauuaccgaaaucguguauuugacaaacaccacuauugagaaggaaaucugccccaaauuagcugaguacaggaauuggaguaagccucagugugacauaacaggguucgcaccauuuagcaaagauaacuccauucggcugucugccggaggugacaucuggguaacccgcgagcccuaugugucgugcgauccugacaaguguuaccaauucgcgcuaggccaggggacgacucucaauaacguccauucaaaugauaccgugcacgaccgaacaccauaucguacucugcuuaugaacgaacugggaguucccuuucauuugggcaccaaacaggugugcauugcuuggagcaguuccucuugucacgaugguaaggccuggcuccaugucugcgugacaggggacgauaagaaugcaaccgccagcuucaucuacaacggaagacugguagacuccaucguuucauggaguaaaaagauucugaggacgcaggagagcgaaugugugugcauaaauggcacuuguacagucgugaugaccgauggcucugcuuccgggaaagcagacacuaagauccucuuuauugaggagggaaagaucgugcacacaucaaccuuaagcgguagugcccaacacgucgaagagugcucuugcuauccucgguacccaggcguucgcugugugugcagagauaacuggaaaggguccaacaggccgauaguagacauuaauaucaaggacuacagcaucgugucgucuuaugucuguuccggacuggugggcgauacgccccggaaaaacgacucaaguagcuccucucauugccuugauccuaauaacgaagagggugggcacggaguuaagggcugggcuuucgacgauggcaaugacguguggauggggcgcaccauuagcgaaaaauugcgaucaggauacgagacauuuaaggucaucgaggguuggaguaacccaaauuccaaacugcagauuaacagacaggugauaguagauaggggcaaucggagcggguauucuggaaucuucucaguugaaggcaagaguuguauuaaccguugcuuuuacguggagcuaauccgcgguagaaaggaagagacugaaguccucuggaccagcaauuccaucguggucuucugugggacaucuggcacuuauggaaccggcucguggcccgacggggccgauauuaaccugaugccuauauga

SEQ ID NO: 142763 - RNA, 1410 nt, Artificial Sequence; identical to SEQ ID NO: 142639
  derived and/or modified CDS sequence (opt3) from neuraminidase__InfluenzaA__ABC67820

SEQ ID NO: 142764 - RNA, 1410 nt, Artificial Sequence; identical to SEQ ID NO: 142618
  derived and/or modified CDS sequence (opt3) from neuraminidase__InfluenzaA__ABC67842

SEQ ID NO: 142765 - RNA, 1410 nt, Artificial Sequence; identical to SEQ ID NO: 142214
  derived and/or modified CDS sequence (opt3) from neuraminidase__InfluenzaA__ABC67853

SEQ ID NO: 142766 - RNA, 1410 nt, Artificial Sequence; identical to SEQ ID NO: 142618
  derived and/or modified CDS sequence (opt3) from neuraminidase__InfluenzaA__ABC67864

SEQ ID NO: 142767 - RNA, 1410 nt, Artificial Sequence; identical to SEQ ID NO: 142737
  derived and/or modified CDS sequence (opt3) from neuraminidase__InfluenzaA__ABC67886

SEQ ID NO: 142768 - RNA, 1410 nt, Artificial Sequence; identical to SEQ ID NO: 142214
  derived and/or modified CDS sequence (opt3) from neuraminidase__InfluenzaA__ABC67897

SEQ ID NO: 142769 - RNA, 1410 nt, Artificial Sequence; identical to SEQ ID NO: 142214
  derived and/or modified CDS sequence (opt3) from neuraminidase__InfluenzaA__ABC67970

SEQ ID NO: 142770 - RNA, 1410 nt, Artificial Sequence
  derived and/or modified CDS sequence (opt3) from neuraminidase__InfluenzaA__ABC67981
augaaccccaaucagaagaucauuaccauaggcagcgugucccugacaaucgccacuauuugcuuccucaugcaaaucgcuauucuugucacgaccguuacacugcacuuuaaacaguacgaguguaacucuccuccaaauaaccaggugauguugugcgaaccgacuaucauagagagaaauaucaccgaaauuguauauuuaacaaacaccacuaucgagaaggaaauuugucccaaacuggcagaguacaggaauuggucaaagccucagugcaacaucacaggguucgccccauuuaguaaagacaauagcauacggcuauccgcgggaggugauauuugggugacccgcgagcccuaugucucuugugacccugauaagugcuaccaauucgcucucggccaggggacgacucugaacaauggacauucgaacgacaccgugcacgaucgaacaccauaucguacucuucugaugaaugaauugggcguucccuuucaucucgguaccagacagguguguaucgccuggucaagcaguuccugccacgacgggaaggcauggcugcaugucugugugacaggagaugacgagaacgccaccgcuucuuucauuuacaauggcaggcugguagauagcaucggcuccuggaguaaaaagauccuccggacgcaggaaucagagugcguuuguauuaacgggacuugcacaguggucaugaccgacggaagcgcaucugguaaagccgauacuaagauauuauuuaucgaggaaggcaaaauugugcacaucuccacacugucagggagcgcucaacacguggaggaaugcaguuguuauccucaguacccaggaguccgcugcguuuguagagacaacuggaagggcucuaauaggccgauaguggauauuaacguaaaggacuacuccaucgugagcucguaugucugcucuggucuugugggggacacgccccggaaaaaugauuccuucucaaguagccauuguuuggacccuaacaaugaggaaggaggccacggcguuaaggggugggccuuugaugacggaaacgauguguggaugggucgcaccaucuccgagaaacugcgaucuggcuacgagaccuucaaggucauugaaggguggagcaaaccaaauucaaagcuacagacaaacagacaggugaucguagagaggggaaaucggaguggcuauuccgguauuuuuagcguugaagggaaaucuugcauaaaccguuguuucuacguggagcucauccgcggcagaaaggaagagacugaggucugguggaccucaaauaguauuguggucuuuugcggaacaagcggcacuuaugggaccggauccuggcccgacggugcggauaucaaccugaugccuaucuga

SEQ ID NO: 142771 - RNA, 1410 nt, Artificial Sequence
  derived and/or modified CDS sequence (opt3) from neuraminidase__InfluenzaA__ABC67992
augaaccccaaucagaagaucauuaccauaggcagcgugucccugacaaucgccacuauuugcuuccucaugcaaaucgcuauucuugucacgaccguuacacugcacuuuaaacaguacgaguguaacucuccuccaaauaaccaggugauguugugcgaaccgacuaucauagagagaaauaucaccgaaauuguauauuuaacaaacaccacuaucgagaaggaaauuugucccaaacuggcagaguacaggaauuggucaaagccucagugcaacaucacaggguucgccccauuuaguaaagacaauagcauacggcuauccgcgggaggugauauuugggugacccgcgagcccuaugucucuugugacccugauaagugcuaccaauucgcucucggccaggggacgacucugaacaauggacauucgaacgacaccgugcacgaucgaacaccauaucguacucuucugaugaaugaauugggcguucccuuucaucucgguaccagacagguguguaucgccuggucaagcaguuccugccacgacgggaaggcauggcugcaugucugugugacaggagaugacgagaacgccaccgcuucuuucauuuacaauggcaggcugguagauagcaucggcuccuggaguaaaaagauccuccggacgcaggaaucagagugcguuuguauuaacgggacuugcacaguggucaugaccgacggaagcgcaucugguaaagccgauacuaagauauuauuuaucgaggaaggcaaaauugugcacaucuccacacugucagggagcgcucaacacguggaggaaugcaguuguuauccucgcuacccaggagucagaugcguuuguagggacaacuggaagggcucuaaucggccgauaguggauauuaacguaaaggacuacuccaucgugagcucguaugucugcucuggucuugugggggacacccccaggaaaaauaacuccuucucaaguagccauuguuuggauccuaauaacgaggaaggaggccacggcguuaaggggugggccuuugacgauggaaaugacguguggaugggucgaacgaucuccgagaaacugagaucuggcuacgagaccuucaaggucauugaaggguggagcaaaccaaacucaaagcuacagacaaaucgccaggugaucguagagcggggaaaccguaguggcuauuccgguauuuuuagcguugaagggaaaucuugcauaaaucgcuguuucuacguggagcucaucagaggcaggaaggaagagauugaggucugguggacuucaaacaguaucguggucuuuugcggaaccagcggcacauaugggacuggauccuggcccgauggugcggacaucaaucugaugccuauuuga

SEQ ID NO: 142772 - RNA, 1410 nt, Artificial Sequence; identical to SEQ ID NO: 142737
  derived and/or modified CDS sequence (opt3) from neuraminidase__InfluenzaA__ABC68003

SEQ ID NO: 142773 - RNA, 1410 nt, Artificial Sequence
  derived and/or modified CDS sequence (opt3) from neuraminidase__InfluenzaA__ABC68052
augaaccccaaucagaagaucauuaccauaggcagcgugucccugacaaucgccacuauuugcuuccucaugcagaucgcuauucuugucacgaccguuacacugcacuuuaaacaguacgaguguaacucuccuccaaauaaccaggugauguugugcgaaccgacuaucauagagagaaauaucaccgaaauuguauauuuaacaaacaccacuaucgagaaggaaauuugucccaaacuggcagaguacaggaauuggucaaagccucagugcaacaucacaggguucgccccauuuaguaaagacaauagcauacggcuauccgcgggaggugauauuugggugacccgcgagcccuaugucucuugugacccugauaagugcuaccaauucgcucucggccaggggacgacucugaacaauggacauucgaacgacaccgugcacgaucgaacaccauaucguacucuucugaugaaugaauugggcguucccuuucaucucgguaccagacagguguguaucgccuggucaagcaguuccugccacgacgggaaggcauggcugcaugucugugugacaggagaugacgagaacgccaccgcuucuuucauuuacaauggcaggcugguagauagcaucggcuccuggaguaaaaagauccuccggacgcaggaaucagagugcguuuguauuaacgggacuugcacaguggucaugauagacggaagcgcaucugguaaagccgauaccaagaucuuauuuauugaggaaggcaaaaucgugcacauauccacucugucagggagcgcucaacacguggaggaaugcaguuguuauccucgcuacccaggagucagaugcguuuguagggacaacuggaagggcucuaaucggccgauuguggauaucaacguaaaggacuacuccaucgugagcucguaugucugcucuggucuugugggggacacaccccgcaaaaaugauuccuucucaaguagccauuguuuggacccuaacaaugaggaaggaggccacggcguuaaggggugggccuuugaugacggaaacgauguguggaugggucgaaccauuuccgagaaacugagaucuggcuacgagacguucaaggucaucgaaggguggagcaaaccaaauucaaagcuacagaccaacaggcaagugauuguagagcggggaaaucguaguggcuauuccgguauauuuagcguugaagggaaaucuugcaucaaccgcuguuucuacguggagcucauuagaggcaggaaggaagagacagaggucugguggacuucaaauaguaucguggucuuuugcggaaccagcggcacauaugggacuggauccuggcccgacggugcggauaucaaccugaugccuauuuga

SEQ ID NO: 142774 - RNA, 1410 nt, Artificial Sequence; identical to SEQ ID NO: 142214
  derived and/or modified CDS sequence (opt3) from neuraminidase__InfluenzaA__ABC68063

SEQ ID NO: 142775 - RNA, 1410 nt, Artificial Sequence; identical to SEQ ID NO: 142214
  derived and/or modified CDS sequence (opt3) from neuraminidase__InfluenzaA__ABC68074

SEQ ID NO: 142776 - RNA, 1410 nt, Artificial Sequence; identical to SEQ ID NO: 142760
  derived and/or modified CDS sequence (opt3) from neuraminidase__InfluenzaA__ABC68085

SEQ ID NO: 142777 - RNA, 1410 nt, Artificial Sequence
  derived and/or modified CDS sequence (opt3) from neuraminidase__InfluenzaA__ABC68096
augaaccccaaucagaagaucauuaccauaggcagcgugucccugacaaucgccacuauuugcuuccucaugcaaaucgcuauucuugucacgaccguuacacugcacuuuaaacaguacgaguguaacucuccuccaaauaaccaggugauguugugcgaaccgacuaucauagagagaaauaucaccgaaauuguauauuuaacaaacaccacuaucgagaaggaaauuugucccaaacuggcagaguacaggaauuggucaaagccucagugcaacaucacaggguucgccccauuuaguaaagacaauagcauacggcuauccgcgggaggugauauuugggugacccgcgagcccuaugucucuugugacccugauaagugcuaccaauucgcucucggccaggggacgacucugaacaauggacauucgaacgacaccgugcacgaucgaacaccauaucguacucuucugaugaaugaauugggcguucccuuucaucucgguaccagacagguguguaucgccuggucaagcaguuccugccacgacgggaaggcauggcugcaugucugugugacaggagaugacgagaacgccaccgcuucuuucauuuacaauggcaggcugguagauagcaucggcuccuggaguaaaaagauccuccggacgcaggaaucagagugcguuuguauuaacgggacuugcacaguggucaugaccgacggaagcgcaucugguaaagccgauacuaagauauuauuuaucgaggaaggcaaaauugugcacaucuccacacugucagggagcgcucaacacguggaggaaugcaguuguuauccucgcuacccaggagucagaugcguuuguagggacaacuggaagggcucuaaucggccgauaguggauauuaacguaaaggacuacuccaucgugagcucguaugucugcucuggucuugugggggacacccccaggaaaaaugauuccuucucaaguagccauuguuuggacccuaacaaugaggaaggaggccacggcguuaaggggugggccuuugaugacggaaacgauguguggaugggucgaacgaucuccgagaaacugagaucuggcuacgagaccuucaaggucauugaaggguggagcaaaccaaauucaaagcuacauaucaaccgccaggugauuguagagcggggaaaucguaguggcuauuccgguauauuuagcguugaagggaaaucuugcaucaaccgcuguuucuacguggagcucauuagaggcaggaaggaagagacagaggucugguggacuucaaauaguaucguggucuuuugcggaaccagcggcacauaugggacuggauccuggcccgacggugcggauaucaaccugaugccuauuuga

SEQ ID NO: 142778 - RNA, 1410 nt, Artificial Sequence
  derived and/or modified CDS sequence (opt3) from neuraminidase__InfluenzaA__ABC68225
augaaccccaaucagaagaucauuaccauaggcagcgugucccugacaaucgccacuauuugcuuccucaugcaaaucgcuauucuugucacgaccguuacacugcacuuuaaacaguacgaguguaacucuccuccaaauaaccaggugauguugugcgaaccgacuaucauagagagaaauaucaccgaaauuguauauuuaacaaacaccacuaucgagaaggaaauuugucccaaacuggcagaguacaggaauuggucaaagccucagugcaacaucacaggguucgccccauuuaguaaagacaauagcauacggcuauccgcgggaggugauauuugggugacccgcgagcccuaugucucuugugacccugauaagugcuaccaauucgcucucggccaggggacgacucugaacaauggacauucgaacgacaccgugcacgaucgaacaccauaucguacucuucugaugaaugaauugggcguucccuuucaucucgguaccaaacagguguguaucgccuggucaagcaguuccugccacgacgggaaggcauggcugcaugucugugugacaggagaugacgagaacgccaccgcuucuuucauuuacaauggcagacugguagauagcaucggcuccuggucaaagaaaauccucaggacgcaggaaagugagugcguuuguauuaacgggacuugcacaguggucaugaccgacggaagcgcaucugguaaggccgauacuaaaauauuauuuaucgaggaaggcaagauugugcacacauccucacugagcgggagugcucaacacguggaggaaugcucuuguuauccucgguacccaggaguccgcugcguuuguagagacaacuggaagggcuccaauaggccgaucguggauauaaacguaaaagacuacagcauugugucgucuuaugucugcuccggucuugugggggacacgccccggaagaaugauucaaguagcuccucucauuguuuggacccuaacaaugaggaaggaggccacggcguuaaagggugggccuucgaugacggaaacgauguguggaugggucgcaccaucagcgagaagcugcgaucaggcuacgagaccuuuaaagucaucgaaggguggaguaagccaaauuccaaacuacagauuaacagacaggugaucguagacaggggaaaucggagcggcuauucugguauuuucucaguugagaguaagagcugcauaaaccguuguuuuuacguggaacucauccgcgggagaaagcaggagacagaaguccuguggacuuccaauucuauuguggucuucugcggcaccucgggaacauauggcacugggagcuggcccgauggagcggacaucaaccuuaugccuaucuga

SEQ ID NO: 142779 - RNA, 1410 nt, Artificial Sequence; identical to SEQ ID NO: 142567
  derived and/or modified CDS sequence (opt3) from neuraminidase__InfluenzaA__ABC68236

SEQ ID NO: 142780 - RNA, 1350 nt, Artificial Sequence
  derived and/or modified CDS sequence (opt3) from neuraminidase__InfluenzaA__ABC72646
augaaccccaauaagaaaaucauuaccauaggcagcaucugcauggugacagggauggucucccugaugcuccagauuggaaaccuuaucucuauuuggguuucacacaguauccauacugguaaucaacagaaggccgagccuauaagcaacacgaauuuccugaccgaaaaagcuguggcauccguaaaguuggccggcaacucuucguuauguccaaucaaugggugggcgguguacucaaaagacaacagcauuagaaucggaaguaagggcgaugucuuugugauuagggagccguucaucuccugcucucaccuggaaugucggacauuuuuccuaacucaggguagccuccugaaugacaagcauuccaacgggaccguuaaagaucgcucaccccaccgaacacuuaugaguugcccugugggagaggcuccaagccccuauaauucucguuuugaauccgucgccuggucagcaagcgccugucaugacggcaccaguuggcugacuauaggcauuucugggccugauuccggagcuguggcaguauugaaguacaacgguaucauuacagacaccaucaaaagcuggagaaauaacauccucaggacgcaggagucggagugcgccuguguuaauggcucuugcuucacugugaugaccgaugggccauccaacggacaggcuucacacaagauuuuuaaaauggacaagggcaaggucgugaaaaguguggaacuggaugcccccaacuaucacuacgaggaauguagcugcuauccugacgcgggugagauaacaugugucugccgggauaauuggcauggguccaaccgcccauggguuucuuucaaucaaaaccuggaguaccagaucggauauauuugcagcggcguguuuggcgacacuccgagacccaaugaugggaccggaucaugugguccuguaaguuccaacggcacauacggggugaagggauucagcuuuaaauacggcaauggugucuggaucgggaggaccaagucuacgaacucacggaguggcuucgaaaugauaugggacccaaauggauggacugagacagacagcuccuuuucugugaaacaggauauuguugcaaucaccgacuggucgggcuauagcggguccuucgugcaacaccccgaacucacuggauuagauugcauccgcccuuguuucugggucgagcugauucgagguagaccaaaggaaucaacaaucuggaccaguggcucuagcauuuccuuuugcggggugaacucagacacgguaggauggagcuggcccgauggcgccgagcuuccguucaccauagacaaauga

SEQ ID NO: 142781 - RNA, 1410 nt, Artificial Sequence; identical to SEQ ID NO: 142143
  derived and/or modified CDS sequence (opt3) from neuraminidase__InfluenzaA__ABC84392

SEQ ID NO: 142782 - RNA, 1410 nt, Artificial Sequence; identical to SEQ ID NO: 142557
  derived and/or modified CDS sequence (opt3) from neuraminidase__InfluenzaA__ABC84403

SEQ ID NO: 142783 - RNA, 1410 nt, Artificial Sequence; identical to SEQ ID NO: 142562
  derived and/or modified CDS sequence (opt3) from neuraminidase__InfluenzaA__ABC84414

SEQ ID NO: 142784 - RNA, 1410 nt, Artificial Sequence
  derived and/or modified CDS sequence (opt3) from neuraminidase__InfluenzaA__ABC84425
augaaccccaaucagaagaucauuaccauaggcagcgugucccugacaaucucuacuauuugcuucuuuaugcaaaucgccauucucaucacgaccgucacacuucacuucaaacaguacgaguuuaacucaccuccaaauaaccagguuaugcugugugaaccgacuauaaucgagagaaauauuaccgaaaucguguauuugacaaacaccacuauugagaaggaaaucugccccaaauuagcugaguacaggaauuggaguaagccucagugugacauaacaggguucgcaccauuuagcaaagauaacuccauucggcugucugccggaggugacaucuggguaacccgcgagcccuaugugucgugcgauccugacaaguguuaccaauucgcgcuaggccaggggacgacucucaauaacguccauucaaaugauaccgugcacgaccgaacaccauaucguacucugcuuaugaacgaacugggaguucccuuucauuugggcaccaaacaggugugcauugcuuggagcaguuccucuugucacgaugguaaggccuggcuccaugucugcgugacaggggacgauaagaaugcaaccgccagcuucaucuacaacggaagacugguagacuccaucguuucauggaguaaagagauucugaggacgcaggaaagcgagugugugugcauaaauggcacuuguacagucgugaugaccgauggcucugcuuccgggaaggcagacacuaaaauccucuuuauugaggaaggaaagaucgugcacacaucaaccuuaagcgguagugcccaacacgucgaggaaugcucuugcuauccucgguacccaggcguucgcugugugugcagagauaacuggaagggguccaacaggccgauaguagacauuaauaucaaagacuacagcaucgugucgucuuaugucuguuccggacuggugggcgauacgccccggaagaacgacucaaguagcuccucucauugccuugauccuaauaacgaggaaggugggcacggaguuaaaggcugggcuuucgacgauggcaaugacguguggauggggcgcaccauuagcgagaaguugcgaucaggauacgagacauuuaaagucaucgaagguuggaguaacccaaauuccaagcugcagauuaacagacaggugauaguagauaggggcaaucggagcggguauucuggaaucuucucaguugagggcaaaaacuguauuaaucguugcuuuuacguggaacuaauccgcgguagaaaggaggaaacugagguccucuggaccaguaacagcaucguggucuucugugggacauccggcacuuauggaaccggcucuuggcccgacggggccgauauuaaucugaugccuauauga

SEQ ID NO: 142785 - RNA, 1410 nt, Artificial Sequence; identical to SEQ ID NO: 142375
  derived and/or modified CDS sequence (opt3) from neuraminidase__InfluenzaA__ABC84436

SEQ ID NO: 142786 - RNA, 1410 nt, Artificial Sequence
  derived and/or modified CDS sequence (opt3) from neuraminidase__InfluenzaA__ABC84447
augaaccccaaucagaagaucauuaccauaggcagcgugucccugacaaucgccacuauuugcuuccucaugcaaaucgcuauucuugucacgaccguuacacugcacuuuaaacaguacgaguguaacucuccuccaaauaaccaggugauguugugcgaaccgacuaucauagagagaaauaucaccgaaauuguacauuuaacaaacaccacuaucgagaaggaaauuugucccaaacuggcagaguauaggaauuggucaaagccucagugcaacaucacaggguucgccccauuuaguaaagacaauagcauacggcuauccgcgggaggugauauuugggugacccgcgagcccuacgucucuugugacccugauaagugcuaucaauucgcucucggccaggggacgacucugaacaauggacacucgaacgacaccgugcaugaucgaacaccauaccguacucuucugaugaaugaauugggcguucccuuucaccucgguaccagacagguguguaucgccuggucaagcaguuccugccaugacgggaaggcauggcugcacgucugugugacaggagaugacgagaacgccaccgcuucuuucauuuauaauggcaggcugguagauagcaucggcuccuggaguaaaaagauccuccggacgcaggaaucagagugcguuuguauuaacgggacuugcacaguggucaugaccgacggaagcgcaucugguaaagccgauacuaagauauuauuuaucgaggaaggcaaaauugugcacaucuccacacugucagggagcgcucaacauguggaggaaugcaguuguuacccucgcuauccaggagucagaugcguuuguagggacaacuggaagggcucuaaucggccgauaguggauauuaacguaaaggacuacuccaucgugagcucguacgucugcucuggucuugugggggacacccccaggaaaaaugauuccuucucaaguagccacuguuuggacccuaacaaugaggaaggaggccauggcguuaaggggugggccuuugaugacggaaacgauguguggaugggucgaacgaucuccgagaaacugagaucuggcuaugagaccuucaaggucauugaaggguggagcaaaccaaauucaaagcuacagacaaaccgccaggugaucguagagcggggaaaucguaguggcuacuccgguauuuuuagcguugaagggaaaucuugcauaaaccgcuguuucuauguggagcucaucagaggcaggaaggaagagacugaggucugguggaccucaaauaguauuguggucuuuugcggaacaagcggcacuuacgggaccggauccuggcccgacggugcggauaucaaccugaugccuaucuga

SEQ ID NO: 142787 - RNA, 1410 nt, Artificial Sequence; identical to SEQ ID NO: 142762
  derived and/or modified CDS sequence (opt3) from neuraminidase__InfluenzaA__ABC84501

SEQ ID NO: 142788 - RNA, 1410 nt, Artificial Sequence; identical to SEQ ID NO: 142762
  derived and/or modified CDS sequence (opt3) from neuraminidase__InfluenzaA__ABC84512

SEQ ID NO: 142789 - RNA, 1410 nt, Artificial Sequence
  derived and/or modified CDS sequence (opt3) from neuraminidase__InfluenzaA__ABC84523
augaaccccaaucagaagaucauuaccauaggcagcgugucccugacaaucucuacuauuugcuucuuuaugcaaaucgccauucucaucacgaccgucacacuucacuucaaacaguacgaguuuaacucaccuccaaauaaccagguuaugcugugugaaccgacuauaaucgagagaaauauuaccgaaaucguguauuugacaaacaccacuauugagaaggaaaucugccccaaauuagcugaguacaggaauuggaguaagccucaguguaacauaacaggguucgcaccauuuagcaaagacaauuccauucggcugucugccggaggugauaucuggguaacccgcgagcccuaugugucgugcgacccugauaaguguuaccaauucgcgcuaggccaggggacgacucucaacaauguccauucaaacgacaccgugcacgaucgaacaccauaucguacucugcuuaugaaugaacugggaguucccuuucauuugggcaccaaacaggugugcauugcuuggagcaguuccucuugucacgacgguaaggccuggcuccaugucugcgugacaggggaugacaagaacgcaaccgccagcuucaucuacaauggaagacuggcugauuccaucguaucauggaguaaagagauucugaggacgcaggaaagcgaguguguuugcauaaacggcacuuguacaguggucaugaccgacggcucugcauccgggaaggccgauacuaaaauccucuuuauugaggaaggaaagaucgugcacacaucaaccuuaagcgguagugcucaacacguggaggaaugcucuugcuauccucgguacccaggcguccgcuguguuugcagagacaacuggaagggguccaauaggccgauaguggauauuaacaucaaagacuacagcaucguaucgucuuauguguguuccggacuggucggcgacacgccccggaagaaugauucaaguagcuccucucauugccuugacccuaacaaugaggaaggugggcacggagugaaaggcugggccuucgaugacggcaacgauguuuggauggggcgcaccauuagcgagaaguugcgaucaggauacgagacauuuaaagugaucgaagguuggaguaauccaaacuccaagcugcagauuaauagacaggucauaguggacaggggcaaccggagcggguauucuggaaucuucucaguagagggcaaaaguuguauuaaucguugcuuuuacguugaacuaauccgcgguagaaaggaggaaacugaggugcucuggaccagcaacuccaucgucguguucugugggacaucuggcacuuauggaaccggcucguggcccgauggggcggacauuaaucugaugccuauauga

SEQ ID NO: 142790 - RNA, 1410 nt, Artificial Sequence
  derived and/or modified CDS sequence (opt3) from neuraminidase__InfluenzaA__ABC84545
augaaccccaaucagaagaucauuaccauaggcagcgugucccugacaaucgccacuauuugcuuccucaugcaaaucgcuauucuugucacgaccguuacacugcacuuuaaacaguacgagugugacucuccugcaaacaaucaggugaugccaugcgaaccgaucauaaucgagagaaacauuacugaaaucguauauuugaccaauacaaccauugagaaggaaaucugucccaaauuaguggaguacaggaacuggucaaagccucagugcaaaauaacuggguucgccccauuuaguaaggauaauagcauucggcuguccgcgggaggugacaucugggucacacgcgagcccuaugugucuugugauccuggcaagugcuaccaauucgcucuagggcagggaaccacgcucgacaacaaacauucgaaugauacuauucacgaccgaaccccacaucguacacugcuuaugaacgaacugggcguucccuuucacuuggguacuagacagguguguaucgccuggucaagcaguuccugccaugaugggaaggcauggcuccacgucugugugaccggauaugacaaaaaugccacagcuucuuucaucuacgauggcaggcugguagacagcauuggcuccuggucacagaacauacugcggacccaagagagugaaugcguuuguaucaaugggacgugcacuguggucaugacagauggaagcgcaucugguuccgccgacaccaagauucucuuuaucgaggagggcaaaauagugcacauuucaccuuuaagcgggagugcucagcauguggaagagugcucuuguuauccacgcuacccgggagucagaugcaucuguagggauaacuggaagggcuccaaucggcccguuguggacaucaacguaaaggaccacagcauugauucgucuuacgugugcuccggucuggucggggacacuccucgcaacaaugaucgaucaaguaacagcuauuguagaaauccaaacaaugaaaaaggaaaccauggcgugaagggcugggccuucgacgaugggaaugacguuuggaugggaaggacaaucuccgaggauucucggagcgguuacgaaaccuuuaaagugauuggcggguggucaacgcccaacaguaaacuucagauaaaucgucaggucaucguggacuccgauaaccgcagcggauauucuggcauuuucucaguagaggguaagaguugcaucaauagauguuuuuacguugaguugaucagggggcgggaacaagagacccgagugugguggacaagcaacuccauugucguguucugcggcacuucuggaaccuauggcacagggucguggccugacggagcggauauaaaucugaugccaaucuga

SEQ ID NO: 142791 - RNA, 1410 nt, Artificial Sequence; identical to SEQ ID NO: 142778
  derived and/or modified CDS sequence (opt3) from neuraminidase__InfluenzaA__ABC84574

SEQ ID NO: 142792 - RNA, 1410 nt, Artificial Sequence; identical to SEQ ID NO: 142778
  derived and/or modified CDS sequence (opt3) from neuraminidase__InfluenzaA__ABC85757

SEQ ID NO: 142793 - RNA, 1410 nt, Artificial Sequence; identical to SEQ ID NO: 142789
  derived and/or modified CDS sequence (opt3) from neuraminidase__InfluenzaA__ABC85768

SEQ ID NO: 142794 - RNA, 1410 nt, Artificial Sequence; identical to SEQ ID NO: 142778
  derived and/or modified CDS sequence (opt3) from neuraminidase__InfluenzaA__ABC85779

SEQ ID NO: 142795 - RNA, 1410 nt, Artificial Sequence; identical to SEQ ID NO: 142778
  derived and/or modified CDS sequence (opt3) from neuraminidase__InfluenzaA__ABC85790

SEQ ID NO: 142796 - RNA, 1410 nt, Artificial Sequence; identical to SEQ ID NO: 142762
  derived and/or modified CDS sequence (opt3) from neuraminidase__InfluenzaA__ABC85801

SEQ ID NO: 142797 - RNA, 1410 nt, Artificial Sequence; identical to SEQ ID NO: 142762
  derived and/or modified CDS sequence (opt3) from neuraminidase__InfluenzaA__ABC85812

SEQ ID NO: 142798 - RNA, 1410 nt, Artificial Sequence; identical to SEQ ID NO: 142789
  derived and/or modified CDS sequence (opt3) from neuraminidase__InfluenzaA__ABC85823

SEQ ID NO: 142799 - RNA, 1410 nt, Artificial Sequence; identical to SEQ ID NO: 142761
  derived and/or modified CDS sequence (opt3) from neuraminidase__InfluenzaA__ABC85834

SEQ ID NO: 142800 - RNA, 1410 nt, Artificial Sequence; identical to SEQ ID NO: 142762
  derived and/or modified CDS sequence (opt3) from neuraminidase__InfluenzaA__ABC85845

SEQ ID NO: 142801 - RNA, 1410 nt, Artificial Sequence; identical to SEQ ID NO: 142789
  derived and/or modified CDS sequence (opt3) from neuraminidase__InfluenzaA__ABC85856

SEQ ID NO: 142802 - RNA, 1410 nt, Artificial Sequence; identical to SEQ ID NO: 142761
  derived and/or modified CDS sequence (opt3) from neuraminidase__InfluenzaA__ABC85867

SEQ ID NO: 142803 - RNA, 1410 nt, Artificial Sequence; identical to SEQ ID NO: 142760
  derived and/or modified CDS sequence (opt3) from neuraminidase__InfluenzaA__ABC85900

SEQ ID NO: 142804 - RNA, 1410 nt, Artificial Sequence
  derived and/or modified CDS sequence (opt3) from neuraminidase__InfluenzaA__ABC85911
augaaccccaaucagaagaucauuaccauaggcagcgugucccugacaaucgccacuauuugcuuccucaugcaaaucgcuauucuugucacgaccguuacacugcacuuuaaacaguacgaguguaacucuccuccaaauaaccaggugauguugugcgaaccgacuaucauagagagaaauaucaccgaaauuguauauuuaacaaacaccacuaucgagaaggaaauuugucccaaacuggcagaguacaggaauuggucaaagccucagugcaacaucacaggguucgccccauuuaguaaagacaauagcauacggcuauccgcgggaggugauauuugggugacccgcgagcccuaugucucuugugacccugauaagugcuaccaauucgcucucggccaggggacgacucugaacaauggacauucgaacgacaccgugcacgaucgaacaccauaucguacucuucugaugaaugaauugggcguucccuuucaucucgguaccagacagguguguaucgccuggucaagcaguuccugccacgacgggaaggcauggcugcaugucugugugacaggagaugacgagaacgccaccgcuucuuucauuuacaauggcaggcugguagauagcaucggcuccuggaguaaaaagauccuccggacgcaggaaucagagugcguuuguauuaacgggacuugcacaguggucaugaccgacggaagcgcaucugguaaagccgauacuaagauauuauuuaucgaggaaggcaaaauugugcacaucuccacacugucagggagcgcucaacacguggaggaaugcaguuguuauccucgcuacccaggagucagaugcguuuguagggacaacuggaagggcucuaaucggccgauaguggauauuaacguaaaggacuacuccaucgugagcucguaugucugcucuggucuugugggggacacgccccgcaaaaaugauuccuucucaaguagccauuguuuggacccuaacaaugaggaaggaggccacggcguuaaggggugggccuuugaugacggaaacgauauguggaugggucgaaccaucuccgagaaacugagaucuggcuacgagaccuucaaggugauugaaggguggagcaaaccaaauucaaagcuacagacaaacaggcaggucaucguggagcggggaaaucguaguggcuauuccgguauuuuuagcguagaagggaaaucuugcauaaaccgcuguuucuacguugagcucaucagaggcaggaaggaagagacugaggugugguggaccucaaauaguauugucguguuuugcggaacaagcggcacuuaugggaccggauccuggcccgacggugcggauaucaaccugaugccuaucuga

SEQ ID NO: 142805 - RNA, 1410 nt, Artificial Sequence
  derived and/or modified CDS sequence (opt3) from neuraminidase__InfluenzaA__ABC85922
augaaccccaaucagaagaucauuaccauaggcagcgugucccugacaaucgccacuauuugcuuccucaugcagaucgcuauucuugucacgaccguuacacugcacuuuaaacaguacgaguguaacucuccuccaaauaaccaggugauguugugcgaaccgacuaccaucgagagaaauauaacagaaaucguauauuuaaccaacacuacaauugagaaggaaaucugucccaaacuggcagaguacaggaauuggucaaagccucagugcaacauuaccggguucgccccauuuaguaaagacaauagcauccggcuauccgcgggaggugauauaugggugacgcgcgagcccuaugucucuugugacucggauaagugcuaccaauucgcucucggccaggggacuacccugaacaauggacauucaaacgacacagugcacgaucgaacuccuuaucguacccuucugaugaaugaauugggcguuccauuucaucucgguacaagacagguguguauugccuggagcaguuccucuugccacgacgggaaggcauggcugcaugucugugugaccggagaugacgagaacgccacggcuagcuucaucuacaauggcaggcugguagauuccauuggcucauggaguaaaaagauccuccggacucaggaaagcgagugcguuuguaucaacgggacaugcaccguggucaugacugacggaucugcauccgguaaagccgauacaaagauuuuauuuauagaggaaggcaaaaucgugcacauuucaacccugagcgggagugcucaacacguggaggaaugcucuuguuauccccgcuacccuggagucagaugcguuuguagggacaacuggaagggcuccaaucggccaaucguggauauaaacguaaaggacuacagcauugugucgucuuaugucugcuccggucuugugggggacacgccgcgcaaaaaugauucauucaguagcucccauuguuuggaccccaacaaugaggaaggaggccacggcguuaaggggugggccuuugaugacggaaacgauguguggaugggucgaaccaucucugagaaacugagaagcggcuacgagacauucaaggucaucgaaggguggucaaaaccuaauaguaagcuacagacuaacaggcaagugauuguagagcggggaaaucguuccggcuauagcgguaucuuuucuguugaagggaaaucaugcauuaaccgcuguuucuacguggagcucauaagaggcaggaaggaagagaccgaggucugguggacaaguaauagcaucguggucuuuugcggaacuuccggcaccuaugggacaggaucuuggccagacggugcggauauuaaccugaugcccaucuga

SEQ ID NO: 142806 - RNA, 1410 nt, Artificial Sequence; identical to SEQ ID NO: 142214
  derived and/or modified CDS sequence (opt3) from neuraminidase__InfluenzaA__ABC85933

SEQ ID NO: 142807 - RNA, 1410 nt, Artificial Sequence
  derived and/or modified CDS sequence (opt3) from neuraminidase__InfluenzaA__ABC85955
augaaccccaaucagaagaucauuaccauaggcagcgugucccugacaaucgccacuauuugcuuccucaugcaaaucgcuauucuugucacgaccguuacacugcacuuuaaacaguacgaguguaacucuccuccaaauaaccaggugauguugugcgaaccgacuaucauagagagaaauaucaccgaaauuguauauuuaacaaacaccacuaucgagaaggaaauuugucccaaacuggcagaguacaggaauuggucaaagccucagugcaacaucacaggguucgccccauuuaguaaagacaauagcauacggcuauccgcgggaggugauauuugggugacccgcgagcccuaugucucuugugacccugauaagugcuaccaauucgcucucggccaggggacgacucugaacaauggacauucgaacgacaccgugcacgaucgaacaccauaucguacucuucugaugaaugaauugggcguucccuuucaucucgguaccagacagguguguaucgccuggucaagcaguuccugccacgacgggaaggcauggcugcaugucugugugacaggagaugacgagaacgccaccgcuucuuucauuuacaauggcaggcugguagauagcaucggcuccuggaguaaaaagauccuccggacgcaggaaucagagugcguuuguauuaacgggacuugcacaguggucaugaccgacggaagcgcaucugguaaagccgauacuaagauauuauuuaucgaggaaggcaaaauugugcacaucuccacacugucagggagcgcucaacacguggaggaaugcaguuguuauccucgcuacccaggagucagaugcguuuguagggacaacuggaagggcucuaaucggccgauaguggauauuaacguaaaggacuacuccaucgugagcucguaugucugcucuggucuugugggggacacccccaggaaaaaugauuccuucucaaguagccauuguuuggacccuaacaaugaggaaggaggccacggcguuaaggggugggccuuugaugacggaaacgauguguggaugggucgaacgaucuccgagaaacugagaucuggcuacgagaccuucaaggucauugaaggguggagcaaaccaaauucaaagcuacagacaaaccgccaggugaucguagagcggggaaaucguaguggcuauuccgguauuuuuagcguugaagggaaaucuugcauaaaccgcuguuucuacguggagcucaucagaggcaggaaggaagagacugaggucugguggaccucaaauaguauuguggucuuuugcggaacaagcggcacuuaugggaccggauccuggcccgacggugcggauaucaaccggaugccuaucuga

SEQ ID NO: 142808 - RNA, 1410 nt, Artificial Sequence; identical to SEQ ID NO: 142214
  derived and/or modified CDS sequence (opt3) from neuraminidase__InfluenzaA__ABC85966

SEQ ID NO: 142809 - RNA, 1410 nt, Artificial Sequence; identical to SEQ ID NO: 142214
  derived and/or modified CDS sequence (opt3) from neuraminidase__InfluenzaA__ABC85977

SEQ ID NO: 142810 - RNA, 1410 nt, Artificial Sequence
  derived and/or modified CDS sequence (opt3) from neuraminidase__InfluenzaA__ABC85988
augaaccccaaucagaagaucauuaccauaggcagcgugucccugacaaucgccacuauuugcuuccucaugcaaaucgcuauucuugucacgaccguuacacugcacuuuaaacaguacgaguguaacucuccuccaaauaaccaggugauguugugcgaaccgacuaucauagagagaaauaucaccgaaauuguauauuuaacaaacaccacuaucgagaaggggauuugucccaaacuggcagaauacaggaauuggucaaagccucagugcaacaucacaggauucgccccauuuaguaaagacaauagcauacggcuauccgcggguggcgauauuugggugacccgcgagcccuaugucucuugugacccugauaagugcuaccaauucgcucucgggcagggaacgacucugaacaauggccauucgaacgacaccgugcacgaucgaacaccauaucguacucuucugaugaaugaguuggguguucccuuucaucucgggaccagacagguguguaucgccuggucaagcaguuccugccacgacggaaaggcauggcugcaugucugugugacaggcgaugacgaaaacgccaccgcuucuuucauuuacaauggcaggcugguagauagcaucggguccuggaguaaaaagauccuccggacgcaggagucagaaugcguuuguauuaacggaacuugcacaguggucaugaccgacgguagcgcaucuggcaaagccgauacuaagauauuauuuaucgaggaggggaaaauugugcacaucuccacacugucaggaagcgcucaacacguggaagagugcaguuguuauccucgcuacccaggcgucagaugcguuuguagggacaacuggaaggguucuaaucggccgauaguggauauuaacguaaaggacuacuccaucgugagcucguaugucugcucugggcuugugggagacacccccaggaaaaaugauuccuucucaaguagccauuguuuggacccuaacaaugaagagggcggccacgggguuaagggaugggccuuugaugacgguaacgauguguggaugggccgaacgaucuccgaaaaacugagaucuggguacgagaccuucaaggucauugagggauggagcaaaccaaauucaaagcuacagacaaaccgccaggugaucguagaacggggcaaucguagugguuauuccgggauuuuuagcguugagggcaaaucuugcauaaaccgcuguuucuacguggaacucaucagaggaaggaaggaggaaacugaggucugguggaccucaaauaguauuguggucuuuugcggcacaagcgggacuuauggaaccgguuccuggcccgacggcgcggauaucaaccugaugccuaucuga

SEQ ID NO: 142811 - RNA, 1410 nt, Artificial Sequence; identical to SEQ ID NO: 142375
  derived and/or modified CDS sequence (opt3) from neuraminidase__InfluenzaA__ABC85999

SEQ ID NO: 142812 - RNA, 1410 nt, Artificial Sequence; identical to SEQ ID NO: 142375
  derived and/or modified CDS sequence (opt3) from neuraminidase__InfluenzaA__ABC86010

SEQ ID NO: 142813 - RNA, 1410 nt, Artificial Sequence
  derived and/or modified CDS sequence (opt3) from neuraminidase__InfluenzaA__ABC86021
augaaccccaaucagaagaucauuaccauaggcagcgugucccugacaaucucuacuauuugcuucuuuaugcaaaucgccauucucaucacgaccgucacacuucacuucaaacaguacgaguuuaacucaccuccaaauaaccagguuaugcugugugaaccgacuauaaucgagagaaauauuaccgaaaucguguauuugacaaacaccacuauugagaaggaaaucugccccaaauuagcugaguacaggaauuggaguaagccucagugugacauaacaggguucgcaccauuuagcaaagauaacuccauucggcugucugccggaggugacaucuggguaacccgcgagcccuaugugucgugcgauccugacaaguguuaccaauucgcgcuaggccaggggacgacucucaauaacguccauucaaaugauaccgugcacgaccgaacaccauaucguacucugcuuaugaacgaacugggaguucccuuucauuugggcaccaaacaggugugcauugcuuggagcaguuccucuugucacgaugguaaggccuggcuccaugucugcgugacaggggacgauaagaaugcaaccgccagcuucaucuacaacggaagacugguagacuccaucguuucauggaguaaagagauucugaggacgcaggaaagcgagugugugugcauaaauggcacuuguacagucgugaugaccgauggcucugcuuccgggaaggcagacacuaaaauccucuuuauugaggaaggaaagaucgugcacacaucaaccuuaagcgguagugcccaacacgucgaggaaugcucuugcuauccucgguacccaggcguucgcugugugugcagagauaacuggaagggguccaacaggccgauaguagacauuaauaucaaagacuacagcaucgugucgucuuaugucuguuccggacuggugggcgauacgccccggaagaacgacucaaguagcuccucucauugccuugauccuaauaacgaggaaggugggcacggaguuaaaggcugggcuuucgacgauggcaaugacguguggauggggcgcaccauuagcgagaaguugcgaucaggauacgagacauuuaaagucaucgaagguuggaguaacccaaauuccaagcugcagauuaacagacaggugauaguagauaggggcaaucggagcggguauucuggaaucuucucaguugagggcaaaaguuguauuaaccguugcuuuuacguggaacuaauccgcgguagaaaggaggaaacugagguccucuggaccagcaauuccaucguggucuucugugggacaucuggcacuuauggaaccggcucguggcccgacggggccaacauuaaucugaugccuauauga

SEQ ID NO: 142814 - RNA, 1410 nt, Artificial Sequence; identical to SEQ ID NO: 142639
  derived and/or modified CDS sequence (opt3) from neuraminidase__InfluenzaA__ABC86127

SEQ ID NO: 142815 - RNA, 1410 nt, Artificial Sequence; identical to SEQ ID NO: 142722
  derived and/or modified CDS sequence (opt3) from neuraminidase__InfluenzaA__ABC86140

SEQ ID NO: 142816 - RNA, 1410 nt, Artificial Sequence; identical to SEQ ID NO: 142532
  derived and/or modified CDS sequence (opt3) from neuraminidase__InfluenzaA__ABC86151

SEQ ID NO: 142817 - RNA, 1413 nt, Artificial Sequence
  derived and/or modified CDS sequence (opt3) from neuraminidase__InfluenzaA__ABC86240
augaaccccaaucagaagaucauuaccauaggcagcaucuccguggccauugggaucauuucucugauccuccaaauaggaaacaucauuucaaucugggcuagucacagcauucagacagguucccagaauuacacuggcaucugcaaccagaaaauaauuacguaugagaauagaaccugggucaaccaaacauacguuaauaucaacaauacuaacgugguagcagggaaggacaaaaccucuaugacacuugccggaaauucgucacuguguccuauuaggggcugggcgaucuauaccaaggauaacagcauccggauugguaguaaaggggacguguucgucauacgcgaaccauuuaucuccugcucucauuuggagugucgaacuuucuuuuuaacacagggagcucugcuaaaugauaagcacagcaacggcaccauuaaggaccguuccccguucagagcccucaugucaugcccccugggcgaagcaccuaguccauacaauagcagguuugagucuguggccugguccgcuucagcaugucaugaugggcuuggauggcugacgaucgguauaagcggccccgacaacggggccguugcuguguugaaauauaacggaauuaucacugaaaccaucaagaguuggaaaaagcagauucuccggacacaggagucugagugcgucugugugaauggcuccugcuucacuaucaugaccgaugguccuagcaaccgcgccgcgucguacagaauuuuuaaaauagaaaaggggaggguaacaaagucuaucgagcuggacgcaccaaauuaucacuacgaagaguguuccugcuaccccgauaccggaacgguuaugugugugugccgggacaacuggcauggcucaaaucgcccuugggucaguuucaaccaaaaucuggauuaucagauuggcuacaucugcagcgggguguuuggagacaacccacgaccgaaagauggugagggcuccuguaaucccgugacugucgacggggccgacggaguuaagggcuucucuuauagauacgguaacgggguguggaucggcaggacaaaaagcaaucggcuccguaagggauuugaaaugauuugggauccuaacggcuggaccgacacugauucagacuucaguaugaaacaggauguaguggcuaugacagacugguccggguauagcggaucuuuuguccagcacccagaguuaaccggucuggauugcaugcgccccuguuucuggguggaacuuguuagaggcuugccuagggagaauacgaccauauggacaucagggaguagcaucuccuucugcggagugaacucugaaacugccaauuggucguggccagacggcgcagagcugcccuuuaccauugauaaguga

SEQ ID NO: 142818 - RNA, 1410 nt, Artificial Sequence
  derived and/or modified CDS sequence (opt3) from neuraminidase__InfluenzaA__ABC97377
augaaccccaaucagaagaucauuaccauaggcagcgugucccugacaaucgccacuauuugcuuccucaugcaaaucgcuauucuugucacgaccguuacacugcacuuuaaacaguacgagugugacucuccugcaaacaaucaggugaugccaugcgaaccgaucauaaucgagagaaacauuacugaaaucguauauuugaccaauacaaccauugagaaggaaaucugucccaaauuaguggaguacaggaacuggucaaagccucagugcaaaauaacuggguucgccccauuuaguaaggauaauagcauucggcuguccgcgggaggugacaucugggucacacgcgagcccuaugugucuugugauccuggcaagugcuaccaauucgcucuagggcagggaaccacgcucgacaacaaacauucgaaugauacuauucacgaccgaaccccacaucguacacugcuuaugaacgaacugggcguucccuuucacuuggguacuagacagguguguaucgccuggucaagcaguuccugccaugaugggaaggcauggcuccacgucugugugaccggauaugacaaaaaugccacagcuucuuucaucuacgauggcaggcugguagacagcauuggcuccuggucacagaacauacugcggacccaagagagugaaugcguuuguaucaaugggacgugcacuguggucaugacagauggaagcgcaucugguuccgccgacaccaagauucucuuuaucgaggagggcaaaauagugcacauuucaccuuuaagcgggagugcucagcauguggaagagugcucuuguuauccacgcuacccgggagucagaugcaucuguagggauaacuggaagggcuccaaucggcccguuguggacaucaacguaaaggacuacagcauugauucgucuuaugugugcuccggucuggucggggacacuccucgcaacaaugaucgaucaaguaacagcuacuguagaaauccaaacaaugaaaaaggaaaccacggcgugaagggcugggccuucgacgaugggaaugacguuuggaugggaaggacaaucuccgaggauucucggagcgguuaugaaaccuuuaaagugauuggcggguggucaacgcccaacaguaaacuucagauaaaucgucaggucaucguggacuccgauaaccgcagcggauacucuggcauuuucucaguagaggguaagaguugcaucaauagauguuuuuauguugaguugaucagggggcgggaacaagagacccgagugugguggacaagcaacuccauugucguguucugcggcacuucuggaaccuacggcacagggucguggccugacggagcggauauaaaucugaugccaaucuga

SEQ ID NO: 142819 - RNA, 1410 nt, Artificial Sequence; identical to SEQ ID NO: 142185
  derived and/or modified CDS sequence (opt3) from neuraminidase__InfluenzaA__ABD15452

SEQ ID NO: 142820 - RNA, 1410 nt, Artificial Sequence; identical to SEQ ID NO: 142273
  derived and/or modified CDS sequence (opt3) from neuraminidase__InfluenzaA__ABD15463

SEQ ID NO: 142821 - RNA, 1410 nt, Artificial Sequence; identical to SEQ ID NO: 142193
  derived and/or modified CDS sequence (opt3) from neuraminidase__InfluenzaA__ABD15474

SEQ ID NO: 142822 - RNA, 1410 nt, Artificial Sequence
  derived and/or modified CDS sequence (opt3) from neuraminidase__InfluenzaA__ABD15485
augaaccccaaucagaagaucauuaccauaggcagcgugucccugacaaucgccacuauuugcuuccucaugcaaaucgcuauucuugucacgaccguuacacugcacuuuaaacagcaugaguguaacucuccuccaaauaaccaggugauguugugcgaaccgacuaucauagagagaaauaucaccgaaauuguauacuuaacaaacaccacuaucgagaaggaaauuugucccaaacuggcagaguauaggaauuggucaaagccucagugcaacaucacaggguucgccccauuuaguaaagacaauagcauacggcuauccgcgggaggugauauuugggugacccgcgagcccuacgucucuugugacccugauaagugcuaucaauucgcucucggccaggggacgacucugaacaauggacacucgaacgacaccgugcaugaucgaacaccauaccguacucuucugaugaaugaauugggcguucccuuucaccucgguaccagacagguguguaucgccuggucaagcaguuccugccaugacgggaaggcauggcugcacgucugugugacaggagaugacaaaaacgccaccgcuucuuucauuuauaauggcaggcugguagauagcaucggcuccuggucaaagaaaauccuccggacgcaggagagugaaugcguuuguauuaacgggacuugcacaguggucaugaccgacggaagcgcaucugguaaggccgauacuaaaauauuauuuaucgaggagggcaagauugugcacaucuccacacugucagggagcgcucaacauguggaagagugcaguuguuacccucgcuauccaggagucagaugcguuuguagggacaacuggaagggcucuaaucggccgauaguggauauuaacguaaaagacuacuccaucgugagcucguacgucugcucuggucuugugggggacacccccaggaagaaugauuccuucucaaguagccacuguuuggacccuaacaaugaagagggaggccauggcguuaaagggugggccuuugaugacggaaacgauguguggaugggucgaacgaucuccgaaaagcugagaucuggcuaugagaccuucaaagucauugagggguggagcaagccaaauucaaaacuacagaucaaccgccaggugauuguagaacggggaaaucguaguggcuacuccgguauauuuagcguugaggggaagucuugcaucaaccgcuguuucuauguggaacucauuagaggcaggaaggaggaaacagaggucugguggacuucaaauaguaucguggucuuuugcggaaccagcggcacauacgggacuggauccuggcccgacggugcgaacaucaaucugaugccuauuuga

SEQ ID NO: 142823 - RNA, 1410 nt, Artificial Sequence; identical to SEQ ID NO: 142273
  derived and/or modified CDS sequence (opt3) from neuraminidase__InfluenzaA__ABD15496

SEQ ID NO: 142824 - RNA, 1410 nt, Artificial Sequence; identical to SEQ ID NO: 142193
  derived and/or modified CDS sequence (opt3) from neuraminidase__InfluenzaA__ABD15507

SEQ ID NO: 142825 - RNA, 1413 nt, Artificial Sequence
  derived and/or modified CDS sequence (opt3) from neuraminidase__InfluenzaA__ABD15518
augaaccccaaucagaagaucauuaccauaggcagcaucuccauugccaucgggauuaucucucugaugcuccaaauaggaaacaucauuucaaucugggcuagucacagcauucagacagguucccagaaucauacuggcaucugcaaccagagaauaauuacguacgaaaauucuaccugggugaaccacacauaugucaauaucaacaauacuaacguuguggcagggaaagacaagaccucgguaacacuugccggaaauucaagccuguguaguauuuccggcugggcgaucuacaccaaagauaacucuaucaggauugguagcaagggggacguguucgucauacgggagccuuuuaucuccugcucacauuuggagugucgcacuuucuuuuuaacacaaggagcucugcuaaaugauaaacacaguaacggcaccgugaaggaccgaagcccauaucgugcccucaugucuugcccgcugggcgaagcacccuccccuuacaauucaaaguucgagagcguugccuggagugcuucugcaugucaugaugggaugggauggcuuacgauugguaucuccggcccagacaacggggccguggcuguccugaaauauaacggaauaauuacugaaaccaucaagagcuggaaaaagagaaucuugaggacacaggagucggagugcguguguguaaauggcucuugcuuuacuauuaugaccgauggucccuccaacgggggagccucauacaaaaucuucaagauugaaaagggcaaaguuacaaagaguauagagcucaaugcgccuaacuuucacuaugaagaguguagcugcuacccagacaccggcacggugaugugugucugccgggauaauuggcacggguccaaccgccccugggugucuuucaaucagaaccuggacuaccagaucggauauauuugcagcgguguguuuggcgauaauccuagaccaaaagacgggaagggaucauguaacccggucacuguugauggcgcagacggugugaaaggguucaguuacaaguauggcaauggaguauggaucggcaggacaaaauccaaccggcugcgcaagggguuugagaugaucugggaccccaauggauggaccgauacugacagcgauuucucugugaagcaagacgucguggccauuacagauuggucagguuacaguggcagcuuuguucagcauccugaacucaccggguuagacugcauacgaccauguuucuggguggagcuggucagaggacuucccagggaaaacacgaccaucuggacauccgguucuucgauuagcuucugcggcguggauuccgacacugcuaauuggucauggccugauggggccgaguugccauuuaccaucgacaaauga

SEQ ID NO: 142826 - RNA, 1410 nt, Artificial Sequence; identical to SEQ ID NO: 142375
  derived and/or modified CDS sequence (opt3) from neuraminidase__InfluenzaA__ABD15529

SEQ ID NO: 142827 - RNA, 1410 nt, Artificial Sequence; identical to SEQ ID NO: 142562
  derived and/or modified CDS sequence (opt3) from neuraminidase__InfluenzaA__ABD15551

SEQ ID NO: 142828 - RNA, 1410 nt, Artificial Sequence
  derived and/or modified CDS sequence (opt3) from neuraminidase__InfluenzaA__ABD15562
augaaccccaaucagaagaucauuaccauaggcagcgugucccugacaaucgccacuauuugcuuccucaugcaaaucgcuauucuugucacgaccguuacacugcacuuuaaacaguacgaguguucuucaccuccaaacaaucaggugauguugugcgaaccgacuaucauagagagaaacaucaccgaaauuguauauuuaacaaauaccacuaucgagaaggaaauuugucccaaacuggcagaguacaggaacuggaguaagccucagugcaaaaucacaggguucgccccauuuagcaaggacaauuccauacggcuaucugcgggaggugauauuugggugacccgcgagcccuaugucucgugugacccugauaagugcuaccaauucgcucucggccaggggacgacucugaacaaucgacauucaaacgacaccgugcacgaucguacaccauauagaacucuucugaugaaugaauugggaguucccuuucaucucggcaccaaacagguguguaucgccuggagcaguuccucuugccacgacgguaaggcauggcugcaugucugugugacagggcacgaugagaacgccaccgcuagcuucauuuacgacggaaggcugguagauuccaucggcucauggaguaaaaagauccuccggacgcaggaaagcgagugcguuuguauuaauggcacuugcacaauagugaugaccgacgggucugcauccggacgcgccgauacuaaaaucuuauuuauugaggaagguaagaucguccacauaucaccucugagcggcagugcucaacauguggaggaaugcucuuguuauccaagauacccgggggugaggugcgucugucgggacaacuggaagggauccaaucgccccauuguugauaucaacgugaaagacuacagcaucguaucgucuuaugugugcuccggccuugucggugacacaccucgaaagaacgauucaaguagcuccucucacuguuugaauccaaacaaugaggaagggggacauggcgugaaaggcugggccuucgacgaugggaacgacguuuggaugggaagaaccauuagcgagaaguuuaggucagguuacgagacguucaaagugaucgaaggcuggaguaagcccaauuccaaacugcagauuaaccggcaggucauaguggaucgugggaaucgcagcggauauucuggcaucuuuucaguagaggguaagaguugcauuaacagauguuucuacguugaacuaaucagggggcggaagcaggagaccgaagugugguggacaagcaauuccaucgucguguuuugcggcacuucuggaaccuauggcacagggucguggccugacggagcggauauuaaccucaugccaauauga

SEQ ID NO: 142829 - RNA, 1410 nt, Artificial Sequence
  derived and/or modified CDS sequence (opt3) from neuraminidase__InfluenzaA__ABD15573
augaaccccaaucagaagaucauuaccauaggcagcgugucccugacaaucgccacuauuugcuuccucaugcaaaucgcuauucuugucacgaccguuacacugcacuuuaaacaguacgaguguaacucuccuccaaauaaccaggugauguugugcgaaccgacuaucauagagagaaauaucaccgaaauuguauauuuaacaaacaccacuaucgagaaggaaauuugucccaaacuggcagaguacaggaauuggucaaagccucagugcaaaaucacaggguucgccccauuuaguaaggacaacagcauacggcuauccgcgggaggugauauuugggugacccgcgagcccuaugucucuugugacccugauaagugcuaccaauucgcucucggccaggggacgacucugaauaacggacauucgaaugacaccgugcacgaucgaacaccauaucguacucuucugaugaacgaauugggcguucccuuucaucucgguaccaaacagguguguauggccuggucaagcaguuccugccacgacgggaaggcauggcugcaugucugugugacaggacacgaugagaaugccaccgcuucuuucaucuacgacggcagacugguagauagcauuggcuccuggaguaaaaagauccucaggacgcaggaaucagagugcguuuguaucaacgggacuugcacaguggucaugaccgacggaagcgcaucuggucgggccgauacuaaaauuuuauuuauagaggaaggcaagaucgugcacauuucccaacugucagggagcgcucagcauguggaggaaugcaguuguuauccucgcuacccaggagucagaugcguuuguagggacaauuggaagggcucuaaccggccgaucguggauauaaacguaaaagaccacuccauugugagcucguacgucugcucuggucuugugggggacacaccccgcaagaaugauuccucaaguagcucccauuguuugaacccuaauaacgaggaaggaggccacggcguuaaagggugggccuucgacgauggaaaugacguguggaugggucgaaccaucucugagaagcugagaagcggcuaugagacguuuaaagucaucgaaggguggucaaagccaaacaguaaacuacagauuaauaggcaagugaucguagaucggggaaaccguuccggcuacagcgguauuuucucuguugaggggaagucaugcauaaaucgcuguuuuuauguggaacucaucagaggcaggaagcaggagaccgaagucugguggacaaguaacagcauuguggucuucugcggaacuuccggcaccuacgggacaggaucuuggcccgacggugcggauaucaaucugaugccuaucuga

SEQ ID NO: 142830 - RNA, 1410 nt, Artificial Sequence
  derived and/or modified CDS sequence (opt3) from neuraminidase__InfluenzaA__ABD15584
augaaccccaaucagaagaucauuaccauaggcagcgugucccugacaaucgccacuauuugcuuccucaugcaaaucgcuauucuugucacgaccguuacacugcacuuuaaacaguacgaguguucuucaccuccaaacaaucaggugauguugugcgaaccgacuaucauagagagaaacaucaccgaaauuguauauuuaacaaauaccacuaucgagaaggaaauuugucccaaacuggcagaguacaggaacuggaguaagccucagugcaaaaucacaggguucgccccauuuagcaaggacaauuccauacggcuaucugcgggaggugauauuugggugacccgcgagcccuaugucucgugugacccugauaagugcuaccaauucgcucucggccaggggacgacucugaacaaucgacauucaaacgacaccgugcacgaucguacaccauauagaacucuucugaugaaugaauugggaguucccuuucaucucggcaccaaacagguguguaucgccuggagcaguuccucuugccacgacgguaaggcauggcugcaugucugugugacagggcacgaugagaacgccaccgcuagcuucauuuacgacggaaggcugguagauuccaucggcucauggaguaaaaagauccuccggacgcaggaaagcgagugcguuuguauuaauggcacuugcacaguggucaugaccgacgggucugcauccggacgcgccgauacuaaaauauuauuuaucgaggaagguaagauugugcacaucucaccucugagcggcagugcucaacauguggaggaaugcucuuguuauccaagauacccgggggucaggugcguuugucgggacaacuggaagggauccaaucgccccauaguggauauuaacguaaaagacuacagcaucgugucgucuuaugucugcuccggccuugugggugacacaccucgaaagaacgauucaaguagcuccucucacuguuugaauccaaacaaugaggaagggggacauggcguuaaaggcugggccuucgacgaugagaacgacguguggauggggagaaccaucagcgagaaguuuaggucaggauacgaaacguucaaagucauugaggguuggaguaagcccaauuccaaacugcagaucaaccgucaggugauuguagaucggggcaaucgcagcggguauucuggaauauuuucaguugaaggcaagaguugcaucaacagauguuucuacguggagcuaauuaggggucggaagcaggaaaccgaggucugguggacaagcaauuccaucaucguguuuugcgggacuucuggcaccuauggaacaggcucguggccugacggggcggauauuaaccucaugccaauauga

SEQ ID NO: 142831 - RNA, 1410 nt, Artificial Sequence; identical to SEQ ID NO: 142562
  derived and/or modified CDS sequence (opt3) from neuraminidase__InfluenzaA__ABD15595

SEQ ID NO: 142832 - RNA, 1410 nt, Artificial Sequence; identical to SEQ ID NO: 142562
  derived and/or modified CDS sequence (opt3) from neuraminidase__InfluenzaA__ABD15606

SEQ ID NO: 142833 - RNA, 1410 nt, Artificial Sequence; identical to SEQ ID NO: 142562
  derived and/or modified CDS sequence (opt3) from neuraminidase__InfluenzaA__ABD15617

SEQ ID NO: 142834 - RNA, 1410 nt, Artificial Sequence; identical to SEQ ID NO: 142621
  derived and/or modified CDS sequence (opt3) from neuraminidase__InfluenzaA__ABD15639

SEQ ID NO: 142835 - RNA, 1410 nt, Artificial Sequence; identical to SEQ ID NO: 142778
  derived and/or modified CDS sequence (opt3) from neuraminidase__InfluenzaA__ABD15650

SEQ ID NO: 142836 - RNA, 1410 nt, Artificial Sequence; identical to SEQ ID NO: 142301
  derived and/or modified CDS sequence (opt3) from neuraminidase__InfluenzaA__ABD15661

SEQ ID NO: 142837 - RNA, 1410 nt, Artificial Sequence; identical to SEQ ID NO: 142778
  derived and/or modified CDS sequence (opt3) from neuraminidase__InfluenzaA__ABD15683

SEQ ID NO: 142838 - RNA, 1410 nt, Artificial Sequence; identical to SEQ ID NO: 142301
  derived and/or modified CDS sequence (opt3) from neuraminidase__InfluenzaA__ABD15694

SEQ ID NO: 142839 - RNA, 1410 nt, Artificial Sequence; identical to SEQ ID NO: 142778
  derived and/or modified CDS sequence (opt3) from neuraminidase__InfluenzaA__ABD15705

SEQ ID NO: 142840 - RNA, 1410 nt, Artificial Sequence; identical to SEQ ID NO: 142778
  derived and/or modified CDS sequence (opt3) from neuraminidase__InfluenzaA__ABD15727

SEQ ID NO: 142841 - RNA, 1410 nt, Artificial Sequence
  derived and/or modified CDS sequence (opt3) from neuraminidase__InfluenzaA__ABD15749
augaaccccaaucagaagaucauuaccauaggcagcgugucccugacaaucgccacuauuugcuuccucaugcaaaucgcuguccuuguuacgaccgugacacugcacuuuaaacaguacgaguguaacucuccuccaaauaaccagguaauguugugcgaaccgacuauuaucgagagaaauauaaccgaaaucguguauuuaacaaacaccacuauugagaaggaaaucugucccaaacuggcagaguacaggaauuggucaaagccucagugcaacauuacaggguucgccccauuuaguaaagacaauagcauccggcuauccgcgggaggugauauaugggucacccgcgagcccuaugugucuugugacccugauaagugcuaccaauucgcucucggccaggggacgacucugaacaauggacauucgaacgacaccguucacgaucgaacaccauaucguacucuucugaugaaugaauugggcgugcccuuucaucucgguaccaagcaggucuguauugccuggucaagcaguuccugccacgacgggaaagcauggcugcauguguguguaacaggagaugacgagaacgccaccgcuucuuucaucuacaauggcagacugguugauagcauuggcuccuggucaaagaaaauccucaggacgcaggaaagugagugcguguguaucaacgggacuugcacagucgugaugaccgacggaagcgcaucugguaaggccgauacuaaaauuuuauuuauagaggaaggcaagaucgugcacacaucccugcuuucagggagcgcucaacacgucgaggaaugcaguuguuauccucgguacccaggaguucgcugcguguguagagacaacuggaagggcucuaauaggccgauuguagauaucaacgugaaagacuacuccauagucagcucguaugugugcucugguuugguuggggacacuccccggaagaaugauuccucaaguagcucccauugucuggacccuaacaaugaggaaggaggccacggcgugaaagggugggccuucgaugacggaaacgaugucuggaugggucgcacgauuucugagaagcuacgaagcggcuacgagaccuuuaaagugaucgaaggguggucaaagccaaauaguaaacuccagaucaacagacagguaauuguugacaggggaaaucgguccggcuauagcgguaucuucucuguggaggggaagucaugcauuaaccguuguuuuuacgucgaacugauacgcggcagaaagcaggagacagaagugcuuuggaccaguaauagcaucgucguguucugcggaaccuccggcacauaugggacuggaucuuggcccgauggugcggacauuaaccugaugccuaucuga

SEQ ID NO: 142842 - RNA, 1410 nt, Artificial Sequence; identical to SEQ ID NO: 142841
  derived and/or modified CDS sequence (opt3) from neuraminidase__InfluenzaA__ABD15760

SEQ ID NO: 142843 - RNA, 1410 nt, Artificial Sequence; identical to SEQ ID NO: 142778
  derived and/or modified CDS sequence (opt3) from neuraminidase__InfluenzaA__ABD15771

SEQ ID NO: 142844 - RNA, 1410 nt, Artificial Sequence; identical to SEQ ID NO: 142778
  derived and/or modified CDS sequence (opt3) from neuraminidase__InfluenzaA__ABD15782

SEQ ID NO: 142845 - RNA, 1410 nt, Artificial Sequence; identical to SEQ ID NO: 142778
  derived and/or modified CDS sequence (opt3) from neuraminidase__InfluenzaA__ABD15793

SEQ ID NO: 142846 - RNA, 1410 nt, Artificial Sequence; identical to SEQ ID NO: 142762
  derived and/or modified CDS sequence (opt3) from neuraminidase__InfluenzaA__ABD16306

SEQ ID NO: 142847 - RNA, 1410 nt, Artificial Sequence
  derived and/or modified CDS sequence (opt3) from neuraminidase__InfluenzaA__ABD16317
augaaccccaaucagaagaucauuaccauaggcagcgugucccugacaaucucuacuauuugcuucuuuaugcagaucgccauucucaucacgaccgucacacuucacuucaaacaguacgaguuuaacucaccuccaaauaaccagguuaugcugugugaaccgacuauaaucgagagaaauauuaccgaaaucguguauuugacaaacaccacuauugagaaggaaaucugccccaaauuagcugaguacaggaauuggaguaagccucaguguaacauaacaggguucgcaccauuuagcaaagacaauuccauucggcugucugccggaggugauaucuggguaacccgcgagcccuaugugucgugcgacccugauaaguguuaccaauucgcgcuaggccaggggacgacucucaacaauguccauucaaacgacaccgugcgagaucguacaccauauagaacucugcuuaugaaugaacugggaguucccuuucacuugggcaccaaacaggugugcauugcuuggagcaguuccucuugucaugacgguaaggccuggcuccacgucugcgugacaggggaugacaagaacgcaaccgccagcuucaucuacaauggaaggcugguagauuccaucguuucauggaguaaagagauucugcggacgcaggaaagcgagugugugugcauaaacggcacuuguacagucgugaugaccgacggcucugcuuccgggaaggcagauacuaaaauccucuuuauugaggaaggaaagaucgugcauacaucaaccuuaagcgguagugcccaacacgucgaggaaugcucuugcuauccucgcuacccaggcguuagaugugugugcagggacaacuggaagggguccaaucggccgauaguagauauuaacaucaaagacuacagcaucgugucgucuuaugucuguuccggacuggugggcgacacgccccgcaagaaugauucaaguagcuccucucacugccuugacccuaacaaugaggaaggugggcauggaguuaaaggcugggcuuucgaugacggcaacgauguguggauggggcgaaccauuagcgagaaguugagaucaggauacgagacauuuaaagucaucgaagguuggaguaauccaaacuccaagcugcagauuaauaggcaagugauaguagaccggggcaaccguagcggguauucuggaaucuucucaguugagggcaaaaguuguauuaaucgcugcuuuuacguggaacuaaucagagguaggaaggaggaaacugagguccucuggaccagcaacuccaucguggucuucugugggacaucuggcacuuauggaaccggcucguggcccgauggggccgacauuaaucugaugccuauauga

SEQ ID NO: 142848 - RNA, 1410 nt, Artificial Sequence; identical to SEQ ID NO: 142762
  derived and/or modified CDS sequence (opt3) from neuraminidase__InfluenzaA__ABD16328

SEQ ID NO: 142849 - RNA, 1410 nt, Artificial Sequence
  derived and/or modified CDS sequence (opt3) from neuraminidase__InfluenzaA__ABD16339
augaaccccaaucagaagaucauuaccauaggcagcgugucccugacaaucucuacuauuugcuucuuuaugcaaaucgccauucucaucacgaccgucacacuucacuucaaacaguacgaguuuaacucaccuccaaauaaccagguuaugcugugugaaccgacuauaaucgagagaaauauuaccgaaaucguguauuugacaaacaccacuauugagaaggaaaucugccccaaauuagcugaguacaggaauuggaguaagccucagugugacauaacaggguucgcaccauuuagcaaagauaacuccauucggcugucugccggaggugacaucuggguaacccgcgagcccuaugugucgugcgauccugacaaguguuaccaauucgcgcuaggccaggggacgacucucaauaacguccauucaaaugauaccgugcacgaccgaacaccauaucguacucugcuuaugaacgaacugggaguucccuuucauuugggcaccaaacaggugugcauugcuuggagcaguuccucuugucacgaugguaaggccuggcuccaugucugcgugacaggggacgauaagaaugcaaccgccagcuucaucuacaacggaagacugguagacuccaucguuucauggaguaaaaagauucugaggacgcaggagagcgaaugugugugcauaaauggcacuuguacagucgugaugaccgauggcucugcuuccgggaaagcagacacuaagauccucuuuauugaggagggaaagaucgugcacacaucaaccuuaagcgguagugcccaacacgucgaagagugcucuugcuauccucgguacccaggcguucgcugugugugcagagauaacuggaaaggguccaacaggccgauaguagacauuaauaucaaggacuacagcaucgugucgucuuaugucuguuccggacuggugggcgauacgccccggaaaaacgacucaaguagcuccggucauugccuugauccuaauaacgaagaagggggacacggcguuaagggcugggcuuucgacgaugggaaugacguguggaugggacgcaccauuucugagaaauugcgaagcgguuacgagacauuuaaggucaucgagggcuggucaaacccaaauaguaaacugcagauuaacagacaggugauaguagauagggggaaucgguccggauauagcggcaucuucucuguugaagguaagucauguauuaaccguugcuuuuacguggagcuaauccgcgggagaaaggaagagacugaaguccucuggaccaguaauagcaucguggucuucuguggcacauccggaacuuauggcaccgggucuuggcccgacggagccgauauuaaccugaugccuauauga

SEQ ID NO: 142850 - RNA, 1410 nt, Artificial Sequence
  derived and/or modified CDS sequence (opt3) from neuraminidase__InfluenzaA__ABD16361
augaaccccaaucagaagaucauuaccauaggcagcgugucccugacaaucucuacuauuugcuucuuuaugcaaaucgccauucucaucacgaccgucacacuucacuucaaacaguacgaguuuaacucaccuccaaauaaccagguuaugcugugugaaccgacuauaaucgagagaaauauuaccgaaaucguguauuugacaaacaccacuauugagaaggaaaucugccccaaauuagcugaguacaggaauuggaguaagccucagugugacauaacaggguucgcaccauuuagcaaagauaacuccauucggcugucugccggaggugacaucuggguaacccgcgagcccuaugugucgugcgauccugacaaguguuaccaauucgcgcuaggccaggggacgacucucaauaacguccauucaaaugauaccgugcacgaccgaacaccauaucguacucugcuuaugaacgaacugggaguucccuuucauuugggcaccaaacaggugugcauugcuuggagcaguuccucuugucacgaugguaaggccuggcuccaugucugcgugacaggggacgauaagaaugcaaccgccagcuucaucuacaacggaaaacugguagacuccaucguuucauggaguaagaaaauucugagaacgcaggagagcgaaugugugugcauaaauggcacuuguacagucgugaugaccgauggcucugcuuccgggaaggcagacacuaagauccucuuuauugaggagggaaaaaucgugcacacaucaaccuuaagcgguagugcccaacacgucgaagagugcucuugcuauccuagguacccaggcguucggugugugugccgcgauaacuggaagggguccaacagaccgauaguagacauuaauaucaaagacuacagcaucgugucgucuuaugucuguuccggacuggugggcgauacgcccaggaagaacgacucaaguagcuccucucauugccuugauccuaauaacgaagagggugggcacggaguuaaaggcugggcuuucgacgauggcaaugacguguggauggggcggaccauuagcgaaaaguugcgcucaggauacgagacauuuaaagucaucgaggguuggaguaacccaaauuccaagcugcagauuaaccgacaggugauaguagauagaggcaauaggagcggguauucuggaaucuucucaguugaaggcaagaguuguauuaaccggugcuuuuacguggagcuaauccguggucgcaaagaagagacugaaguccucuggaccagcaauuccaucguggucuucugugggacaucuggcacuuauggaaccggcucguggcccgacggggccgauauuaaccugaugccuauauga

SEQ ID NO: 142851 - RNA, 1410 nt, Artificial Sequence; identical to SEQ ID NO: 142762
  derived and/or modified CDS sequence (opt3) from neuraminidase__InfluenzaA__ABD16475

SEQ ID NO: 142852 - RNA, 1410 nt, Artificial Sequence; identical to SEQ ID NO: 142762
  derived and/or modified CDS sequence (opt3) from neuraminidase__InfluenzaA__ABD16486

SEQ ID NO: 142853 - RNA, 1410 nt, Artificial Sequence; identical to SEQ ID NO: 142789
  derived and/or modified CDS sequence (opt3) from neuraminidase__InfluenzaA__ABD16497

SEQ ID NO: 142854 - RNA, 1410 nt, Artificial Sequence; identical to SEQ ID NO: 142762
  derived and/or modified CDS sequence (opt3) from neuraminidase__InfluenzaA__ABD16508

SEQ ID NO: 142855 - RNA, 1410 nt, Artificial Sequence
  derived and/or modified CDS sequence (opt3) from neuraminidase__InfluenzaA__ABD16519
augaaccccaaucagaagaucauuaccauaggcagcgugucccugacaaucucuacuauuugcuucuuuaugcaaaucgccauucucaucacgaccgucacacuucacuucaaacaguacgaguuuaacucaccuccaaauaaccagguuaugcugugugaaccgacuauaaucgagagaaauauuaccgaaaucguguauuugacaaacaccacuauugagaaggaaaucugccccaaauuagcugaguacaggaauuggaguaagccucagugugacauaacaggguucgcaccauuuagcaaagauaacuccauucggcugucugccggaggugacaucuggguaacccgcgagcccuaugugucgugcgauccugacaaguguuaccaauucgcgcuaggccaggggacgacucucaauaacguccauucaaaugauaccgugcacgaccgaacaccauaucguacucugcuuaugaacgaacugggaguucccuuucauuugggcaccaaacaggugugcauugcuuggagcaguuccucuugucacgaugguaaggccuggcuccaugucugcgugacaggggacgauaagaaugcaaccgccagcuucaucuacaacggaagacugguagacuccaucguuucauggaguaaagauauucugaggacgcaggagagcgaaugugugugcauaaauggcacuuguacagucgugaugaccgacggcucugcuuccgggaaggcagauacuaaaauccucuuuauugaggagggaaagaucgugcacacaucaaccuuaagcgguagugcccaacacgucgaagagugcucuugcuauccucgguacccaggcguucgcugugugugcagagacaacuggaagggguccaacaggccgauaguagacauuaauaucaaagauuacagcaucgugucgucuuaugucuguuccggacuggugggcgacacgccccggaagaccgauucaaguagcuccucucauugccuugacccuaacaaugaagagggugggcacggaguuaaaggcugggcuuucgaugacggcaacgauguguggauggggcgcacaauuagcgaaaaguugcgacugggauacgagacuuuuaaagucaucgaggguuggucaaauccaaacaguaagcuacagauuaauagacaggugauaguagacaggggcaaccgguccggguauagcggaaucuucucuguugaaggcaaaucauguauuaaucguugcuuuuacguggagcucauccgcgguagaaaggaagagaccgaaguccuguggacaaguaacagcaucguggucuucugugggacuuccggcaccuauggaacaggcucuuggcccgauggggccgacauuaaucuuaugccuauauga

SEQ ID NO: 142856 - RNA, 1410 nt, Artificial Sequence
  derived and/or modified CDS sequence (opt3) from neuraminidase__InfluenzaA__ABD16530
augaaccccaaucagaagaucauuaccauaggcagcgugucccugacaaucgccacuauuugcuuccucaugcaaaucgcuauucuugucacgaccguuacacugcacuuuaaacagcaugaguguaacucuccuccaaauaaccaggugauguugugcgaaccgacuaucauagagagaaauaucaccgaaauuguauacuuaacaaacaccacuaucgagaaggaaauuugucccaaacugguggaguauaggaauuggucaaagccucagugcaacaucacaggguucgcaccauuuaguaaagacaauagcauacggcuauccgccggaggugauauuugggucacccgcgagcccuacgugucuugugacccugauaagugcuaucaauucgcgcucggccaggggacgacucugaacaauggacacucgaacgacaccguucaugaucgaacaccauaccguacucuucugaugaaugaauugggcgugcccuuucaccucgguaccagacaggucuguaucgcuuggucaagcaguuccugccaugacgggaaggccuggcugcacguguguguaacaggagaugacaaaaacgcaaccgccucuuucauuuauaauggcaggcugguugauagcaucggcuccuggucaaagaaaauccuccggacgcaggagagugaaugcguguguauuaacgggacuugcacagucgugaugaccgacggaagcgcuucugguaaggcagauacuaaaauauuauuuaucgaggagggcaagauugugcacaucuccacacugucagggagcgcccaacaugucgaagagugcaguuguuacccucgcuauccaggaguuagaugcguguguagggacaacuggaagggcucuaaucggccgauaguagauauuaacgugaaagacuacuccaucgucagcucguacgugugcucuggucuuguuggggacacgccccgcaagaaugauuccuucucaaguagccacuguuuggacccuaacaaugaagagggaggccauggcgugaaagggugggcuuuugaugacggaaacgaugucuggaugggucgaaccaucuccgaaaagcugagaucuggcuaugagaccuucaaagugauugagggguggagcaagccaaauucaaaacuacagaucaacaggcagguaauuguugaacggggaaaucguaguggcuacuccgguauauuuagcguggaggggaagcgcugcaucaacagauguuucuaugucgaacucauuaggggccggaaggaggaaacagaggugugguggacuucuaauucaaucgucguguuuugcggaaccaguggcacauacgggacuggaagcuggcccgacggugccgauaucaaccugaugccuauuuga

SEQ ID NO: 142857 - RNA, 1410 nt, Artificial Sequence; identical to SEQ ID NO: 142639
  derived and/or modified CDS sequence (opt3) from neuraminidase__InfluenzaA__ABD16541

SEQ ID NO: 142858 - RNA, 1410 nt, Artificial Sequence; identical to SEQ ID NO: 142762
  derived and/or modified CDS sequence (opt3) from neuraminidase__InfluenzaA__ABD16552

SEQ ID NO: 142859 - RNA, 1410 nt, Artificial Sequence; identical to SEQ ID NO: 142761
  derived and/or modified CDS sequence (opt3) from neuraminidase__InfluenzaA__ABD16563

SEQ ID NO: 142860 - RNA, 1410 nt, Artificial Sequence
  derived and/or modified CDS sequence (opt3) from neuraminidase__InfluenzaA__ABD16574
augaaccccaaucagaagaucauuaccauaggcagcgugucccugacaaucgccacuauuugcuuccucaugcaaaucgcuauucuugucacgaccguuacacugcacuuuaaacaguacgaguguucuucaccuccaaacaaucaggugaugccgugcgaacccacuaucauagagagaaacaucaccgaaauuguauauuugacaaauaccacuaucgagaaggaaauuuguccuaaauuaguggaguacaggaacuggaguaagccacagugcaaaaucacaggguucgcacccuuuagcaaggacaauuccauacggcugucugccggaggugauauuugggucacccgcgagccuuaugugucgugugacccaggcaagugcuaccaauucgcgcuagggcagggaacgacucucaacaaucgacauucaaacgauaccguucacgaccguacacccuauagaacucugcuuaugaaugaacugggcgugccuuuucauuuggguaccaaacaggucuguaucgcuuggagcaguuccucuugccacgaugggaaggccuggcuccauguguguguaacaggacacgacgagaacgcaaccgccagcuucauuuacgauggcaggcugguugacuccaucggcucauggaguaaaaauauccugcggacgcaggaaagcgagugcguguguauuaacgggacuugcacagucgugaugaccgauggaucugcuuccgagcgcgcagacacuaagauacucuuuaucgaagaggguaaaauugugcacaucucaccauuaagcggcagugcccaacaugucgaagagugcucuuguuauccgagauaccccgggguuaggugcgugugucgggauaauuggaagggauccaaccgcccuauaguagacauuaacgugaaggauuacagcaucgucucgucuuaugugugcuccggccugguuggugacacaccacgaaagaaugacagaucaaguagcuccuacuguaggaaccccaauaacgaaaaagggucucacggagugaaaggcugggcuuucgaugacggcaaugaugucuggauggggcggaccaucggagaggagcuucguagcgguuaugaaacguuuaaggugauuggcggguggucaaccccuaacaguaaauugcagaucaaucgccagguaauuguugacuccggaaacagaagcggcuacucugguauauucucaguggaggggaagaguugcaucaauagguguuuuuaugucgaacugauucggggccgcaaaaaggagacacgagugugguggacuagcaacuccaucgucguguucugcggaaccucuggcacauacgggacuggaucguggccagauggugccgacaucaaucuaaugcccauuuga

SEQ ID NO: 142861 - RNA, 1410 nt, Artificial Sequence
  derived and/or modified CDS sequence (opt3) from neuraminidase__InfluenzaA__ABD16585
augaaccccaaucagaagaucauuaccauaggcagcgugucccugacaaucgccacuauuugcuuccucaugcaaaucgcuauucuugucacgaccguuacacugcacuuuaaacaguacgaguguucuucaccuccaaacaaucaggugaugccgugcgaacccacuaucauagagagaaacaucaccgaaauuguauauuugacaaauaccacuaucgagaaggaaauuuguccuaaauuaguggaguacaggaacuggaguaagccacagugcaaaaucacaggguucgcacccuuuagcaaggacaauuccauacggcugucugccggaggugauauuugggucacccgcgagccuuaugugucgugugacccaggcaagugcuaccaauucgcgcuagggcagggaacgacucucaacaaucgacauucaaacgauaccguucacgaccguacacccuauagaacucugcuuaugaaugaacugggcgugccuuuucauuuggguaccaaacaggucuguaucgcuuggagcaguuccucuugccacgaugggaaggccuggcuccauguguguguaacaggacacgacaaaaacgcaaccgccagcuucauuuacgauggcaggcugguugacuccaucggcucauggaguaagaauauccugcggacgcaggagagcgaaugcguguguauuaacgggacuugcacagucgugaugaccgauggaucugcuuccgagcgcgcagacacuaaaauacucuuuaucgaggaagguaagauugugcacaucucaccauuaagcggcagugcccaacaugucgaggaaugcucuuguuauccgagauaccccgggguuaggugcgugugucgggauaauuggaagggauccaaccgcccuauaguagacauuaacgugaaagauuacagcaucgucucgucuuaugugugcuccggccugguuggugacacaccacgaaagaaugacagaucaaguagcuccuacuguaggaaccccaauaacgagaaagggucucacggagugaagggcugggcuuucgaugacggcaaugaugucuggauggggcggaccaucggagaggaacuucguagcgguuaugagacguuuaaagugauuggcggguggucaaccccuaacaguaaguugcagaucaaucgccagguaauuguugacuccggaaacagaagcggcuacucugguauauucucaguggaagggaaaaguugcaucaauagguguuuuuaugucgagcugauucggggccgagaacaggagacacgcgugugguggacuagcaacuccaucgucguguucugcggaaccucuggcacauacgggacuggaucguggccagauggugccgacaucaaucuaaugcccauuuga

SEQ ID NO: 142862 - RNA, 1410 nt, Artificial Sequence
  derived and/or modified CDS sequence (opt3) from neuraminidase__InfluenzaA__ABD16721
augaaccccaaucagaagaucauuaccauaggcagcgugucccugacaaucgccacuauuugcuuccucaugcaaaucgcuauucuugucacgaccguuacacugcacuuuaaacaguacgaguguucuucaccuccaaacaaucaggugaugccgugcgaacccaucauaaucgagagaaacauuacuaagaucguauauuugaccaauacaaccauugaaaaagagaucuguccuaaguuaguggaauacaggaacuggaguaaaccacagugcaagauaacuggguucgcacccuuuagcaaggacaauuccauucggcugucugccggaggugauaucugggucacacgcgagccuuaugugucgugugacccaggcaaaugcuaccaauucgcgcuagggcagggaaccacgcucaacaauaagcauucaaacgauacuauucacgaccgaacccccuaucguacacugcuuaugaaugagcugggcguuccuuuucauuuggguacuaaacagguguguaucgcuuggagcaguuccucuugccacgaugggaaggccuggcuccaugucugugugaccggacacgacaaaaacgcaacagccagcuucaucuacgauggcagacugguagacuccauuggcucauggaguaagaauauacugaggacccaggaaagcgagugcguuuguaucaacgggacgugcacuguggucaugacagauggaucugcuuccgaacgggcagacaccaagauucucuuuaucgaggaggguaaaauagugcacauuucaccauuaagcggcagugcccaacauguggaagagugcucuuguuauccgcgcuaccccggggucagaugcguuuguagggauaauuggaagggauccaaccggccuaucguggacaucaacguaaaagauuacagcauugugucgucuuaugucugcuccggccuggugggugacacuccacgcaagaaugaccgaucaaguagcuccuacugucagaaccccaauaacgaaaaagggaaucacggaguuaagggcugggcuuucgaugacggcaacgauguguggauggggagaacaaucggagaggaacuuaggucugguuaugagaccuuuaaagucauuggcggguggagcacgccuaauucaaaguugcagauaaaccgucaggugaucguagacaguaagaaucgguccggauacagcggcauuuucucuguugaggguaaaucaugcaucaaccgcuguuuuuauguggaacugaucagagggagggagcaagaaacccgggucugguggacaaguaauagcauuguggucuucugcggcacuuccggaaccuacggcacagggucuuggccagauggagccgacauaaaccuaaugcccaucuga

SEQ ID NO: 142863 - RNA, 1410 nt, Artificial Sequence; identical to SEQ ID NO: 142532
  derived and/or modified CDS sequence (opt3) from neuraminidase__InfluenzaA__ABD16732

SEQ ID NO: 142864 - RNA, 1410 nt, Artificial Sequence
  derived and/or modified CDS sequence (opt3) from neuraminidase__InfluenzaA__ABD16743
augaaccccaaucagaagaucauuaccauaggcagcgugucccugacaaucgccacuauuugcuuccucaugcaaaucgcuauucuugucacgaccguuacacugcacuuuaaacaguacgagugugacucuccugcaaacaaucaggugaugccaugcgaaccgaucauaaucgagagaaacauuacugaaaucguauauuugaccaauacaaccauugagaaggaaaucugucccaaauuaguggaguacaggaacuggucaaagccucagugcaaaauaacuggguucgccccauuuaguaaggauaauagcauucggcuguccgcgggaggugacaucugggucacacgcgagcccuaugugucuugugauccuggcaagugcuaccaauucgcucuagggcagggaaccacgcucgacaacaaacauucgaaugauacuauucacgaccgaaccccacaucguacacugcuuaugaacgaacugggcguucccuuucacuuggguacuagacagguguguaucgccuggucaagcaguuccugccaugaugggaaggcauggcuccacgucugugugaccggauaugacaaaaaugccacagcuucuuucaucuacgauggcaggcugguagacagcauuggcuccuggucacagaacauacugcggacccaagagagugaaugcguuuguaucaaugggacgugcacuguggucaugacagauggaagcgcaucuggucgcgccgacaccaagauucucuuuaucgaggagggcaaaauagugcacacuuccccuuuaucagggagcgcucagcauguggaagagugcaguuguuauccaagauacccgggagucaggugcauuugucgggauaacuggaagggcucuaaucgccccguuguggacaucaacguaaaggacuacuccaucgauagcucguaugugugcucuggucuggucggggacacaccucgaaacaaugauagauccucaaguagcuacuguaggaacccaaauaacgaaaaaggaacccacggcgugaagggcugggccuucgacgaugggaaugacguuuggaugggacggacgauuuccgaggauucucguagcgguuaugaaaccuuuaaagugaucggcggguggucaacacccaacaguaaacuucagaugaaucgccaggucauuguggacuccgauaacagaagcggauacucuggcauauucucaguagaggguaagaguugcaucaauagguguuuuuauguugaguugauucgggggcgagaacaagagacucgcgugugguggaccagcaacuccaucgucguguucugcggcacaucuggaacuuacggcaccgggucguggccugacggagcggauaucaaucugaugccaauuuga

SEQ ID NO: 142865 - RNA, 1410 nt, Artificial Sequence; identical to SEQ ID NO: 142624
  derived and/or modified CDS sequence (opt3) from neuraminidase__InfluenzaA__ABD16754

SEQ ID NO: 142866 - RNA, 1410 nt, Artificial Sequence; identical to SEQ ID NO: 142722
  derived and/or modified CDS sequence (opt3) from neuraminidase__InfluenzaA__ABD16765

SEQ ID NO: 142867 - RNA, 1410 nt, Artificial Sequence; identical to SEQ ID NO: 142166
  derived and/or modified CDS sequence (opt3) from neuraminidase__InfluenzaA__ABD17326

SEQ ID NO: 142868 - RNA, 1410 nt, Artificial Sequence
  derived and/or modified CDS sequence (opt3) from neuraminidase__InfluenzaA__ABD38137
augaaccccaaucagaagaucauuaccauaggcagcgugucccugacaaucgccacuauuugcuuccucaugcaaaucgcuauucuugucacgaccguuacacugcacuuuaaacaguacgaguguaacucuccuccaaauaaccaggugauguugugcgaaccgacuaucauagagagaaauaucaccgaaauuguauauuuaacaaacaccacuaucgagaaggaaauuugucccaaacuggcagaguacaggaauuggucaaagccucagugcaacaucacaggguucgccccauuuaguaaagacaauagcauacggcuauccgcgggaggugauauuugggugacccgcgagcccuaugucucuugugacccugauaagugcuaccaauucgcucucggccaggggacgacucugaacaauggacauucgaacgacaccgugcacgaucgaacaccauaucguacucuucugaugaaugaauugggcguucccuuucaucucgguaccagacagguguguaucgccuggucaagcaguuccugccacgacgggaaggcauggcugcaugucugugugacaggagaugacgagaacgccaccgcuucuuucauuuacaauggcaggcugguagauagcaucggcuccuggaguaaaaagauccuccggacgcaggaaucagagugcguuuguauuaacgggacuugcacaguggucaugaccgacggaagcgcaucugguaaagccgauacuaagauauuauuuaucgaggaaggcaaaauugugcacaucuccacacugucagggagcgcucaacacguggaggaaugcaguuguuauccucgcuacccaggagucagaugcguuuguagggacaacuggaagggcucuaaucggccgauaauugauaucaacgugaaggacuacuccaucguaagcucguaugugugcucuggucuugucggggacacgccccgcaaaaaugauuccuucucaaguagccauuguuuggacccuaacaaugaggaaggaggccacggcgugaaggggugggccuuugaugacggaaacgauguuuggaugggucgaaccauuuccgagaaacugagaucuggcuacgagaccuucaaggugaucgaaggguggagcaaaccaaauucaaagcuacagacaaacaggcaggucauuguggagcggggaaaucguaguggcuauuccgguauauuuagcguagaagggaaaucuugcaucaaccgcuguuucuacguugagcucauuagaggcaggaaggaggaacccgaggugugguggacuucaaauaguaucgucguguuuugcggaaccccuggcacauaugggacuggaagcuggccagacggugcggauaucaaccugaugcccauuuga

SEQ ID NO: 142869 - RNA, 1413 nt, Artificial Sequence; identical to SEQ ID NO: 142434
  derived and/or modified CDS sequence (opt3) from neuraminidase__InfluenzaA__ABD60782

SEQ ID NO: 142870 - RNA, 1410 nt, Artificial Sequence
  derived and/or modified CDS sequence (opt3) from neuraminidase__InfluenzaA__ABD60793
augaaccccaaucagaagaucauuaccauaggcagcgugucccugacaaucgccacuauuugcuuccucaugcaaaucgcuauucuugucacgaccguuacacugcacuuuaaacaguacgagugugacucuccugugaacaaucagguaaugccaugcgaaccgaucauaaucgagagaaacauuacugaaaucguguauuugaccaauacaaccauugagaaggaaaucugucccaaauuagucgaguacaggaacuggucaaagccucagugcaaaauaacuggguucgcaccauuuaguaaggauaauagcauucggcuguccgccggaggugacaucugggugacacgcgagcccuauguuucuugugauccuggcaagugcuaccaauucgcgcuagggcagggaaccacgcucgacaacaaacauucgaaugauacuauucacgaccgaaccccacaucguacacugcuuaugaacgaacugggcgugcccuuucacuuggguacuagacaggucuguaucgcuuggucaagcaguuccugccaugaugggaaggccuggcuccacguguguguaaccggauaugacaaaaaugcaacagccucuuucaucuacgauggcaggcugguugacagcauuguguccuggucacagaacauacugcggacccaagagagugaaugcgucuguaucaauggcacgugcacuguggugaugacagaugggagcgcuucugagcgcgcagacaccaagauucucuuuaucgaggaaggaaaaauaguccacauuuccccuuuaucagguagcgcccagcauguugaggaaugcaguuguuauccaagauacccgggcgugaggugcaucugucgggauaacuggaaggggucuaaucgccccguaguggacaucaacgucaaggacuacuccauugauagcucguaugugugcucuggacugguuggcgacacuccucgaaacaaugauagauccucaaacaguuacuguaggaauccaaacaaugagaaagguaaccacggggugaagggaugggcuuucgacgauggcaaugaccuuuggaugggccggacaaucagcgaagauucccguucuggguaugagaccuuuaaagucauuggagguuggagcacgcccaacucaaaguugcagauaaaucgccaggugaucguagacagugauaacagauccggcuacagcgggauuuucucuguugagggaaaaucaugcaucaauagguguuuuuauguggaacugauccggggccgagagcaagaaacccgcgucugguggacaaguaacagcauuauaguguucugcgguacuuccgggaccuacggcacaggaucuuggccugacggcgccgauaucaaucuaaugccaauuuga

SEQ ID NO: 142871 - RNA, 1410 nt, Artificial Sequence; identical to SEQ ID NO: 142567
  derived and/or modified CDS sequence (opt3) from neuraminidase__InfluenzaA__ABD60804

SEQ ID NO: 142872 - RNA, 1410 nt, Artificial Sequence; identical to SEQ ID NO: 142760
  derived and/or modified CDS sequence (opt3) from neuraminidase__InfluenzaA__ABD60815

SEQ ID NO: 142873 - RNA, 1410 nt, Artificial Sequence; identical to SEQ ID NO: 142762
  derived and/or modified CDS sequence (opt3) from neuraminidase__InfluenzaA__ABD60826

SEQ ID NO: 142874 - RNA, 1410 nt, Artificial Sequence; identical to SEQ ID NO: 142841
  derived and/or modified CDS sequence (opt3) from neuraminidase__InfluenzaA__ABD60837

SEQ ID NO: 142875 - RNA, 1410 nt, Artificial Sequence
  derived and/or modified CDS sequence (opt3) from neuraminidase__InfluenzaA__ABD60848
augaaccccaaucagaagaucauuaccauaggcagcgugucccugacaaucgccacuauuugcuuccucaugcaagucgcuauccuuguuacgaccgugacacugcacuuuaaacaguacgaguguaacucuccuccaaauaaccagguaauguugugcgaaccgacuauuaucgagagaaauauaaccgaaaucguguauuuaacaaacaccacuauugagaaggaaaucugucccaaacuggcagaguacaggaauuggucaaagccucagugcaacauuacaggguucgccccauuuaguaaagacaauagcauccggcuauccgcgggaggugauauaugggucacccgcgagcccuaugugucuugugacccugauaagugcuaccaauucgcucucggccaggggacgacucugaacaauggacauucgaacgacaccguucacgaucgaacaccauaucguacucuucugaugaaugaauugggcgugcccuuucaucucgguaccaagcaggucuguauugccuggucaagcaguuccugccacgacgggaaagcauggcugcauguguguguaacaggagaugacgagaacgccaccgcuucuuucaucuacaauggcagacugguugauagcauuggcuccuggucaaagaaaauccucaggacgcaggaaagugagugcguguguaucaacgggacuugcacagucgugaugaccgacggaagcgcaucugguaaggccgauacuaaaauuuuauuuauagaggaaggcaagaucgugcacacaucccugcuuucagggagcgcucaacacgucgaggaaugcaguuguuauccucgguacccaggaguucgcugcguguguagagacaacuggaagggcucuaauaggccgauuguagauaucaacgugaaagacuacuccauagucagcucguaugugugcucugguuugguuggggacacuccccggaagaaugauuccucaaguagcucccauugucuggacccuaacaaugaggaaggaggccacggcgugaaagggugggccuucgaugacggaaacgaugucuggaugggucgcacgauuucugagaagcuacgaagcggcuacgagaccuuuaaagugaucgaaggguggucaaagccaaauaguaaacuccagaucaacagacagguaauuguugacaggggaaaucgguccggcuauagcgguaucuucucuguggaggggaagucaugcauuaaccguuguuuuuacgucgaacugauacgcggcagaaagcaggagacagaagugcuuuggaccaguaauagcaucgucguguucugcggaaccuccggcacauaugggacuggaucuuggcccgauggugcggacauuaaccugaugccuaucuga

SEQ ID NO: 142876 - RNA, 1413 nt, Artificial Sequence
  derived and/or modified CDS sequence (opt3) from neuraminidase__InfluenzaA__ABD60881
augaaccccaaucagaagaucauuaccauaggcagcaucuccauugccaucgggauuaucucucugaugcuccaaauaggaaacaucauuucaaucugggcuagucacagcauucagacagguucccagaaucauacuggcaucugcaaccagagaauaauuacguacgaaaauucuaccugggugaaccacacauaugucaauaucaacaauacuaacguuguggcagggaaagacaagaccucgguaacacuugccggaaauucaagccuguguaguauuuccggcugggcgaucuacaccaaagauaacucuaucaggauugguagcaagggggacguguucgucauacgggagccuuuuaucuccugcucacauuuggagugucgcacuuucuuuuuaacacaaggagcucugcuaaaugauaaacacaguaacggcaccgugaaggaccgaagcccauaucgugcccucaugucuugcccgcugggcgaagcacccuccccuuacaauucaaaguucgagagcguugccuggagugcuucugcaugucaugaugggaugggauggcuuacgauugguaucuccggcccagacaacggggccguggcuguccugaaauauaacggaauaauuacugaaaccaucaagagcuggaaaaagagaaucuugaggacacaggagucggagugcguguguguaaauggcucuugcuuuacuauuaugaccgauggucccuccaacggggccgcgucauacaaaaucuucaagauugaaaagggaaaaguuacaaagaguauagagcucaaugcaccuaacuuucacuaugaagaguguagcugcuacccagacaccggcacggugaugugugucugccgggauaauuggcacggcuccaaccgccccugggugucuuucaaucagaaccuggacuaccagaucggguauauuugcagcggaguguuuggugauaauccuagaccaaaagacggcgaggggucauguaacccggucacuguugauggagccgacggcgugaaggguuucaguuacaaauaugggaauggcguauggaucggaaggacaaaguccaaccggcugcgcaaaggcuuugaaaugaucugggaccccaauggguggaccgauacugacagcaacuucucugugaagcaagaugucguggcuauuacagacuggucaggauacagugguagcuuuguucagcauccugagcucaccggcuuagauugcauacgaccauguuucuggguggaacuggucagagggcuucccagggagaauacgaccaucuggacauccggaucuucgauuagcuucugcggcgugaacuccgacacugccaacuggucauggccugauggugcagaauugccauuuaccaucgacaaguga

SEQ ID NO: 142877 - RNA, 1413 nt, Artificial Sequence
  derived and/or modified CDS sequence (opt3) from neuraminidase__InfluenzaA__ABD60892
augaaccccaaucagaagaucauuaccauaggcagcaucuccauugccaucgggauuaucucucugaugcuccaaauaggaaacaucauuucaaucugggcuagucacagcauucagacagguucccagaaucauacuggcaucugcaaccagagagugauaacguacgaaaauucuaccugggucaaccacacauauguuaauauuaacaauacuaacgugguagcagggaaagacaagaccucggugacacuugccggaaauucaagccuguguaguaucuccggcugggcgauuuacaccaaagauaacucuaucaggaucgguagcaagggggacgucuucgugauucgggagccuuuuauauccugcucacauuuggagugucgcacuuucuuuuuaacacaaggagcucugcuaaaugauaaacacaguaacggcaccguuaaggaccgaagcccauaucgugcccucaugucuugcccgcugggcgaagcacccuccccuuacaauucaaaguucgagagcguggccuggagugcuucugcaugucaugaugggaugggauggcuuacgaucgguauuuccggcccagacaacggggccgucgcugugcugaaauauaacggaaucauaacugaaaccauuaagagcuggaaaaagagaaucuugaggacacaggagucggagugcguauguguuaauggcucuugcuuuacuaucaugaccgauggucccuccaacggggccgcgucauacaaaauuuucaagaucgaaaagggaaaagugacaaagaguauugagcucaaugcaccuaacuuucacuaugaagaguguagcugcuacccagacaccggcacggucaugugugugugccgggauaauuggcacggcuccaaccgccccugggugucuuucaaucagaaccuggacuaccagauaggguauaucugcagcggagucuuuggugauaauccuagaccaaaagacggcgaggggucauguaacccgguuacuguggauggagccgacggcguaaaggguuucaguuacaaauaugggaauggcguguggauuggaaggacaaaguccaaccggcugcgcaaaggcuuugaaaugaucugggaccccaauggguggaccgauacugacagcaacuucucugucaagcaagaugugguugcuaucacagacuggucaggauacagugguagcuuugugcagcauccugagcucaccggcuuagauugcauucgaccauguuucugggucgaacuggugagagggcuucccagggagaauacgaccauauggacauccggaucuucgaucagcuucugcggcguaaacuccgacacugccaacuggucauggccugauggugcagaauugccauuuaccauugacaaguga

SEQ ID NO: 142878 - RNA, 1413 nt, Artificial Sequence; identical to SEQ ID NO: 142876
  derived and/or modified CDS sequence (opt3) from neuraminidase__InfluenzaA__ABD60903

SEQ ID NO: 142879 - RNA, 1413 nt, Artificial Sequence; identical to SEQ ID NO: 142463
  derived and/or modified CDS sequence (opt3) from neuraminidase__InfluenzaA__ABD60914

SEQ ID NO: 142880 - RNA, 1410 nt, Artificial Sequence
  derived and/or modified CDS sequence (opt3) from neuraminidase__InfluenzaA__ABD60925
augaaccccaaucagaagaucauuaccauaggcagcgugucccugacaaucgccacuauuugcuuccucaugcaaaucgcuauucuugucacgaccguuacacugcacuuuaaacagcaugaguguaacucuccuccaaauaaccaggugauguugugcgaaccgacuaucauagagagaaauaucaccgaaauuguauacuuaacaaacaccacuaucgagaaggaaauuugucccaaacuggcagaguauaggaauuggucaaagccucagugcaacaucacaggguucgccccauuuaguaaagacaauagcauacggcuauccgcgggaggugauauuugggugacccgcgagcccuacgucucuugugacccugauaagugcuaucaauucgcucucggccaggggacgacucugaacaauggacacucgaacgacaccgugcaugaucgaacaccauaccguacucuucugaugaaugaauugggcguucccuuucaccucgguaccagacagguguguaucgccuggucaagcaguuccugccaugacgggaaggcauggcugcacgucugugugacaggagaugacaaaaacgccaccgcuucuuucauuuauaauggcaggcugguagauagcaucggcuccuggucaaagaaaauccuccggacgcaggagagugaaugcguuuguauuaacgggacuugcacaguggucaugaccgacggaagcgcaucugguaaggccgauacuaaaauauuauuuaucgaggagggcaagauugugcacaucuccacacugucagggagcgcucaacauguggaagagugcaguuguuacccucgcuauccaggagucagaugcguuuguagggacaacuggaagggcucuaaucggccgauaguggauauuaacaucaaagacuacuccaucguaagcucguacgugugcucuggucuugucggggacacgccccgcaagaaugauuccuucucaaguagccacuguuuggacccuaacaaugaagagggaggccauggcgugaaagggugggccuuugaugacggaaacgauguuuggaugggucgaaccauuuccgaaaagcugagaucuggcuaugagaccuucaaagugaucgagggguggagcaagccaaauucaaaacuacagauuaacaggcaggucauaguggaacggggaaaucguaguggcuacuccgguaucuuuagcguagaggggaagucuugcauuaaccgcuguuucuauguugaacucaucagaggcaggaaggaggaaacagaggugugguggacuucaaauaguaucgucguguuuugcggaaccagcggcacauacgggacuggauccuggcccgacggugcggauauuaaccugaugccuauauga

SEQ ID NO: 142881 - RNA, 1413 nt, Artificial Sequence
  derived and/or modified CDS sequence (opt3) from neuraminidase__InfluenzaA__ABD60947
augaaccccaaucagaagaucauuaccauaggcagcaucugcauggccauugggaucauuucccugauccuccaaauaggaaacaucauuucuaucugggugucacacaguauucagacagguagccagaaucauacuggcaucuguaaccagagaauaauuacguacgaaaauuccaccugggucaaccaaacauauguuaauaucucuaacacuaaugugguagcugggaaagacaccacaucgaugacccuugcaggaaacucaagccugugcccuauuaggggcugggccaucuacaguaaggauaauuccauccggauugguucuaaaggggacguguucgucauacgcgaaccauuuaucagcuguucccacuuggagugccgaacuuucuuuuuaacacagggagcgcugcuaaacgauaagcauucaaauggcaccauuaaagaccguaguccguauagagcucucaugagcugucccaucggcgaagccccuucuccauacaacuccagguucgagucaguggcauggagcgccagugcuugccacgaugggaugggauggcugacgauagguauuucuggccccgacgauggggcaguugccgugcuuaaguauaauggaaucaucacugaaaccauuaaguccuggcggaaacagauccugcgcacacaggagagcgagugugucugcgugaacggcucguguuuuacuauuaugaccgacgguccuucugaugggccagcuuccuacagaauauucaagaucgaaaaaggaaagauuacaaaaucaaucgaguuggacgcccccaacagucauuaugaagagugcagcuguuacccugauaccggcacgguaaugugcguuugcagggacaauuggcacggcuccaaccggccaugggugucuuuuaaucaaaaccucgauuaccagaucggguauauuuguagcggagucuucggugacaauccgcgccccaaggacggcaaggggucaugcgauccugugaacguggacggagcggauggcgucaaagguuuuaguuaccgauaugggaauggcguuuggauaggaagaacuaaguccaacagcucuaggaaaggcuucgagaugaucugggacccaaauggguggacagauaccgacucaaacuuucuggugaagcaggauguaguggcaaugacugacuggaguggauacagcgguuccuucguccagcaccccgaacugacaggccucgauuguaugcggccuugcuuuuggguggaguuaauucgugggcgcccaagagagaaaaccacgaucuggaccucuggaucgagcauuuccuucuguggcguuaauucagacacagugaacuggaguuggcccgauggugccgagcugccguucacuaucgacaaguga

SEQ ID NO: 142882 - RNA, 1410 nt, Artificial Sequence
  derived and/or modified CDS sequence (opt3) from neuraminidase__InfluenzaA__ABD61263
augaaccccaaucagaagaucauuaccauaggcagcgugucccugacaaucgccacuauuugcuuccucaugcaaaucgcuauucuugucacgaccguuacacugcacuuuaaacagcaugaguguaacucuccuccaaauaaccaggugauguugugcgaaccgacuaucauagagagaaauaucaccgaaauuguauacuuaacaaacaccacuaucgagaaggaaauuugucccaaacuggcagaguauaggaauuggucaaagccucagugcaacaucacaggguucgccccauuuaguaaagacaauagcauacggcuauccgcgggaggugauauuugggugacccgcgagcccuacgucucuugugacccugauaagugcuaucaauucgcucucggccaggggacgacucugaacaauggacacucgaacgacaccgugcaugaucgaacaccauaccguacucuucugaugaaugaauugggcguucccuuucaccucgguaccagacagguguguaucgccuggucaagcaguuccugccaugacgggaaggcauggcugcacgucugugugacaggagaugacaaaaacgccaccgcuucuuucauuuauaauggcaggcugguagauagcaucggcuccuggucaaagaaaauccuccggacgcaggagagugaaugcguuuguauuaacgggacuugcacaguggucaugaccgacggaagcgcaucugguaaggccgauacuaaaauauuauuuaucgaggagggcaagauugugcacaucuccacacugucagggagcgcucaacauguggaagagugcaguuguuacccucgcuauccaggagucagaugcguuuguagggacaacuggaagggcucuaaucggccgauaguggauauuaacguaaaagacuacuccaucgugagcucguacgucugcucuggucuugugggggacacccccaggaagaaugauuccuucucaaguagccacuguuuggacccuaacaaugaagagggaggccauggcaugaaagggugggccuuugaugacggaaacgauguuuggaugggucgaacgaucuccgaaaagcugagaucuggcuaugagaccuucaaagugauugagggguggagcaagccaaauucaaaacuacaggucaaccgccaggugaucguagaacggggaaaucguaguggcuacuccgguauuuuuagcguugaggggaagucuugcauaaaccgcuguuucuauguggaacucaucagaggcaggaaggaggaaacagaggucugguggacuucaaauaguauuguggucuuuugcggaaccagcggcacauacgggacuggauccuggcccgacggugcggauaucaaccugaugccuaucuga

SEQ ID NO: 142883 - RNA, 1410 nt, Artificial Sequence; identical to SEQ ID NO: 142193
  derived and/or modified CDS sequence (opt3) from neuraminidase__InfluenzaA__ABD61274

SEQ ID NO: 142884 - RNA, 1410 nt, Artificial Sequence
  derived and/or modified CDS sequence (opt3) from neuraminidase__InfluenzaA__ABD61285
augaaccccaaucagaagaucauuaccauaggcagcgugucccugacaaucucuacuauuugcuucuuuaugcaaaucgccauucucaucacgaccgucacacuucacuucaaacaguacgaguuuaacucaccuccaaauaaccagguuaugcugugugaaccgacuauaaucgagagaaauauuaccgaaaucguguauuugacaaacaccacuauugagaaggaaaucugccccaaauuagcugaguacaggaauuggaguaagccucagugugacauaacaggguucgcaccauuuagcaaagauaacuccauucggcugucugccggaggugacaucuggguaacccgcgagcccuaugugucgugcgauccugacaaguguuaccaauucgcgcuaggccaggggacgacucucaauaacguccauucaaaugauaccgugcacgaccgaacaccauaucguacucugcuuaugaacgaacugggaguucccuuucauuugggcaccaaacaggugugcauugcuuggagcaguuccucuugucacgaugguaaggccuggcuccaugucugcgugacaggggacgauaagaaugcaaccgccagcuucaucuacaacggaagacugguagacuccaucguuucauggaguaaagagauucugaggacgcaggaaagcgagugugugugcauaaauggcacuuguacagucgugaugaccgauggcaacgcuucugggaaggcagacacuaaaauccucuuuauugaggaaggaaagaucgugcacacauccaccuuaucagguagcgcccaacacgucgaggaaugcaguugcuauccucgguacccaggcguucgcugugugugcagagauaacuggaaggggucuaauaggccgauaguagacauuaacaucaaagacuacuccaucgugagcucguaugucuguucuggacuggugggcgauacgccccggaagaaugacuccucaaguagcucccauugccuugauccuaacaaugaggaaggugggcacggaguuaaaggcugggcuuucgacgauggcaacgacguguggauggggcgcaccauuucugagaaguugcgaagcggauacgagacauuuaaagucaucgaagguuggucaaauccaaacaguaagcugcagauuaauagacaggugauaguagauaggggcaaccgguccggguauagcggaaucuucucuguugagggcaaaucauguauuaaucguugcuuuuacguggaacuaauccgcgguagaaaggaggaaacugagguccucuggaccaguaacagcaucguggucuucugugggacauccggcacuuauggaaccggcucuuggcccgacggggccgauauuaaucugaugccuauauga

SEQ ID NO: 142885 - RNA, 1410 nt, Artificial Sequence; identical to SEQ ID NO: 142639
  derived and/or modified CDS sequence (opt3) from neuraminidase__InfluenzaA__ABD61296

SEQ ID NO: 142886 - RNA, 1410 nt, Artificial Sequence; identical to SEQ ID NO: 142760
  derived and/or modified CDS sequence (opt3) from neuraminidase__InfluenzaA__ABD61307

SEQ ID NO: 142887 - RNA, 1410 nt, Artificial Sequence; identical to SEQ ID NO: 142778
  derived and/or modified CDS sequence (opt3) from neuraminidase__InfluenzaA__ABD61318

SEQ ID NO: 142888 - RNA, 1410 nt, Artificial Sequence; identical to SEQ ID NO: 142109
  derived and/or modified CDS sequence (opt3) from neuraminidase__InfluenzaA__ABD61340

SEQ ID NO: 142889 - RNA, 1410 nt, Artificial Sequence; identical to SEQ ID NO: 142109
  derived and/or modified CDS sequence (opt3) from neuraminidase__InfluenzaA__ABD61351

SEQ ID NO: 142890 - RNA, 1410 nt, Artificial Sequence
  derived and/or modified CDS sequence (opt3) from neuraminidase__InfluenzaA__ABD61362
augaaccccaaucagaagaucauuaccauaggcagcgugucccugacaaucgccacuauuugcuuccucaugcaaaucgcuauucuugucacgaccguuacacugcacuuuaaacaguacgaguguaacucuccuccaaauaaccaggugauguugugcgaaccgacuaucauagagagaaauaucaccgaaauuguauauuuaacaaacaccacuaucgagaaggaagugugucccaaacuggcagaguacaggaauuggucaaagccucagugcaacauuacaggguucgccccauuuaguaaagacaauagcauccggcuauccgcgggaggugauauaugggucacccgcgagcccuaugugucuugugacccugauaagugcuaccaauucgcucucggccaggggacgacucugaacaauggacauucgaacgacaccguucacgaucgaacaccauaucguacucuucugaugaaugaauugggcgugcccuuucaucucgguaccaagcaggucuguauugccuggucaagcaguuccugccacgacgggaaagcauggcugcauguguguguaacaggagaugacgagaacgccaccgcuucuuucaucuacaauggcagacugguugauagcauuggcuccuggucaaagaaaauccucaggacgcaggaaagugagugcguguguaucaacgggacuugcacagucgugaugaccgacggaagcgcaucugguaaggccgauacuaaaauuuuauuuauagaggaaggcaagaucgugcacacauccucacugagcgggagugcucaacacgucgaggaaugcucuuguuauccucgguacccaggaguucgcugcguguguagagacaacuggaagggcuccaauaggccgauuguagauaucaacgugaaagacuacagcauagucucgucuuaugugugcuccggucuuguuggggacacgccccggaagaaugauucaaguagcuccucucauuguuuggacccuaacaaugaggaaggaggccacggcgugaaagggugggccuucgaugacggaaacgaugucuggaugggucgcaccauuagcgagaagcugcgaucaggcuacgagaccuuuaaagugaucgaaggguggaguaagccaaauuccaaacuacagaucaacagacagguaauuguugacaggggaaaucggagcggcuauucugguaucuucucaguggaggggaagaguugcauuaaccguuguuuuuacgucgaacucauacgcggcagaaagcaggagacagaagugcuguggacuagcaauuccaucgucguguucugcggaaccucuggcacauaugggacuggaucguggcccgauggugcggacauugaucuuaugccuaucuga

SEQ ID NO: 142891 - RNA, 1410 nt, Artificial Sequence; identical to SEQ ID NO: 142841
  derived and/or modified CDS sequence (opt3) from neuraminidase__InfluenzaA__ABD61373

SEQ ID NO: 142892 - RNA, 1410 nt, Artificial Sequence
  derived and/or modified CDS sequence (opt3) from neuraminidase__InfluenzaA__ABD61384
augaaccccaaucagaagaucauuaccauaggcagcgugucccugacaaucgccacuauuugcuuccucaugcaaaucgcuauucuugucacgaccguuacacugcacuuuaaacaguacgaguguaacucuccuccaaauaaccaggugauguugugcgaaccgacuaucauagagagaaauaucaccgaaauuguauauuuaacaaacaccacuaucgagaaggaaauuugucccaaacuggcagaguacaggaauuggucaaagccucagugcaacaucacaggguucgccccauuuaguaaagacaauagcauacggcuauccgcgggaggugauauuugggugacccgcgagcccuaugucucuugugacccugauaagugcuaccaauucgcucucggccaggggacgacucugaacaauggacauucgaacgacaccgugcacgaucgaacaccauaucguacucuucugaugaaugaauugggcguucccuuucaucucgguaccaaacagguguguaucgccuggucaagcaguuccugccacgacgggaaggcauggcugcaugucugugugacaggagaugacgagaacgccaccgcuucuuucauuuacaauggcagacugguagauagcaucggcuccuggucaaagaaaauccucaggacgcaggaaagugagugcguuuguauuaacgggacuugcacaguggucaugaccgacggaagcgcaucugguaaggccgauacuaaaauauuauuuaucgaggaaggcaagauugugcacacauccucacugagcgggagugcucaacacguggaggaaugcucuuguuauccucgguacccaggaguccgcugcguuuguagagacaacuggaagggcuccaauaggccgaucguggauauaaacauuaaagacuacagcaucguaucgucuuaugugugcuccggucuugucggggacacgccccggaagaaugauucaaguagcuccucucauuguuuggacccuaacaaugaggaaggaggccacggcgugaaagggugggccuucgaugacggaaacgauguuuggaugggucgcaccaucagcgagaagcugcgaucaggcuacgagaccuuuaaagugauugaaggguggaguaagccaaauuccaaacuacagaucaacagacaggucauuguggacaggggaaaucggagcggcuauucugguauauucucaguagagaguaagagcugcaucaaccguuguuuuuacguugaacucauucgcgggagaaagcaggagacagaagugcuguggacuuccaauucuaucgucguguucugcggcaccucgggaacauauggcacugggagcuggcccgauggagcggacaucaaccuuaugccuauuuga

SEQ ID NO: 142893 - RNA, 1410 nt, Artificial Sequence; identical to SEQ ID NO: 142778
  derived and/or modified CDS sequence (opt3) from neuraminidase__InfluenzaA__ABD61395

SEQ ID NO: 142894 - RNA, 1410 nt, Artificial Sequence; identical to SEQ ID NO: 142875
  derived and/or modified CDS sequence (opt3) from neuraminidase__InfluenzaA__ABD61406

SEQ ID NO: 142895 - RNA, 1413 nt, Artificial Sequence; identical to SEQ ID NO: 142876
  derived and/or modified CDS sequence (opt3) from neuraminidase__InfluenzaA__ABD61521

SEQ ID NO: 142896 - RNA, 1410 nt, Artificial Sequence
  derived and/or modified CDS sequence (opt3) from neuraminidase__InfluenzaA__ABD61532
augaaccccaaucagaagaucauuaccauaggcagcgugucccugacaaucgccacuauuugcuuccucaugcaaaucgcuauucuugucacgaccguuacacugcacuuuaaacaguacgaguguucuucaccuccaaacaaucaggugaugccgugcgaacccaucauaaucgagagaaacauuacugaaaucguauauuugaccaauacaaccauugagaaggaaaucuguccuaaauuaguggaguacaggaacuggaguaagccacagugcaaaauaacuggguucgcacccuuuagcaaggacaauuccauucggcugucugccggaggugauaucugggucacacgcgagccuuaugugucgugugacccaggcaagugcuaccaauucgcgcuagggcagggaaccacgcucaacaauaaacauucaaacgauacuauucacgaccgaacccccuaucguacacugcuuaugaaugaacugggcguuccuuuucauuuggguacuaaacagguguguaucgcuuggagcaguuccucuugccacgaugggaaggccuggcuccaugucugugugaccggacacgacaagaacgcaacagccagcuucaucuacgauggcagacugguagacuccauuggcucauggaguaaaaauauacugaggacccaggagagcgaaugcguuuguaucaacgggacgugcacuguggucaugacagauggaucugcuuccgagcgggcagacaccaagauucucuuuaucgaggaagguaagauagugcacauuucaccauuaagcggcagugcccaacauguggaggaaugcucuuguuauccgcgcuaccccggggucagaugcguuuguagggauaauuggaaaggauccaaccggccuaucguggacaucaacguaaaggauuacagcauugugucgucuuaugucugcuccggccuggugggugacacuccacgcaaaaaugaccgaucaaguagcuccuacuguagaaaccccaauaacgagaaggggaaucacggaguuaaaggcugggcuuucgaugacggcaacgauguguggauggggaggacaaucggagaggaacuucggucugguuaugagaccuuuaaggucauuggcggguggagcacgccuaauucaaaauugcagauaaaccgucaggugaucguagacagugaaaaucgcuccggauacagcggcauuuucucuguugaggguaagucaugcaucaacagauguuuuuauguggaacugaucagggggcgggagcaggaaacccgagucugguggacaaguaauagcauuguggucuucugcggcacuuccggaaccuacggcacagggucuuggccagauggagccgacauaucgcuaaugcccaucuga

SEQ ID NO: 142897 - RNA, 1413 nt, Artificial Sequence
  derived and/or modified CDS sequence (opt3) from neuraminidase__InfluenzaA__ABD61543
augaaccccaaucagaagaucauuaccauaggcagcaucuccauugccaucgggauuaucucucugaugcuccaaauaggaaacaucauuucaaucugggcuagucacagcauucagacagguucccagaaucauacuggcaucugcaaccagagaauaauuacguacgaaaauucuaccugggugaaccacacauaugucaauaucaacaauacuaacguuguggcagggaaagacaagaccucgguaacacuugccggaaauucaagccuguguaguauuuccggcugggcgaucuacaccaaagauaacucuaucaggauugguagcaagggggacguguucgucauacgggagccuuuuaucuccugcucacauuuggagugucgcacuuucuuuuuaacacaaggagcucugcuaaaugauaaacacaguaacggcaccgugaaggaccgaagcccauaucgugcccucaugucuugcccgcugggcgaagcacccuccccuuacaauucaaaguucgagagcguugccuggagugcuucugcaugucaugaugggaugggauggcuuacgauugguaucuccggcccagacaacggggccguggcuguccugaaauauaacggaauaauuacugaaaccaucaagagcuggaaaaagagaaucuugaggacacaggagucggagugcguguguguaaauggcucuugcuuuacuauuaugaccgauggucccuccaacggggccgcgucauacaaaaucuucaagauugaaaagggaaaaguuacaaagaguauagagcucaaugcaccuaacuuucacuaugaagaguguagcugcuacccagacaccggcacggugaugugugucugccgggauaauuggcacggcuccaaccgccccugggugucuuucaaucagaaccuggacuaccagaucggguauauuugcagcggaguguuuggugauaauccuagaccaaaagacggcgaggggucauguaacccggucacuguugauggagccgacggcgugaaggguuucaguuacaaauaugggaauggcguauggaucggaaggacaaaguccaaccggcugcgcaaaggcuuugaaaugaucugggaccccaauggguggaccgauacugacagcaacuucucugugaagcaagaugucguggcuauuacagacuggucaggauacagugguaauuuuguucagcauccugagcucaccggcuuagauugcauacgaccauguuucuggguggaacuggucagagggcuucccagggagaacacgaccaucuggacaagcggauccucuauuucguucugcggcgugaacagcgacacugccaauugguccuggccugauggugcagaauugccauuuaccaucgacaaguga

SEQ ID NO: 142898 - RNA, 1413 nt, Artificial Sequence; identical to SEQ ID NO: 142876
  derived and/or modified CDS sequence (opt3) from neuraminidase__InfluenzaA__ABD63066

SEQ ID NO: 142899 - RNA, 1410 nt, Artificial Sequence; identical to SEQ ID NO: 142301
  derived and/or modified CDS sequence (opt3) from neuraminidase__InfluenzaA__ABD77601

SEQ ID NO: 142900 - RNA, 1410 nt, Artificial Sequence
  derived and/or modified CDS sequence (opt3) from neuraminidase__InfluenzaA__ABD77612
augaaccccaaucagaagaucauuaccauaggcagcgugucccugacaaucgccacuauuugcuuccucaugcaaaucgcuauucuugucacgaccguuacacugcacuuuaaacaguacgaguguaacucuccuccaaauaaccaggugauguugugcgaaccgacuaucauagagagaaauaucaccgaaauuguauauuuaacaaacaccacuaucgagaaggaaaugugucccaaacuggcagaguacaggaauuggcuaaagccucagugcaacauuacaggguucgccccauuuucaaaagacaauaguauccggcucagcgcgggaggugauauaugggugacccgcgagcccuaugucuccugugacccugauaagugcuaccaauucgcucugggccaggggacgacucuuaacaauggacauucuaacgacaccgugcacgaucgaacaccauaucguacucuguugaugaaugaacucggcguucccuuucaucuggguaccaaacagguguguauugccuggucgucaagcaguugccacgacgggaaggcauggcugcaugucugugugacaggagaugacgagaacgccaccgcuuccaucauuuacaauggcagacucguagauucuaucggcagcugguccaagaaaaucuuaaggacgcaggaaucagagugcguuuguauuaacgggacuugcacaguggucaugaccgacggaagugcaagcgguaaggccgauacuaaaauacuguucaucaaggagggcaagauugugcacacaucuucccuuucagggagcgcucaacacguggaagagugcaguuguuauccucgguacccaggaguccgcugcguuuguagagacaacuggaaaggcucuaauaggccgaucguggauauaaacguaaaggacuacuccauugugagcucguaugucugcucugguuuggugggggacacgccccggaaaaaugauuccucaaguagcucccauugucuggacccuaacaaugaagagggaggccacggcguuaaggggugggccuuugaugacggaaacgauguguggaugggucgcaccaucucugaaaaacuacgaagcggcuacgagaccuucaaggucaucgagggguggucaaaagcgaauaguaagcuccagauuaacagacaggugaucguagacaggggaaaucgguccggcuauagcgguauauuuucuguugaaucaaagaguugcauuaaccguuguuucuacguggagcugauccgcgggagaaaacaggaaacagagguccuuuggacuagcaauuccauuguggucuuuugcggcaccucuggaacauauggcacugggucguggccagauggagcagacaucaaccugaugcccaucuga

SEQ ID NO: 142901 - RNA, 1410 nt, Artificial Sequence
  derived and/or modified CDS sequence (opt3) from neuraminidase__InfluenzaA__ABD77634
augaaccccaaucagaagaucauuaccauaggcagcgugucccugacaaucgccacuauuugcuuccucaugcaaaucgcuauucuugucacgaccguuacacugcacuuuaaacaguacgaguguaacucuccuccaaauaaccaggugauguugugcgaaccgacuaucauagagagaaauaucaccgaaauuguauauuuaacaaacaccacuaucgagaaggaaaugugucccaaacuggcagaguacaggaauuggucaaagccucagugcaacauuacaggguucgccccauuuaguaaagacaauagcauccggcuauccgcgggaggugauauaugggugacccgcgagcccuaugucucuugugacccugauaagugcuaccaauucgcucucggccaggggacgacucugaacaauggacauucgaacgacaccgugcacgaucgaacaccauaucguacucuucugaugaaugaauugggcguucccuuucaucucgguaccaaacagguguguauugccuggucaagcaguuccugccacgacgggaaggcauggcugcaugucugugugacaggagaugacgagaacgccaccgcuucuaucauuuacaauggcagacugguagauagcaucggcuccuggucaaagaaaauccucaggacgcaggaaagugagugcguuuguauuaacgggacuugcacaguggucaugaccgacggaagcgcaucugguaaggccgauacuaaaauauuauucaucaaggagggcaagauugugcacacauccucacugagcgggagugcucaacacguggaagagugcucuuguuauccucgguacccaggaguccgcugcguuuguagagacaacuggaaaggcuccaauaggccgaucguggauauaaacguaaaggacuacagcauugugucgucuuaugucugcuccggucuugugggggacacgccccggaaaaaugauucaaguagcuccucucauuguuuggacccuaacaaugaagagggaggccacggcguuaaggggugggccuuugaugacggaaacgauguguggaugggucgcaccaucagcgaaaaacugcgaucaggcuacgagaccuucaaggucaucgagggguggaguaaagcaaauuccaagcuacagauuaacagacaggugaucguagacaggggaaaucggagcggcuauucugguauauuuucaguugaaaguaagagcugcauuaaccguuguuucuacguggagcucauccgcgggagaaaacaggaaacagagguccuguggacuuccaauucuauuguggucuuuugcggcaccucgggaacauauggcacugggagcuggccagauggagcggacaucaaccuuaugcccaucuga

SEQ ID NO: 142902 - RNA, 1410 nt, Artificial Sequence; identical to SEQ ID NO: 142901
  derived and/or modified CDS sequence (opt3) from neuraminidase__InfluenzaA__ABD77645

SEQ ID NO: 142903 - RNA, 1410 nt, Artificial Sequence; identical to SEQ ID NO: 142901
  derived and/or modified CDS sequence (opt3) from neuraminidase__InfluenzaA__ABD77656

SEQ ID NO: 142904 - RNA, 1410 nt, Artificial Sequence; identical to SEQ ID NO: 142174
  derived and/or modified CDS sequence (opt3) from neuraminidase__InfluenzaA__ABD77700

SEQ ID NO: 142905 - RNA, 1413 nt, Artificial Sequence; identical to SEQ ID NO: 142876
  derived and/or modified CDS sequence (opt3) from neuraminidase__InfluenzaA__ABD77722

SEQ ID NO: 142906 - RNA, 1413 nt, Artificial Sequence; identical to SEQ ID NO: 142876
  derived and/or modified CDS sequence (opt3) from neuraminidase__InfluenzaA__ABD77733

SEQ ID NO: 142907 - RNA, 1410 nt, Artificial Sequence
  derived and/or modified CDS sequence (opt3) from neuraminidase__InfluenzaA__ABD77744
augaaccccaaucagaagaucauuaccauaggcagcgugucccugacaaucgccacuauuugcuuccucaugcaaaucgucauucuuguuacgaccgugacacugcacuuuaaacaguacgaguguaacucuccuccaaauaaccagguaauguugugcgaaccgacuaucauagagagaaauaucaccgaaauuguguauuuaacaaacaccacuaucgagaaggaaauuugucccaaacuggcugaguacaggaauuggucaaagccucagugcaacaucacaggguucgcaccauuuaguaaagacaauagcauacggcuauccgccggaggugauauuugggucacccgcgagcccuaugugucuugugacccugauaagugcuaccaauucgcgcucggccaggggacgacucugaacaauggacauucgaacgacaccguucacgaucgaacaccauaucguacucuucugaugaaugaauugggcgugcccuuucaucucgguaccaagcaggucuguaucgcuuggucaagcaguuccugccacgacgggaaagccuggcugcauguguguguaacaggagaugacgagaacgcaaccgccucuuucauuuacaauggcagacugguugauagcaucggcuccuggucaaagaaaauccucaggacgcaggaaagugagugcguguguauuaacgggacuugcacagucgugaugaccgacggaagcgcuucugguaaggcagauacuaaaauauuauuuaucgaggaaggcaagauugugcacacaucccugcuuucagggagcgcccaacacgucgaggaaugcaguuguuauccucgguacccaggaguucgcugcguguguagagacaacuggaagggcucuaauaggccgaucguagauauaaacgugaaagacuacuccauugucagcucguaugugugcucugguuugguuggggacacuccccggaagaaugauuccucaaguagcucccauugucuggacccuaacaaugaggaaggaggccacggcgugaaagggugggcuuucgaugacggaaacgaugucuggaugggucgcacgaucucugagaagcuacgaagcggcuacgagaccuuuaaagugaucgaaggguggucaaagccaaauaguaaacuccagauuaacagacagguaaucguugacaggggaaaucgguccggcuauagcgguauuuucucuguggaggggaagucaugcauaaaccguuguuuuuacgucgaacugauccgcggcagaaagcaggagacagaagugcuuuggaccaguaauagcauugucguguucugcggaaccuccggcacauaugggacuggaucuuggcccgauggugccgacaucaaccugaugccuaucuga

SEQ ID NO: 142908 - RNA, 1410 nt, Artificial Sequence; identical to SEQ ID NO: 142901
  derived and/or modified CDS sequence (opt3) from neuraminidase__InfluenzaA__ABD77755

SEQ ID NO: 142909 - RNA, 1410 nt, Artificial Sequence; identical to SEQ ID NO: 142901
  derived and/or modified CDS sequence (opt3) from neuraminidase__InfluenzaA__ABD77766

SEQ ID NO: 142910 - RNA, 1410 nt, Artificial Sequence
  derived and/or modified CDS sequence (opt3) from neuraminidase__InfluenzaA__ABD77777
augaaccccaaucagaagaucauuaccauaggcagcgugucccugacaaucgccacuauuugcuuccucaugcaaaucgucauucuuguuacgaccgugacacugcacuuuaaacaguacgaguguaacucuccuccaaauaaccagguaaugccgugcgaacccacuaucauagagagaaauaucaccgaaauuguguauuugacaaacaccacuaucgagaaggaaauuuguccuaaauuagcugaguacaggaauuggucaaagccacagugcaacaucacaggguucgcacccuuuaguaaagacaauagcauacggcuguccgccggaggugauauuugggucacccgcgagccuuaugugucuugugacccagauaagugcuaccaauucgcgcuaggccaggggacgacucucaacaauggacauucgaacgacaccguucacgaucgaacacccuaucguacucugcuuaugaaugaacugggcgugccuuuucauuuggguaccaagcaggucuguaucgcuuggucaagcaguuccugccacgacgggaaagccuggcuccauguguguguaacaggagaugacgagaacgcaaccgccucuuucauuuacaauggcagacugguugauagcaucggcuccuggucaaagaaaauccugaggacgcaggaaagugagugcguguguauuaacgggacuugcacagucgugaugaccgacggaagcgcuucugguaaggcagauacuaaaauacucuuuaucgaggaaggcaagauugugcacacauccuuacugucagggagcgcccaacacgucgaggaaugcaguuguuauccacgguacccgggaguucgcugcguguguagagacaacuggaagggcucuaauaggcccaucguagauauaaacgugaaagacuacuccauugucagcucguaugugugcucuggucuuguuggggacaccccucggaagaaugauuccucaaguagcucccauuguuuggacccaaacaaugaggaaggaggccacggcgugaaagggugggcuuucgaugacggaaacgaugucuggaugggucgcacgaucucugagaagcugcgaagcggcuacgagaccuuuaaagugaucgaaggguggucaaagcccaauaguaaacuacagauuaacagacagguaaucguugacaggggaaaucgguccggcuauagcgguauuuucucuguggaggggaagucaugcauaaaccguuguuuuuacgucgaacucauccgcggcagaaagcaggagacagaagugcuguggaccaguaauagcauugucguguucugcggaacuuccggcacauaugggacuggaucuuggccugauggugccgacaucaaccuuaugccaaucuga

SEQ ID NO: 142911 - RNA, 1410 nt, Artificial Sequence; identical to SEQ ID NO: 142910
  derived and/or modified CDS sequence (opt3) from neuraminidase__InfluenzaA__ABD77788

SEQ ID NO: 142912 - RNA, 1362 nt, Artificial Sequence
  derived and/or modified CDS sequence (opt3) from neuraminidase__InfluenzaA__ABD77799
augaaccccaaucagaagaucauuaccauaggcagcaucugcaugguggucgggauuaucucccugauucuccaaaucggaaacauaaucucuauuuggaucucacacaguauucagacagguaaucagaaccauacuggcaucuguaaucaggggauaauuacguacaacguuguggccggacaagacagcaccuccguaauccuuacaggcaauucuucgcugugcccuauuagagguugggcuauccacucaaaagauaacgggaucaggauuggaagcaagggcgacguguucgucauacgggagccauuuaucaguuguucccauuuggaaugccgcacuuucuuuuuaacccagggcgcacugcuaaaugauaaacacucuaacgggacagugaaggaccgaagcccguaucgugcccucauguccugucccguuggagaggcgccuucaccauacaauaguagauucgaaagcguggcuuggucugccuccgcaugccaugaugguaugggcuggcugaccauugggaucucaggacccgacaacggcgccgucgcugugcuuaaauauaaugguauaauuacugagacaaucaagagcuggaggaagaaaauccugcggacccaggaaagugaguguacgugcguaaacgggucuuguuuuacuauuaugaccgauggaccuuccaauggcuuggcaagcuacaagaucuucaaaauugagaagggcaaaguuacaaagucgauagaacucaacgccccaaacucucacuaugaggaaugcuccuguuaccccgacacugggaaggugaugugcgucugccgcgauaauuggcacggaucaaacagaccuugggugaguuuugaccagaaucuggauuaucaaaucgguuacauuuguagcggcguguucggggacaacccaaggccgaaagauggaaccggcuccugcggucccgucucugcugacggggccaauggcguuaagggauuuagcuaccgguauggcaacgggguguggaucggacgcacaaaaucagacaguucccgacaugguuucgagaugaucugggauccuaauggcuggaccgagacggacagcagauuuucuguaaggcaggauguggucgcgaugacugaccggucaggguacaguggcagcuucgugcagcacccagaacugacaggacucgauuguaugcgucccugcuuuuggguugaguuaauucgcgguagaccugaagaggaaaccauauggacuuccgggucuaucauuucguucuguggcgugaacagcgacacagucgauugguccuggccagacggagcagagcugcccuucaccaucgauaaguga

SEQ ID NO: 142913 - RNA, 1410 nt, Artificial Sequence
  derived and/or modified CDS sequence (opt3) from neuraminidase__InfluenzaA__ABD77810
augaaccccaaucagaagaucauuaccauaggcagcaucugcaugguggucgggauuaucucccugauucuccaaaucggaaacauaguuucuaucuggauuucacacaguauccagacagguaaucagaaccauacuggcacguguaaucagagcauuaucaccuacaaaaacuccacaugggugaaucaaacuuauguaaacauaucuaauaccaacguggucgccgggaaggacacaaccucggugauucuugcuggaaauucaagccugugcccuaucagaggcugggcaauuuacaguaaagauaacgguguuaggaucggguccaagggagacguguucgucauccgggagccauuuauuucuuguagccacuuggaaugccgcacuuucuuuuuaacacagggcgcccugcuaaaugauaaacauuccaacggcaccgugaaggaccgaucaccguaucgugcgcucaugaguugucccguaggggaggcuccuagcccauacaauucuagauucgaauccguugccuggucagcaagcgccugccacgauggaauggguuggcugacgauaggcaucagugggcccgacgauggagcuguggcaguccuuaaguauaacggcauuaucacugagaccauaaaaucuuggaggaaggaaauucugcggacacaggaguccgagugugugugcgugaacgguagcuguuuuacuaucaugaccgacgggccuucgggaggcccagccucuuacaaaaucuucaagauugaaaaaggcaaggucacaaaguccaucgaguuggaugcucccaauucacauuaugaagagugcaguuguuacccugacaccagcaaaguuaugugcgugugccgcgauaacuggcacggguccaauagaccauggguaucuuuugaccagaaccucgauuaccaaaugggauauauuuguagcgguguguucggcgacaauccgaggcccaaggacgggaaaggaucaugcggcccugucuacguggauggugccaacgggguuaagggcuuuaguuaucgguacggaaauggcguguggauagggcgcacgaaauccaacagcucucgacagggauucgagaugaucugggacccaaaugguuggacugaaacagauucaaacuuuuucaccaagcaggacgucguggcgguaacugauuggaguggcuauagcggguccuuuguucagcaccccgagcugacaggacuggacuguaugagaccuugcuucuggguggaacucauuaggggccggccaaaagagaauaccaucuggacgucugguucgagcaucuccuucuguggggucaacucagauaccguggacuggaguuggcccgauggcgcagaauuaccguuuacaauugacaaguga

SEQ ID NO: 142914 - RNA, 1410 nt, Artificial Sequence
  derived and/or modified CDS sequence (opt3) from neuraminidase__InfluenzaA__ABD77832
augaaccccaaucagaagaucauuaccauaggcagcgugucccugacaaucgccacuauuugcuuccucaugcaaaucgcuauucuugucacgaccguuacacugcacuuuaaacaguacgaguguaacucuccuccaaauaaccaggugauguugugcgaaccgacuaucauagagagaaauaucaccgaaauuguauauuuaacaaacaccacuaucgagaaggaaauuugucccaaacuggcagaguacaggaauuggucaaagccucagugcaaaaucacaggguucgccccauuuaguaaggacaacagcauacggcuauccgcgggaggugauauuugggugacccgcgagcccuaugucucuugugacccugauaagugcuaccaauucgcucucggccaggggacgacucugaauaaccgacauucgaaugacaccgugcacgaucguacaccauauagaacucuucugaugaacgaauugggaguucccuuucaucucggcaccaaacagguguguaucgccuggucaagcaguuccugccacgacgguaaggcauggcugcaugucugugugacagggcacgaugagaaugccaccgcuucuuucauuuacggaggcaggcugguagacagcaucggcuccuggaguaaaaagauccuccggacgcaggaaucagagugcguuuguauuaacgggacuugcacaguggucaugaccgauggaagcgcaucuggucgcgccgacacuaaaauauuauuuaucgaggaaggcaagauugugcacaucuccccucugucagggagcgcucaacauguggaggaaugcaguuguuauccaagauacucuggagucaggugcguuugucgggauaauuggaagggcuccaaccgcccgauaguggacauuaacguaaaagauuacagcaucgugucgucuuaugucugcuccggucuugugggggacacaccccgaaagaaugacucaaguagcuccucucacuguuugaacccuaauaacgaggaaggaggccauggcguuaaagggugggccuucgaugacggaaaugauguguggauggguagaaccaucagcgagaaguuuaggucaggcuacgagacguucaaagucauugggggauggaguaagccaaacuccaaacugcagaucaaucgucaggugauuguagaccggggcaaccgcagcgguuauucugggauauuuucaguugaaggcaagaguugcaucaauagauguuucuacguggagcuaauuaggggacggaagcaggaaaccgaggucugguggacaagcaacuccaucguggucuuuugcggcacuucugggaccuauggaacagguucguggcccgauggcgcggacaucaaucucaugccuauuuga

SEQ ID NO: 142915 - RNA, 1410 nt, Artificial Sequence
  derived and/or modified CDS sequence (opt3) from neuraminidase__InfluenzaA__ABD77876
augaaccccaaucagaagaucauuaccauaggcagcgugucccugacaaucgccacuauuugcuuccucaugcaaaucgcuauucuugucacgaccguuacacugcacuuuaaacaguacgaguguaacucuccuccaaauaaccaggugauguugugcgaaccgacuaucauagagagaaauaucaccgaaauuguauauuuaacaaacaccacuaucgagaaggaaauuugucccaaacuggcagaguacaggaauuggucaaagccucagugcaaaaucacaggguucgccccauuuaguaaggacaacagcauacggcuauccgcgggaggugauauuugggugacccgcgagcccuaugucucuugugacccugauaagugcuaccaauucgcucucggccaggggacgacucugaauaaccgacauucgaaugacaccgugcacgaucguacaccauauagaacucuucugaugaacgaauugggaguucccuuucaucucggcaccaaacagguguguaucgccuggucaagcaguuccugccacgacgguaaggcauggcugcaugucugugugacagggcacgaugagaaugccaccgcuucuuucauuuacgacggaaggcugguagauagcaucggcuccuggaguaaaaagauccuccggacgcaggaaucagagugcguuuguauuaacggcacuugcacaguggucaugaccgacgggagcgcaucuggacgcgccgauacuaaaauauuauuuaucgaggaagguaagauugugcacaucuccccucugucaggcagcgcucaacauguggaggaaugcaguuguuauccaagauacucuggggucaggugcguuugucgggacaauuggaagggauccaaccgcccgauaguggauauuaacguaaaagacuacagcaucgugucgucuuaugucugcuccggccuugugggugacacaccccgaaagaaugauucaaguagcuccucucacuguuugaacccuaauaacgaggaagggggacauggcguuaaaggcugggccuucgacgaugggaaugacguguggaugggaagaaccaucagcgagaagcugaggucagguuacgagacguuuaaagucauugaaggcuggaguaagccaaacuccaaacuacagaucaaucgucaggugauuguagaucgggggaaccgcagcggauauucuggcauauucucaguugaggguaagaguugcaucaauagauguuuuuacguggaacucauuagggggcggaagcaggagaccgaagucugguggacaagcaacuccaucguggucuucugcggcacuucuggaaccuauggcacagggucguggcccgacggagcggauaucaaucugaugccuauuuga

SEQ ID NO: 142916 - RNA, 1410 nt, Artificial Sequence; identical to SEQ ID NO: 142174
  derived and/or modified CDS sequence (opt3) from neuraminidase__InfluenzaA__ABD77887

SEQ ID NO: 142917 - RNA, 1410 nt, Artificial Sequence
  derived and/or modified CDS sequence (opt3) from neuraminidase__InfluenzaA__ABD77898
augaaccccaaucagaagaucauuaccauaggcagcgugucccugacaaucgccacuauuugcuuccucaugcaaaucgcuauucuugucacgaccguuacacugcacuuuaaacaguacgaguguaacucuccuccaaauaaccaggugauguugugcgaaccgacuaucauagagagaaauaucaccgaaauuguauauuuaacaaacaccacuaucgagaaggaaauuugucccaaacuggcagaguacaggaauuggucaaagccucagugcaaaaucacaggguucgccccauuuaguaaggacaacagcauacggcuauccgcgggaggugauauuugggugacccgcgagcccuaugucucuugugacccugauaagugcuaccaauucgcucucggccaggggacgacucugaauaaccgacauucgaaugacaccgugcacgaucguacaccauauagaacucuucugaugaacgaauugggaguucccuuucaucucggcaccaaacagguguguaucgccuggucaagcaguuccugccacgacgguaaggcauggcugcaugucugugugacagggcacgaugagaaugccaccgcuucuuucauuuacgacggaaggcugguagauagcaucggcuccuggaguaaaaagauccuccggacgcaggaaucagagugcguuuguauuaacggcacuugcacaguggucaugaccgacgggagcgcaucuggacgcgccgauacuaaaauauuauuuaucgaggaagguaagauuauccacauauccccucugucaggcagcgcucaacauguggaggaaugcaguuguuauccaagauacccgggggugaggugcgucugucgggacaauuggaagggaucuaaccgccccauuguugauaucaacgugaaagacuacuccaucguaagcucguaugugugcucuggccuugucggugacacaccucgaaagaaugauuccucaaguagcucccacuguuugaacccaaauaacgaggaagggggacauggcgugaaaggcugggccuucgacgaugggucugacguuuggaugggaagaaccauuagcgagaagcugaggucagguuacgagacguuuaaagugaucgaaggcuggaguaagcccaauuccaaacuacagauuaaccggcaggucauaguggaucgugggaaucgcagcggauauucuggcaucuucucaguagaggguaagaguugcauuaacagauguuuuuacguugaacucaucagggggcggaagcaggagaccgaagugugguggacaagcaauuccaucgucguguucugcggcacuucuggaaccuauggcacagggucguggccugacggagcggauauuaaccugaugccaauauga

SEQ ID NO: 142918 - RNA, 1410 nt, Artificial Sequence
  derived and/or modified CDS sequence (opt3) from neuraminidase__InfluenzaA__ABD77909
augaaccccaaucagaagaucauuaccauaggcagcgugucccugacaaucgccacuauuugcuuccucaugcaaaucgcuauucuugucacgaccguuacacugcacuuuaaacaguacgaguguaacucuccuccaaauaaccaggugauguugugcgaaccgacuaucauagagagaaauaucaccgaaauuguauauuuaacaaacaccacuaucgagaaggaaauuugucccaaacuggcagaguacaggaauuggucaaagccucagugcaaaaucacaggguucgccccauuuaguaaggacaacagcauacggcuauccgcgggaggugauauuugggugacccgcgagcccuaugucucuugugacccugauaagugcuaccaauucgcucucggccaggggacgacucugaauaaccgacauucgaaugacaccgugcacgaucguacaccauauagaacucuucugaugaacgaauugggaguucccuuucaucucggcaccaaacagguguguaucgccuggucaagcaguuccugccacgacgguaaggcauggcugcaugucugugugacagggcacgaugagaaugccaccgcuucuuucauuuacgacggaaggcugguagauagcaucggcuccuggaguaaaaagauccuccggacgcaggaaucagagugcguuuguauuaacggcacuugcacaguggucaugaccgacgggagcgcaucuggacgcgccgauacuaaaauauuauuuaucgaggaagguaagauugugcacaucuccccucugucaggcagcgcucaacauguggaggaaugcaguuguuauccaagauacccgggggucaggugcguuugucgggacaauuggaagggaucuaaccgccccauaguggauauuaacguaaaagacuacuccaucgugagcucguaugucugcucuggccuugugggugacacaccucgaaagaaugauuccucaaguagcucccacuguuugaacccaaauaacgaggaagggggacauggcguuaaaggcugggccuucgacgaugggaaugacguguggaugggaagaaccaucucugagaagcugaggagcgguuacgagacguuuaaagucauugaaggcuggucaaagcccaacaguaaacuacagaucaaucgucaggugauuguagaucgggggaacuccagcggauauucuggcauauucucaguugaggguaagaguugcaucaaucgcuguuuuuacguggaacucauuagagggaggaagcaggagaccgaagucugguggacaagcaacuccaucguggucuucugcggcacuucuggaaccuauggcacagggucguggccugacggagcggauaucaaucugaugccaauuuga

SEQ ID NO: 142919 - RNA, 1413 nt, Artificial Sequence; identical to SEQ ID NO: 142876
  derived and/or modified CDS sequence (opt3) from neuraminidase__InfluenzaA__ABD77920

SEQ ID NO: 142920 - RNA, 1413 nt, Artificial Sequence; identical to SEQ ID NO: 142876
  derived and/or modified CDS sequence (opt3) from neuraminidase__InfluenzaA__ABD77931

SEQ ID NO: 142921 - RNA, 1413 nt, Artificial Sequence; identical to SEQ ID NO: 142876
  derived and/or modified CDS sequence (opt3) from neuraminidase__InfluenzaA__ABD77942

SEQ ID NO: 142922 - RNA, 1413 nt, Artificial Sequence
  derived and/or modified CDS sequence (opt3) from neuraminidase__InfluenzaA__ABD77953
augaaccccaaucagaagaucauuaccauaggcagcaucuccauugccaucgggauuaucucucugaugcuccaaauaggaaacaucauuucaaucugggcuagucacagcauucagacagguucccagaaucauacuggcaucugcaaccagagaauaauuacguacgaaaauucuaccugggugaaccacacauaugucaauaucaacaauacuaacguuguggcagggaaagacaagaccucgguaacacuugccggaaauucaagccuguguaguauuuccggcugggcgaucuacaccaaagauaacucuaucaggauugguagcaagggggacguguucgucauacgggagccuuuuaucuccugcucacauuuggagugucgcacuuucuuuuuaacacaaggagcucugcuaaaugauaaacacaguaacggcaccgugaaggaccgaagcccauaucgugcccucaugucuugcccgcugggcgaagcacccuccccuuacaauucaaaguucgagagcguugccuggagugcuucugcaugucaugaugggaugggauggcuuacgauugguaucuccggcccagacaacggggccguggcuguccugaaauauaacggaauaauuacugaaaccaucaagagcuggaaaaagagaaucuugaggacacaggagucggagugcguguguguaaauggcucuugcuuuacuauuaugaccgauggucccuccaacggggccgcgucauacaaaaucuucaagauugaaaagggaaaaguuacaaagaguauagagcucaaugcaccuaacuuucacuaugaagaguguagcugcuacccagacaccggcacggugaugugugucugccgggauaauuggcacggcuccaaccgccccugggugucuuucaaucagaaccuggacuaccagaucggguauauuugcagcggaguguuuggugauaauccuagaccaaaagacggcgaggggucauguaacccggucacuguugauggagccgacggcgugaaggguuucaguuacaaauaugggaauggcguauggaucggaaggacaaaguccaaccggcugcgcaaaggcuuugaaaugaucugggaccccaauggguggaccgauacugacagcaacuucucugugaagcaagaugucguggcuauuacagacuggucaggauacagugguagcuuuguucagcauccugagcucaccggcuuagauugcauacgaccauguuuccugguggaacuugucagaggguugcccagggagaauacgaccaucuggacauccggaucuucgauuagcuucugcggcgugaacuccgacacugccaacuggucauggccugauggugcagaacugccauuuaccaucgacaaguga

SEQ ID NO: 142923 - RNA, 1413 nt, Artificial Sequence
  derived and/or modified CDS sequence (opt3) from neuraminidase__InfluenzaA__ABD77964
augaaccccaaucagaagaucauuaccauaggcagcaucuccauugccaucgggauuaucucucugaugcuccaaauaggaaacaucauuucaaucugggcuagucacagcauucagacaagaucccagaaucauacugguaucugcaaccagaggauaauuacguacgaaaauucuaccugggugaaccacacauaugucaauaucaacaauacuaacguuguggcaggcaaagacaagaccucgguaacacuugccggaaauucaagccuguguaguauuuccggaugggcgaucuacaccaaagauaacucuauccggauuggcagcaagggugacguguucgucauacgcgagccuuuuaucuccugcucacauuuggagugucgaacuuucuuuuuaacacaaggggcucugcuaaaugauaaacacaguaacggaaccgugaaggaccguagcccauauagagcccucaugucuugcccgcugggcgaagcacccuccccuuacaauucaaaguucgagagcguugccuggagugcuucugcaugucaugauggcaugggguggcuuacgauuggaaucuccgguccagacaacggcgccguggcuguccugaaauauaacgggauaauuacugaaaccaucaagagcuggaaaaagaggaucuugcggacacaggagucggagugcguguguguaaauggaucuugcuuuacuauuaugaccgauggccccuccaacggugccgcgucauacaaaaucuucaagauugaaaaggggaaaguuacaaagaguauagagcucaaugcaccuaacuuucacuaugaagaguguagcugcuacccagacaccggaacggugaugugugucugccgcgauaauuggcacggcuccaacagacccugggugucuuucaaucagaaccuggacuaccagaucggcuauauuugcagcgggguguuuggagauaauccuaggccaaaagacggugagggcucauguaacccggucacuguugauggggccgacggagugaagggcuucaguuacaaauaugguaaugggguauggaucggccggacaaaguccaaccgccugcgaaaaggauuugaaaugaucugggaccccaauggcuggaccgauacugacagcaacuucucugugaagcaagaugucguggcuauuacagacuggucaggguacagugggagcuuuguucagcauccugagcucaccgguuuagauugcauaagaccauguuucuggguggaacuggucaggggccuuccccgggagaauacgaccaucuggacauccgggucuucgauuagcuucugcggagugaacuccgacacugccaacuggucauggccugauggcgcagaauugccauuuaccaucgacaaguga

SEQ ID NO: 142924 - RNA, 1413 nt, Artificial Sequence; identical to SEQ ID NO: 142876
  derived and/or modified CDS sequence (opt3) from neuraminidase__InfluenzaA__ABD77975

SEQ ID NO: 142925 - RNA, 1413 nt, Artificial Sequence; identical to SEQ ID NO: 142876
  derived and/or modified CDS sequence (opt3) from neuraminidase__InfluenzaA__ABD77986

SEQ ID NO: 142926 - RNA, 1413 nt, Artificial Sequence
  derived and/or modified CDS sequence (opt3) from neuraminidase__InfluenzaA__ABD77997
augaaccccaaucagaagaucauuaccauaggcagcaucuccauugccaucgggauucugucucucaugcuucaaaucggaaacauaaucucaauuugggcuagucacagcauccagacagguucccagaaucauacuggcauuugcaaccagagaaucauaacguacgagaauagcaccugggugaaccacacauaugucaauauuaacaauacuaacguuguggcagggaaagacaagaccucgguaacacuggccggaaauucaucuuuguguaguaucuccggcugggcgauuuacaccaaagauaacucuaucaggaucgguagcaagggggacguguucgucauucgggaaccuuuuauauccugcucacauuuagagugucgcacuuucuuucugacacaaggagcucuacucaaugauaaacacaguaacggcaccgugaaggaccgaagcccauaucgugcccugaugucuugcccgcuuggcgaagcacccuccccuuacaauucaaaguucgagagcguugccuggagugcuucugcaugucaugaugggaugggauggcugacgaucgguauuuccggcccagacaacggggccguggcugucuugaaauauaacggaaucauaacugaaaccauuaagagcuggaaaaagagaauccucaggacacaggagucggagugcguguguguaaauggcucuugcuuuacuaucaugaccgauggucccuccaacggggccgcgucauacaaaauuuucaagaucgaaaagggaaaaguuacaaagaguauugagcugaaugcaccuaacuuucacuaugaagaguguagcugcuacccagacaccggcacggugaugugugucugccgggauaauuggcacggcuccaaccgccccugggugucuuucaaucagaaccuggacuaccagauaggguauaucugcagcggaguguuuggugauaauccuagaccaaaagacggcgaggggucauguaacccggucacuguugauggagccgacggcgugaaggguuucaguuacaaauaugggaauggcguauggauuggaaggacaaaguccaaccggcuccgcaaaggcuuugaaaugaucugggaccccaauggguggaccgauacugacaacaauuucagcgugaagcaagaugucguggcuaucacagacuggucuggauacucagguaguuuuguucagcauccugaguuaaccggccuggauugcauucgaccauguuucuggguggaacuugucagaggguugcccagggagaacacgaccauauggacaagcggauccucuaucucguucugcggcgugaacagcgacacugccaauugguccuggccugauggugcagaacugccauuuaccauugacaaguga

SEQ ID NO: 142927 - RNA, 1413 nt, Artificial Sequence; identical to SEQ ID NO: 142876
  derived and/or modified CDS sequence (opt3) from neuraminidase__InfluenzaA__ABD78008

SEQ ID NO: 142928 - RNA, 1413 nt, Artificial Sequence; identical to SEQ ID NO: 142876
  derived and/or modified CDS sequence (opt3) from neuraminidase__InfluenzaA__ABD78019

SEQ ID NO: 142929 - RNA, 1413 nt, Artificial Sequence
  derived and/or modified CDS sequence (opt3) from neuraminidase__InfluenzaA__ABD78030
augaaccccaaucagaagaucauuaccauaggcagcaucuccauugccaucgggauuaucucucugaugcuccaaauaggaaacaucauuucaaucugggcuagucacagcauucagacagguucccagaaucauacuggcaucugcaaccagagaauaauuacguacgaaaauucuaccugggugaaccacacauaugucaauaucaacaauacuaacguuguggcagggaaagacaagaccucgguaacacuugccggaaauucaagccuguguaguauuuccggcugggcgaucuacaccaaagauaacucuaucaggauugguagcaagggggacguguucgucauacgggagccuuuuaucuccugcucacauuuggagugucgcacuuucuuuuuaacacaaggagcucugcuaaaugauaaacacaguaaccgaaccgugaaggaccguagcccauauagagcccucaugucuugcccgcugggcgaagcacccuccccuuacaauucaaaguucgagagcguugccuggagugcuucugcaugucaugauggcaugggguggcuuacgauuggaaucuccgguccagacaacggcgccguggcuguccugaaauauaacgggauaauuacugaaaccaucaagagcuggaaaaagaggaucuugcggacacaggagucggagugcguguguguaaauggaucuugcuuuacuauuaugaccgauggccccaacaauggugccgcguccuacaaaaucuucaagauugaaaaggggaaaguuacaaagucaauagagcucaacgcaccuaauuuucacuaugaagaguguaguugcuacccagacaccggaacggugaugugugucugccgcgauaacuggcacggcagcaauagacccuggguguccuucaaccagaaucuggacuaccagaucggcuauauuugcucugggguguuuggagauaacccuaggccaaaagacggugagggcagcuguaauccggucacuguugauggggccgacggagugaagggcuucucauacaaauaugguaacgggguauggaucggccggacaaagaguaaucgccugcgaaaaggauuugaaaugaucugggaccccaacggcuggaccgauacugacuccaauuucagcgugaagcaagaugucguggcuauuacagacuggucuggguacucaggaaguuuuguucagcauccugagcucaccgguuuagauugcauaagaccauguuucuggguggaacuggucaggggccuuccccgggagaacacgaccaucuggacaagcggguccucuauuucguucugcggagugaacagcgacacugccaauugguccuggccugauggcgcagaauugccauuuaccaucgacaaguga

SEQ ID NO: 142930 - RNA, 1413 nt, Artificial Sequence
  derived and/or modified CDS sequence (opt3) from neuraminidase__InfluenzaA__ABD78041
augaaccccaaucagaagaucauuaccauaggcagcaucuccauugccaucgggauuaucucucugaugcuccaaauaggaaacaucauuucaaucugggcuagucacagcauucagacagguucccagaaucauacuggcaucugcaaccagagaauaauuacguacgaaaauucuaccugggugaaccacacauaugucaauaucaacaauacuaacguuguggcagggaaagacaagaccucgguaacacuugccggaaauucaagccuguguaguauuuccggcugggcgaucuacaccaaagauaacucuaucaggauugguagcaagggggacguguucgucauacgggagccuuuuaucuccugcucacauuuggagugucgcacuuucuuuuuaacacaaggagcucugcuaaaugauaaacacaguaacggcaccgugaaggaccgaagcccauaucgugcccucaugucuugcccgcugggcgaagcacccuccccuuacaauucaaaguucgagagcguugccuggagugcuucugcaugucaugaugggaugggauggcuuacgauugguaucuccggcccagacaacggggccguggcuguccugaaauauaacggaauaauuacugaaaccaucaagagcuggaaaaagagaaucuugaggacacaggagucggagugcguguguguaaauggcucuugcuuuacuauuaugaccgauggucccuccaacggggccgcgucauacaaaaucuucaagauugaaaagggaaaaguuacaaagaguauagagcucaaugcaccuaacuuucacuaugaagaguguagcugcuacccagacaccuccacggugaugugugucugccgggauaauuggcacggcucuaaccgccccugggugagcuucaaucagaaccuggacuaccagaucggcuauauuugcucagggguguuuggagauaauccuagaccaaaagacggugagggcaguuguaacccggucacuguugauggggccgacggagugaagggcuucuccuacaaauaugguaaugggguauggaucggcaggacaaagagcaaccggcugcgcaaaggauuugaaaugaucugggaccccaauggcuggaccgauacugacucuaacuucucagugaagcaagaugucguggcuauuacagacuggaguggguacagcggauccuuuguucagcauccugagcucaccgguuuagauugcauacgaccauguuucuggguggaacuggucagaggccuucccagggagaauacgaccaucuggacaucugggucgagcauuuccuucugcggagugaacucagacacugccaacuggaguuggccugauggcgcagaauugccauuuaccaucgacaaguga

SEQ ID NO: 142931 - RNA, 1410 nt, Artificial Sequence; identical to SEQ ID NO: 142910
  derived and/or modified CDS sequence (opt3) from neuraminidase__InfluenzaA__ABD78052

SEQ ID NO: 142932 - RNA, 1413 nt, Artificial Sequence; identical to SEQ ID NO: 142444
  derived and/or modified CDS sequence (opt3) from neuraminidase__InfluenzaA__ABD78063

SEQ ID NO: 142933 - RNA, 1413 nt, Artificial Sequence; identical to SEQ ID NO: 142444
  derived and/or modified CDS sequence (opt3) from neuraminidase__InfluenzaA__ABD78074

SEQ ID NO: 142934 - RNA, 1413 nt, Artificial Sequence; identical to SEQ ID NO: 142444
  derived and/or modified CDS sequence (opt3) from neuraminidase__InfluenzaA__ABD78085

SEQ ID NO: 142935 - RNA, 1413 nt, Artificial Sequence; identical to SEQ ID NO: 142444
  derived and/or modified CDS sequence (opt3) from neuraminidase__InfluenzaA__ABD78096

SEQ ID NO: 142936 - RNA, 1410 nt, Artificial Sequence
  derived and/or modified CDS sequence (opt3) from neuraminidase__InfluenzaA__ABD78118
augaaccccaaucagaagaucauuaccauaggcagcgugucccugacaaucgccacuauuugcuuccucaugcaaaucgcuauucuugucacgaccguuacacugcacuuuaaacaguacgaguguaacucuccuccaaauaaccaggugauguugugcgaaccgacuaucauagagagaaauaucaccgaaauuguauauuuaacaaacaccacuaucgagaaggaaaugugucccaaacuggcagaguacaggaauuggucaaagccucagugcaaaauuacaggguucgccccauuuaguaaggacaacagcauccggcuauccgcgggaggugauauaugggugacccgcgagcccuaugucucuugugacccugauaagugcuaccaauucgcucucggccaggggacgacucugaauaaccgacauucgaaugacaccgugcacgaucguacaccauauagaacucuucugaugaacgaauugggaguucccuuucaucucggcaccaaacagguguguauugccuggucaagcaguuccugccacgacgguaaggcauggcugcaugucugugugacagggcacgaugagaaugccaccgcuucuuucaucuacgacggaaggcugguagauagcauuggcuccuggaguaaaaagauccuccggacgcaggaaucagagugcguuuguaucaacggcacuugcacaguggucaugaccgacgggagcgcaucuggacgcgccgauacuaaaauuuuauuuauagaggaagguaagaucgugcacauuuccccucugucaggcagcgcucaacauguggaggaaugcaguuguuauccaagauacucuggggucaggugcguuugucgggacaauuggaagggauccaaccgcccgaucguggauauaaacguaaaagacuacagcauugugucgucuuaugucugcuccggccuugugggugacacaccccgaaagaaugauucaaguagcuccucucacuguuugaacccuaauaacgaggaagggggacauggcguuaaaggcugggccuucgacgaugggaaugacguguggaugggaagaaccaucagcgagaaguuuaggucagguuacgagacguucaaagucaucggcggguggaguaagccaaacuccaaacugcagauuaaucgucaggugaucguagaucggggaaaccgcagcggcuauucugguauauuuucaguugaagggaagaguugcauuaauagauguuucuacguggagcuaaucaggggccggaagcaggaaaccgaggucugguggacaagcaacuccauuguggucuuuugcggaacuucuggcaccuaugggacaggaucguggcccgacggugcggauaucaaucucaugccuaucuga

SEQ ID NO: 142937 - RNA, 1410 nt, Artificial Sequence; identical to SEQ ID NO: 142936
  derived and/or modified CDS sequence (opt3) from neuraminidase__InfluenzaA__ABD78129

SEQ ID NO: 142938 - RNA, 1410 nt, Artificial Sequence; identical to SEQ ID NO: 142166
  derived and/or modified CDS sequence (opt3) from neuraminidase__InfluenzaA__ABD79035

SEQ ID NO: 142939 - RNA, 1353 nt, Artificial Sequence
  derived and/or modified CDS sequence (opt3) from neuraminidase__InfluenzaA__ABD79115
augaaccccaaucagaagaucauuaccauaggcagcaucugcaugguggucgggauuaucucccugauuuuccaaaucggaaacauaguuucuaucuggauuucacacaguaucacagguacuuguaauagaagcauuuacgugaacaucuccaauacgaacguaguggccggcaaagacaccacaucugucauacucgcugggaauaguucacuuugcccuauuaggggaugggcaaucuauagcaaggauaacggcgugcggauugguaguaaaggggacguuuuugugauccgcgagccauucaucuccuguucucaucuggaaugccgaaccuuuuucuugacucagggagccuuacugaaugauaagcacagcaacggcacagucaaagaccguuccccguacagaacccuaaugucaugucccgugggcgaggcgccuaguccauauaauagcagguuugaaucuguagcuugguccgccucagcaugccaugaugggaugggauggcucacuauugguauaagcggccccgacgauggggccguugcugugcugaaguacaacggaaucauuacaggcaccaucaagaguuggcggaaagagauacuucgcacgcaggaaucugagugugucugcgugaaugguuccuguuucacuauuaugaccgacgggccuagcggaggcccagcaucguauaagaucuuuaaaaucgagaagggcaaagugacaaagucuauugaacuggaugcccccaacucccacuacgaggaaugcucauguuauccugacacuucgaaggucaugugcguuugcagagauaauuggcaugggagcaacaggccauggguguccuucgaccagaacuuggauuaccaaaugggauacaucuguucugguguauuuggcgacaauccgcggcccaaagacgggaagggaagcugcggcccuguguaugucgauggugcuaacggggugaaaggcuucucauaccgcuauggaaauggcguuuggauugggcgaaccaagaguuccagcucuagacagggauuugagaugauaugggacccaaacgguuggacagagaccgauucaaauuucuuuaugaaacaggacguggucgccgugacggauuggaguggcuacagcggguccuucguacagcaccccgaacucacuggacuggacuguaugaggccuugcuucuggguugagcugauccggggccguccaaaggaaaacacaauuuggaccucugguucgagcaucuccuuuuguggggucaauucagauacuguggacuggaguuggcccgauggcgcggagcucccguucacaaucgacaaauga

SEQ ID NO: 142940 - RNA, 1410 nt, Artificial Sequence
  derived and/or modified CDS sequence (opt3) from neuraminidase__InfluenzaA__ABD79126
augaaccccaaucagaagaucauuaccauaggcagcgugucccugacaaucacuacgauuugcuuccucaugcaaaucgccauucuugucaucaccguuacacugcacuuuaaacagugugagugcaacucuccuccaaauaaccaggugauguugugugaaccgacuauaaucgagagaaauauuaccgaaaucguauacuuaacaaacaccacuauugagaaggaaaucugccccaaacuggcugaguauaggaauuggucaaagccucaguguaaaauaacaggguucgcaccauuuaguaaggacaacagcauucggcuauccgccggaggugauaucugggugacccgcgagcccuacgucucuugcgacccuggcaaguguuaucaauucgcgcucgggcagggaacgacucugaauaaccgacauucgaaugauaccgugcacgaccguacaccauacagaacucuucugaugaacgaauugggcguucccuuucaucucgguaccaaacaggugugcauugcuuggucaagcaguuccugucacgaugggaaggccuggcugcaugucugcgugacaggacacaaugagaacgcaaccgccucuuucaucuaugacggcaggcugguagauagcaucggcuccuggaguaaaaauauucuccggacgcaggaaucagaguguguuugcauaaacgggacuugcacaguggucaugaccgacggaagcgcuucuggucgcgcagauacuaagaucuuauuuauugaggaaggcaaaaucgugcacauauccccucugucagggagcgcccaacauguggaggaauguaguugcuacccaagauauccgggagucagguguguuugccgggacaacuggaagggcucuaaucgccccauuguggauaucaacguaaaggacuacuccaucgugagcucguacgucuguucuggucuugugggggauacaccucggaaaaaugacuccucaaguagcuccuauugcuuggacccaaacaaugaggaaggaggccacggcguuaaggggugggcuuucgaugacggaaacgauguguggauggguagaaccauuucugagaaacugaggagcggcuacgagacguuuaaggucaucgggggauggucaaaacccaauaguaagcuacagauuaaccgacaggugauaguagacaaaggcaaucguuccgguuauagcgggaucuucucuguugaaggcaagucauguauuaaccgcugcuuuuacguggagcucaucagaggaaggaagcaggaaaccgaggucugguggacaaguaauagcaucguggucuucuguggcacuuccgggaccuauggaacagguucuuggccugauggcgccgacauuaaccugaugccaauauga

SEQ ID NO: 142941 - RNA, 1410 nt, Artificial Sequence; identical to SEQ ID NO: 142940
  derived and/or modified CDS sequence (opt3) from neuraminidase__InfluenzaA__ABD79137

SEQ ID NO: 142942 - RNA, 1410 nt, Artificial Sequence; identical to SEQ ID NO: 142940
  derived and/or modified CDS sequence (opt3) from neuraminidase__InfluenzaA__ABD79148

SEQ ID NO: 142943 - RNA, 1410 nt, Artificial Sequence; identical to SEQ ID NO: 142940
  derived and/or modified CDS sequence (opt3) from neuraminidase__InfluenzaA__ABD79159

SEQ ID NO: 142944 - RNA, 1410 nt, Artificial Sequence
  derived and/or modified CDS sequence (opt3) from neuraminidase__InfluenzaA__ABD79170
augaaccccaaucagaagaucauuaccauaggcagcgugucccugacaaucacuacgauuugcuuccucaugcaaaucgccauucuugucaucaccguuacacugcacuuuaaacagugugagugcaacucuccuccaaauaaccaggugauguugugugaaccgacuauaaucgagagaaauauuaccgaaaucguauacuuaacaaacaccacuauugagaaggaaaucugccccaaacuggcugaguauaggaauuggucaaagccucaguguaaaauaacaggguucgcaccauuuaguaaggacaacagcauucggcuauccgccggaggugauaucugggugacccgcgagcccuacgucucuugcgacccuggcaaguguuaucaauucgcgcucgggcagggaacgacucugaauaaccgacauucgaauaacaccgugcacgaucguacaccauacagaacucuucugaugaaugaauugggcguucccuuucaucucgguaccaaacaggugugcauugcuuggucaagcaguuccugucacgacgggaaggccuggcugcaugucugcgugacaggacacaacgagaaugcaaccgccucuuucaucuaugauggcaggcugguagacagcaucggcuccuggaguaaaaacauucuccggacgcaggaaucagaguguguuugcauaaacgggacuugcacaguggucaugaccgauggaagcgcuucuggucgcgcagacacuaagaucuuauuuauuaaagagggcaagaucgugcacguguccccucugucagggagcgcccaacaugucgaagaguguaguugcuacccaagauauccgggaguuaggugugugugccgggauaauuggaagggcucuaaccgccccauaguagacauuaaugugaaagauuacuccaucgucagcucguacguguguucuggucuuguuggggacacaccucgaaagaacgauuccucaaguagcuccuauugcuuggacccaaauaacgaagagggaggccacggcgugaaagggugggcuuucgacgauggaaaugacgucuggauggguagaaccaucucugaaaagcugaggagcggcuacgagacguuuaaagugauugggggauggucaaagcccaacaguaaacuacagaucaaucggcagguaauuguugauaagggcaaccguuccgguuauagcgggauauucucuguggagggcaagucauguaucaaucgcugcuuuuacgucgaacucauuagaggaaggaaacaggagaccgaagugugguggacaaguaacagcaucgucguguucuguggcacuuccgggaccuauggaacagguucuuggccugacggcgccgauaucaaucugaugccaauuuga

SEQ ID NO: 142945 - RNA, 1410 nt, Artificial Sequence; identical to SEQ ID NO: 142940
  derived and/or modified CDS sequence (opt3) from neuraminidase__InfluenzaA__ABD79181

SEQ ID NO: 142946 - RNA, 1410 nt, Artificial Sequence; identical to SEQ ID NO: 142940
  derived and/or modified CDS sequence (opt3) from neuraminidase__InfluenzaA__ABD79192

SEQ ID NO: 142947 - RNA, 1410 nt, Artificial Sequence
  derived and/or modified CDS sequence (opt3) from neuraminidase__InfluenzaA__ABD79203
augaaccccaaucagaagaucauuaccauaggcagcgugucccugacaaucacuacgauuugcuuccucaugcaaaucgccauucuugucaucaccguuacacugcacuuuaaacagugugagugcaacucuccuccaaauaaccaggugauguugugugaaccgacuauaaucgagagaaauauuaccgaaaucguauacuuaacaaacaccacuauugagaaggaaaaaugccccaagcuggcugaguauaggaauuggucaaaaccucaguguaagaucacaggguucgcaccauuuaguaaggacaacagcauacggcuauccgccggaggugauauuugggugacccgcgagcccuacgucucuugcgacccuggcaaauguuaucaauucgcgcucgggcagggaacgacucugaauaaccgacauucgaaugauaccgugcacgaccguacaccauacagaacucuucugaugaacgaauugggcguucccuuucaucucgguaccaaacaggugugcaucgcuuggucaagcaguuccugucacgaugggaaggccuggcugcaugucugcgugacaggacacaaugagaacgcaaccgccucuuucauuuaugacggcaggcugguagauagcaucggcuccuggucaaagaauauccuccggacgcaggaaagugaguguguuugcauuaacgggacuugcacaguggucaugaccgacggaagcgcuucuggucgcgcagauacuaaaauauuauuuaucgaggaaggcaagauugugcacaucuccccucugucagggagcgcccaacauguggaggaauguaguugcuacccaagauauccgggagucagguguguuugccgggacaacuggaagggcucuaaucgccccauaguggauauuaacaugaaagacuacuccaucguaagcucguacguguguucuggucuugucggggauacaccucgaaagaaugacuccucaaguagcuccuauugcuuggacccaaacaaugaggaaggaggccacggcgugaaagggugggcuuucgaugacggaaacgauguuuggauggguagaaccaucucugagaagcugaggagcggcuacgagacguuuaaagugauugggggauggucaaagcccaauaguaaacuacagaucaaccggcaggucauuguggacaagggcaaucguuccgguuauagcgggauauucucuguagaaggcaagucauguaucaaccgcugcuuuuacguugagcucauuagaggaaggaaacaggaaaccgaggugugguggacaaguaauagcaucgucguguucuguggcacuuccgggaccuauggaacagguucuuggccugauggcgccgacaucaaccugaugccaauuuga

SEQ ID NO: 142948 - RNA, 1410 nt, Artificial Sequence; identical to SEQ ID NO: 142940
  derived and/or modified CDS sequence (opt3) from neuraminidase__InfluenzaA__ABD79214

SEQ ID NO: 142949 - RNA, 1410 nt, Artificial Sequence
  derived and/or modified CDS sequence (opt3) from neuraminidase__InfluenzaA__ABD79236
augaaccccaaucagaagaucauuaccauaggcagcgugucccugacaaucacuacgauuugcuuccucaugcaaaucgccauucuugucaucaccguuacacugcacuuuaaacagugugagugcaacucuccuccaaauaaccaggugauguugugugaaccgacuauaaucgagagaaauauuaccgaaaucguauacuuaacaaacaccacuauugagaaggaaaucugccccaaacuggcugaguauaggaauuggucaaagccucaguguaaaauaacaggguucgcaccauuuaguaaggacaacagcauucggcuauccgccggaggugauaucugggugacccgcgagcccuacgucucuugcgacccuggcaaguguuaucaauucgcgcucgggcagggaacgacucugaauaaccgacauucgaauaacaccgcucacgaucguacaccauacagaacucuucugaugaaugaauugggcgugcccuuucaucucgguaccaaacagguuugcauugccuggucaagcaguuccugucacgacgggaaggcauggcugcaugugugcgucacaggacacaacgagaaugccaccgcuucuuucaucuaugauggcaggcugguggacagcaucggcuccuggaguaaaaacauucuccggacgcaggaaucagaguguguaugcauaaacgggacuugcacaguugugaugaccgauggaagcgcaucuggucgcgccgacacuaagaucuuauuuauuaaagagggcaagaucguccacauauccccucugucagggagcgcucaacauguggaagaguguaguugcuacccaagauauccgggagugaggugugucugccgggauaauuggaagggcucuaaccgccccauuguugacaucaaugugaaagauuacuccaucguaagcucguacguguguucuggucuugucggggacacaccucgaaagaacgauuccucaaguagcuccuauugcuuggacccaaauaacgaagagggaggccacggcgugaaagggugggccuucgacgauggaaaugacguuuggauggguagaaccauuucugaaaagcugaggagcggcuacgagacguuuaaagugaucgggggauggucaaagcccaacaguaaacuacagauuaaucggcaggucauaguggauaagggcaaccguuccgguuauagcgggaucuucucuguagagggcaagucauguauuaaucgcugcuuuuacguugaacucaucagaggaaggaaacaggagaccgaagugugguggacaaguaacagcaucgucguguucuguggcacuuccgggaccuauggaacagguucuuggccugacggcgcggauauuaaucugaugccaauauga

SEQ ID NO: 142950 - RNA, 1410 nt, Artificial Sequence
  derived and/or modified CDS sequence (opt3) from neuraminidase__InfluenzaA__ABD79247
augaaccccaaucagaagaucauuaccauaggcagcgugucccugacaaucacuacgauuugcuuccucaugcaaaucgccauucuugucaucaccguuacacugcacuuuaaacagugugagugcaacccuccaccgaauaaccaggugauguugugugaacccacuauaaucgagagaaauauuaccgaaaucguauacuuaacaaacaccacuauugagaaggaaaucugcccuaaacuggcugaguauaggaauuggucuaagccacaguguaaaauaacaggguucgcacccuuuucaaaggacaacaguauucggcuaagcgccggaggugauaucugggugacccgcgagccuuacgucuccugcgacccaggcaaguguuaucaauucgcgcucgggcagggaacgacucugaauaaccgacauucuaaugauaccgugcacgaccguacacccuacagaacucuucugaugaacgaauugggcguuccuuuucaucucgguaccaaacaggugugcauugcuuggucgucaagcaguugucacgaugggaaggccuggcugcaugucugcgugacaggacacaaugagaacgcaaccgccuccuucaucuaugacggcaggcugguagauucuaucggcagcugguccaaaaauauucuccggacgcaggaaucagaguguguuugcauaaacgggacuugcacaguggucaugaccgacggaagugcuagcggucgcgcagauacuaagaucuuauuuauugaggaaggcaaaaucgugcacauaucuccacuguccgggucagcccaacauguggaggaauguagcugcuacccgagauaucccggagucagguguguuugccgggacaacuggaagggcaguaaucgcccuauuguggauaucaacguaaaggacuacucuaucguguccagcuacgucuguucgggucuugugggggauacaccacggaaaaaugacucuuccucaaguagcuauugcuuggaccccaacaaugaggaaggaggccacggcguuaaggggugggcuuucgaugacggaaacgauguguggauggguagaaccauuuccgagaaacugaggucuggcuacgagacguuuaaggucaugggaggguggagcaaaccuaauucaaagcuacagaucaaccgacaggugauuguagaccguggcaaucgcagugguuauuccgggauauucagcguugaaggcaaaucuuguaucaacagaugcuuuuacguggagcucauuaggggacggaagcaggaaaccgaggucugguggacaucaaauaguaucguggucuucuguggcacuagcgggaccuauggaacagguuccuggccagauggcgccgacaucaaccugaugcccauuuga

SEQ ID NO: 142951 - RNA, 1410 nt, Artificial Sequence; identical to SEQ ID NO: 142375
  derived and/or modified CDS sequence (opt3) from neuraminidase__InfluenzaA__ABD94737

SEQ ID NO: 142952 - RNA, 1410 nt, Artificial Sequence; identical to SEQ ID NO: 142760
  derived and/or modified CDS sequence (opt3) from neuraminidase__InfluenzaA__ABD94748

SEQ ID NO: 142953 - RNA, 1413 nt, Artificial Sequence; identical to SEQ ID NO: 142876
  derived and/or modified CDS sequence (opt3) from neuraminidase__InfluenzaA__ABD94759

SEQ ID NO: 142954 - RNA, 1410 nt, Artificial Sequence; identical to SEQ ID NO: 142109
  derived and/or modified CDS sequence (opt3) from neuraminidase__InfluenzaA__ABD94770

SEQ ID NO: 142955 - RNA, 1413 nt, Artificial Sequence; identical to SEQ ID NO: 142444
  derived and/or modified CDS sequence (opt3) from neuraminidase__InfluenzaA__ABD94792

SEQ ID NO: 142956 - RNA, 1413 nt, Artificial Sequence; identical to SEQ ID NO: 142444
  derived and/or modified CDS sequence (opt3) from neuraminidase__InfluenzaA__ABD94803

SEQ ID NO: 142957 - RNA, 1413 nt, Artificial Sequence; identical to SEQ ID NO: 142444
  derived and/or modified CDS sequence (opt3) from neuraminidase__InfluenzaA__ABD94814

SEQ ID NO: 142958 - RNA, 1410 nt, Artificial Sequence; identical to SEQ ID NO: 142621
  derived and/or modified CDS sequence (opt3) from neuraminidase__InfluenzaA__ABD94825

SEQ ID NO: 142959 - RNA, 1410 nt, Artificial Sequence
  derived and/or modified CDS sequence (opt3) from neuraminidase__InfluenzaA__ABD94847
augaaccccaaucagaagaucauuaccauaggcagcgugucccugacaaucgccacuauuugcuuccucaugcaaaucgcuauucuugucacgaccguuacacugcacuuuaaacaguacgaguguaacucuccuccaaauaaccaggugauguugugcgaaccgaagaucauagagagaaauaucacugaaauuguauauuuaaccaacacaaccaucgagaaagaaauuugucccaagcuggcagaguacaggaauuggucaaaaccucagugcaagaucacuggguucgccccauuuaguaaggacaacagcauacggcuauccgcgggaggugauauuugggugacacgcgagcccuaugucucuugugacccugauaaaugcuaccaauucgcucucggccaggggaccacgcugaauaaccgacauucgaaugacacugugcacgaucguaccccauauagaacacuucugaugaacgaauugggaguucccuuucaucucggcacuaaacagguguguaucgccuggucaagcaguuccugccacgacgguaaagcauggcugcaugucugugugaccgggcacgaugagaaugccacagcuucuuucauuuacgacggaaggcugguagauagcaucggcuccuggucaaagaaaauccuccggacccaggaaagugagugcguuuguauuaacggcacgugcacuguggucaugacagacgggagcgcaucuggacgcgccgugaccaagauauuauuuaucgaggaagguaagauugugcacaucuccccucugcuuggcucagcucaacaugucgaggaaugcagcuguuauccaagauacccggggguuaggugcgugugucgggauaauuggaaaggaaguaaccgccccauaguagacauuaacgugaaggauuacucuaucgucuccagcuaugugugcucgggcuugguuggugacacuccucgaaagaaugacucuuccucaaguagccacugucugaacccaaauaacgaggaagggggacauggcgugaagggcugggccuucgaugacgggaaugaugucuggaugggaagaacaaucuccgagaaacuaaggucugguuacgagaccuuuaaggugauugaaggcuggagcaaacccaacucaaagcuccagaucaaucggcagguaauuguugaccgugggaaccgcaguggauauuccggcauauucagcguggaggguaagucuugcaucaauagauguuuuuacgucgaacugauuagggggcggaaacaggagacggaagugugguggaccucaaacaguaucgucguguucugcggcacaagcggaacuuauggcaccggguccuggccugauggagcggacaucaaucuuaugccaauuuga

SEQ ID NO: 142960 - RNA, 1410 nt, Artificial Sequence; identical to SEQ ID NO: 142174
  derived and/or modified CDS sequence (opt3) from neuraminidase__InfluenzaA__ABD94858

SEQ ID NO: 142961 - RNA, 1410 nt, Artificial Sequence; identical to SEQ ID NO: 142174
  derived and/or modified CDS sequence (opt3) from neuraminidase__InfluenzaA__ABD94880

SEQ ID NO: 142962 - RNA, 1410 nt, Artificial Sequence
  derived and/or modified CDS sequence (opt3) from neuraminidase__InfluenzaA__ABD94891
augaaccccaaucagaagaucauuaccauaggcagcgugucccugacaaucacuacgauuugcuuccucaugcaaaucgccauucuugucaucaccguuacacugcacuuuaaacagugugagugcaacucuccuccaaauaaccaggugauguugugugaaccgacuauaaucgagagaaauauuaccgaaaucguauacuuaacaaacaccacuauugagaaggaaaucugccccaaacuggcugaguauaggaauuggucaaagccucaguguaaaauaacaggguucgcaccauuuaguaaggacaacagcauucggcuauccgccggaggugauaucugggugacccgcgagcccuacgucucuugcgacccuggcaaguguuaucaauucgcgcucgggcagggaacgacucugaauaaccgacauucgaaugauaccgugcacgaccguacaccauacagaacucuucugaugaacgaauugggcguucccuuucaucucgguaccaaacaggugugcauugcuuggucaagcaguuccugucacgaugggaaggccuggcugcaugucugcgugacaggacacaaugagaacgcaaccgccucuuucaucuaugacggcaggcugguagauagcaucggcuccuggaguaaaaauauucuccggacgcaggaaucagaguguguuugcauaaacgggacuugcacaguggucaugaccgacggaagcgcuucuggucgcgcagauacuaagguguuauuuaucgaggaaggcaaaauugugcacaucucccaacugucagggagcgcccagcaugucgaggaauguaguugcuacccuagauauccaggaguuaggugugugugccgggacaacuggaagggcucuaaucgcccgauaguagauauuaacgugaaggacuacuccaucgucagcucguacguguguucuggucuuguuggggauacaccccgaaagaaugacuccucaaguagcuccuauugcuuggacccuaacaaugaggaaggaggccacggcgugaaagggugggcuuucgaugacggaaacgaugucuggauggguagaaccaucucugagaaacugaggagcggcuacgagacguuuaaggugauugggggauggucaaaaccaaauaguaagcuacagaucaaccggcagguaauuguugaccguggcaaucgcuccgguuauagcgggauauucucuguggaaggcaaaucauguaucaacagaugcuuuuacgucgagcucauuaggggacggaagcaagaaaccgaggugugguggacaaguaauagcaucgucguguucuguggcacuuccgggaccuauggaacagguucuuggcccgauggcgccgacaucaaccugaugccuauuuga

SEQ ID NO: 142963 - RNA, 1410 nt, Artificial Sequence; identical to SEQ ID NO: 142940
  derived and/or modified CDS sequence (opt3) from neuraminidase__InfluenzaA__ABD94902

SEQ ID NO: 142964 - RNA, 1410 nt, Artificial Sequence
  derived and/or modified CDS sequence (opt3) from neuraminidase__InfluenzaA__ABD94924
augaaccccaaucagaagaucauuaccauaggcagcgugucccugacaaucgccacuauuugccuccuuaugcaaaucgcuauucuggucacgaccguuacauugcacuucaaacaguacgaguguaacucuccuccaaauaaccaggugauguuaugcgaaccgacuaucauagagagaaauaucaccgaaauuguauaucugacaaacaccacuaucgagaaggaaauuugucccaaacuagcagaguacaggaauuggucaaagccucagugcaaaaucacaggguuugccccauucaguaaggacaacagcauacggcucuccgcgggaggugauauuugggugacccgcgagcccuaugucucuugugacccugauaagugcuaccaauuugcucugggccaggggacgacucuuaauaaccgacauucgaaugacaccgugcacgaucguacaccauauagaacucuguugaugaacgaacucggaguucccuuccaucugggcaccaaacagguguguaucgccuggucaagcaguuccugccacgacgguaaggcauggcugcaugucugugugacagggcacgaugagaaugccaccgcuucuuuuauuuacgacggaaggcucguagauagcaucggcuccuggaguaaaaagaucuuacggacgcaggaaucagagugcguuuguauuaacggcacuugcacaguggucaugaccgacgggagcgcaucuggacgcgccgauacuaaaauacuguucaucgaggaagguaagauugugcacaucucccaacuuuugggcucagcucagcauguggaggaaugcagcuguuauccuagauacccaggggucaggugcguuugucgggacaauuggaagggaaguaaccgcccgauaguggauauuaacguaaaagacuacucuaucguguccagcuaugucugcucgggccuggugggugacacaccccgaaagaaugauucuuccucaaguagccacugucuaaacccuaauaacgaggaagggggacauggcguuaaaggcugggccuuugacgaugggaaugacguguggaugggaagaaccaucuccgagaagcucaggucugguuacgagacguucaaagucauugaaggcuggagcaagccaaacucaaaacugcagaucaaucgucaggugauuguagaucgggggaaccgcaguggauauuccggcauauuuagcguugaggguaagucuugcaucaauagauguuucuacguggaacuuauuagggggcggaagcaagagaccgaagucugguggacaucaaacaguaucguggucuuuugcggcacuagcggaaccuauggcacaggguccuggcccgacggagcggauaucaaucugaugccuauuuga

SEQ ID NO: 142965 - RNA, 1410 nt, Artificial Sequence
  derived and/or modified CDS sequence (opt3) from neuraminidase__InfluenzaA__ABD94946
augaaccccaaucagaagaucauuaccauaggcagcgugucccugacaaucgccacuauuugcuuccucacgcagaucgcuauucuugucaccacaguuacucugcacuuuaaacaguacgaguguaacucuccuccaaauaaccaggugauguugugcgaaccgaccaucauagagagaaauaucacagaaauuguauauuuaaccaacacuacaaucgagaaggaaauuugucccaaacuggcagaguacaggaauuggucaaagccucagugcaacaucaccggguucgccccauuuaguaaagacaauagcauacggcuauccgcgggaggugauauuugggugacgcgcgagcccuaugucucuugugacccugauaagugcuaccaauucgcucucggccaggggacuacccugaacaauggacauucgaacgacacagugcacgaucgaacuccauaucguacccuucugaugaaugaauugggcguucccuuucaucucgguacaaaacagguguguaucgccuggucaagcaguuccugccacgacgggaaagcauggcugcaugucugugugaccggagaugacaagaacgccacggcuucuuucauuuacaauggcagacugguagauagcaucggcuccuggucaaagaagauccucaggacucaggagagugaaugcguuuguauuaacgggacaugcaccguggucaugacugacggaagcgcaucugguaaagccgauacaaagauauuauuuaucgaggagggcaagauugugcacaccucccugcuuucagggagcgcucaacacguggaagagugcaguuguuauccucgguacccaggaguccgcugcguuuguagagacaacuggaaaggcucuaauaggccgaucguggauauaaacguaaaggacuacuccauugugagcucguaugucugcucugguuuggugggggacacgccccggaaaaaugaucgcuccucaaguagccauugucuggacccuaacaaugaagagggaggccacggcguuaaggggugggccuucgaugacggaaacgauguguggaugggucgaaccaucuccgaaaaacuaagaucuggcuacgagacauuuaaggucaucgagggguggagcaaaccaaauucaaagcuccagauuaacaggcaagugaucguagaccgggauaaucguaguggauauuccggcauuuucagcguugaagguaagucuugcauaaaccgcuguuuuuacguggagcugaucagagggaggaaucaggaaacugagguccuuuggaccucaaacaguauuguggucuucugcggcacaagcggaacuuauggcaccggguccuggcccgacggagcggauaucaaucugaugccuaucuga

SEQ ID NO: 142966 - RNA, 1410 nt, Artificial Sequence
  derived and/or modified CDS sequence (opt3) from neuraminidase__InfluenzaA__ABD94957
augaaccccaaucagaagaucauuaccauaggcagcgugucccugacaaucucuacuauuugcuucuuuaugcaaaucgccauucucaucacgaccgucacacuucacuucaaacaguacgaguuuaacucaccuccaaauaaccagguuaugcugugugaaccgacuauaaucgagagaaauauuaccgaaaucguguauuugacaaacaccacuauugagaaggaaaucugccccaaauuagcugaguacaggaauuggaguaagccucagugugacauaacaggguucgcaccauuuagcaaagauaacuccauucggcugucugccggaggugacaucuggguaacccgcgagcccuaugugucgugcgauccugacaaguguuaccaauucgcgcuaggccaggggacgacucucaauaacguccauucaaaugauaccgugcacgaccgaacaccauaucguacucugcuuaugaacgaacugggaguucccuuucauuugggcaccaaacaggugugcauugcuuggagcaguuccucuugucacgaugguaaggccuggcuccaugucugcgugacaggggacgauaagaaugcaaccgccagcuucaucuacaacggaagacugguagacuccaucguuucauggaguaaaaagauucugaggacgcaggagagcgaaugugugugcauaaauggcacuuguacagucgugaugaccgauggcucugcuuccgggaaagcagacacuaagauccucuuuauugaggagggaaagaucgugcacacaucaaccuuaagcgguagugcccaacacgucgaagagugcucuugcuauccucgguacccaggcguucgcugugugugcagagauaacuggaaaggguccaacaggccgauaguagacauuaauaucaaggacuacagcaucgugucgucuuaugucuguuccggacuggugggcgauacgccccggaaaaacgacucaaguagcuccucucauugccuugauccuaauaacgaagagggugggcacggaguuaagggcugggcuuucgacgauggcaaugacguguggauggggcgcaccauuagcgaaaaauugcgaucaggauacgagacauuuaaggucaucgaggguuggaguaacccaaauuccaaacugcagauuaacagacaggugauaguagauaggggcaaucggagcggguauucuggaaucuucucaguugaaaguaagagcuguauuaaccguugcuuuuacguggagcuaauccgcggcagaaaggaagagacugaaguccucuggaccuccaauucuaucguggucuucugugguacaucggggacuuauggcaccggaagcuggcccgacggcgccgauauuaaccugaugccuauauga

SEQ ID NO: 142967 - RNA, 1413 nt, Artificial Sequence; identical to SEQ ID NO: 142876
  derived and/or modified CDS sequence (opt3) from neuraminidase__InfluenzaA__ABD94968

SEQ ID NO: 142968 - RNA, 1413 nt, Artificial Sequence; identical to SEQ ID NO: 142876
  derived and/or modified CDS sequence (opt3) from neuraminidase__InfluenzaA__ABD94990

SEQ ID NO: 142969 - RNA, 1413 nt, Artificial Sequence
  derived and/or modified CDS sequence (opt3) from neuraminidase__InfluenzaA__ABD95001
augaaccccaaucagaagaucauuaccauaggcagcaucuccauugccaucgggauuaucucucugaugcuccaaauaggaaacaucauuucaaucugggcuagucacagcauucagacagguucccagaaucauacuggcaucugcaaccagagaauaauuacguacgaaaauucuaccugggugaaccacacauaugucaauauccauaacacuaauguuguggcagggaaagacaagaccucgguaacacuugccggaaacucaagccuguguaguauuuccggcugggcgaucuacaccaaagauaauucuaucaggauugguagcaagggggacguguucgucauacgggagccuuuuaucuccugcucacacuuggagugucgcacuuucuuuuuaacacaaggagcucugcuaaacgauaaacauaguaauggcaccgugaaggaccgaagcccauaucgugcccucaugucuugcccgcugggcgaagcacccuccccuuacaacucaaaguucgagagcguugccuggagugcuucugcaugucacgaugggaugggauggcuuacgauugguaucuccggcccagacaauggggccguggcuguccugaaauauaacggaauaauuacugaaaccaucaagagcuggaaaaagagaaucuugaggacacaggagucggagugcguguguguaaacggcucuugcuuuacuauuaugaccgauggucccuccaauggggccgcgucauacaaaaucuucaagauugaaaagggaaaaguuacaaagaguauagagcucaacgcaccuaauuuucacuaugaagaguguagcugcuacccagacaccggcacggugaugugugucugccgggauaacuggcauggcuccaaucgccccugggugucuuucaaccagaaucuggacuaccagaucggguauauuugcagcggaguguuuggugauaacccuagaccaaaagacggcgaggggucauguaauccggucacuguugauggagccgacggcgugaaggguuucaguuacaaauaugggaacggcguauggaucggaaggacaaaguccaaucggcugcgcaaaggcuuugaaaugaucugggaccccaacggguggaccgauacugacagcaauuucucuaugaagcaagauguggucgcuauuacagacuggucaggauacagugguagcuuugugcagcacccugagcucaccggcuuagauugcauacgaccauguuucuggguugaacuggugagagggcuucccagggagaacacgaccaucuggacauccggaucuucgauuagcuucugcggcgucaauuccgacacugccaacuggucauggccugauggugcagaauugccauuuaccaucgacaaguga

SEQ ID NO: 142970 - RNA, 1413 nt, Artificial Sequence
  derived and/or modified CDS sequence (opt3) from neuraminidase__InfluenzaA__ABD95012
augaaccccaaucagaagaucauuaccauaggcagcaucuccauugccaucgggauuaucucucugaugcuccaaauaggaaacaucauuucaaucugggcuagucacagcauucagacagguucccagaaucauacuggcaucugcaaccagagaauaauuacguacgaaaauucuaccugggugaaccacacauaugucaauaucaacaauacuaacguuguggcagggaaagacaagaccucgguaacacuugccggaaauucaagccuguguaguauuuccggcugggcgaucuacaccaaagauaacucuaucaggauugguagcaagggggacguguucgucauacgggagccuuuuaucuccugcucacauuuggagugucgcacuuucuuuuuaacacaaggagcucugcuaaaugauaaacacaguaacggcaccgugaaggaccgaagcccauaucgugcccucaugucuugcccgcugggcgaagcacccuccccuuacaauucaaaguucgagagcguugccuggagugcuucugcaugucaugaugggaugggauggcuuacgauugguaucuccggcccagacaacggggccguggcuguccugaaauauaacggaauaauuacugaaaccaucaagagcuggaaaaagagaaucuugaggacacaggagucggagugcguguguguaaauggcucuugcuuuacuauuaugaccgauggucccuccaacggggccgcgucauacaaaaucuucaagauugaaaagggaaaaguuacaaagaguauagagcucaaugcaccuaacuuucacuaugaagaguguagcugcuacccagacaccggcacggugaugugugucugccgggauaauuggcacggcuccaaccgccccugggugucuuucaaucagaaccuggacuaccagaucggguauauuugcagcggaguguuuggugauaauccuagaccaaaagacggcgaggggucauguaacccggucacuguugauggagccgacggcgugaaggguuucaguuacaaauaugggaauggcguauggaucggaaggacaaaguccaaccggcugcgcaaaggcuuugaaaugaucugggaccccaauggguggaccaacacugauagcaauuucucugugaagcaagacgucguggcuauuacagauuggucaggauacagugguagcuuuguucagcauccugagcucaccggcuuagacugcauacgaccauguuucuggguggaacuggucagagggcuucccagggagaacacgaccaucuggacauccggaucuucgauuagcuucugcggcgugaacuccgauacugccaauuggucauggccugacggugcagaauugccauuuaccaucgauaaguga

SEQ ID NO: 142971 - RNA, 1413 nt, Artificial Sequence; identical to SEQ ID NO: 142876
  derived and/or modified CDS sequence (opt3) from neuraminidase__InfluenzaA__ABD95023

SEQ ID NO: 142972 - RNA, 1413 nt, Artificial Sequence
  derived and/or modified CDS sequence (opt3) from neuraminidase__InfluenzaA__ABD95034
augaaccccaaucagaagaucauuaccauaggcagcaucuccauugccaucgggauuaucucucugaugcuccaaauaggaaacaucauuucaaucugggcuagucacagcauucagacagguucccagaaucauacuggcaucugcaaccagagaauaauuacguacgaaaauucuaccugggugaaccacacauaugucaauaucaacaauacuaacguuguggcagggaaagacaagaccucgguaacacuugccggaaauucaagccuguguaguauuuccggcugggcgaucuacaccaaagauaacucuaucaggauugguagcaagggggacguguucgucauacgggagccuuuuaucuccugcucacauuuggagugucgcacuuucuuuuuaacacaaggagcucugcuaaaugauaaacacaguaacggcaccgugaaggaccgaagcccauaucgugcccucaugucuugcccgcugggcgaagcacccuccccuuacaauucaaaguucgagagcguugccuggagugcuucugcaugucaugaugggaugggauggcuuacgauugguaucuccggcccagacaacggggccguggcuguccugaaauauaacggaauaauuacugaaaccaucaagagcuggaaaaagagaaucuugaggacacaggagucggagugcguguguguaaauggcucuugcuuuacuauuaugaccgauggucccuccaacggggccgcgucauacaaaaucuucaagauugaaaagggaaaaguuacaaagaguauagagcucaaugcaccuaacuuucacuaugaagaguguagcugcuacccagacaccggcacggugaugugugucugccgggauaauuggcacggcuccaaccgccccugggugucuuucaaucagaaccuggacuaccagaucggguauauuugcagcggaguguuuggugauaauccuagaccaaaagacggcgaggggucauguaacccggucacuguugauggagccgacggcgugaaggguuucaguuacaaauaugggaauggcguauggaucggaaggacaaaguccaaccggcugcgcaaaggcuuugaaaugaucugggaccccaauggguggaccgauacugacagcaacuucucugugaagcaagaugucguggcuauuacagacuggucaggauacagugguagcuuuauacagcauccugagcucaccggcuuagauugcauccgaccauguuucuggguugaacuggugagagggcuucccagggagaauacgaccauuuggacauccggaucuucgaucagcuucugcggcgucaacuccgacacugccaacuggucauggccugauggugcagaauugccauuuaccauugacaaguga

SEQ ID NO: 142973 - RNA, 1413 nt, Artificial Sequence
  derived and/or modified CDS sequence (opt3) from neuraminidase__InfluenzaA__ABD95056
augaaccccaaucagaagaucauuaccauaggcagcaucuccauugccaucgggauuaucucucugaugcuccaaauaggaaacaucauuucaaucugggcuagucacagcauucagacagguucccagaaucauacuggcgugugcaaccagagaaucauaacguacgaaaauucuaccugggucaaccacacauauguuaauauuaacaauacuaacgugaucgcagggaaagacaagaccucgguaacacuugccggaaauucaagccuguguaguauuuccggcugggcgaucuacaccaaagauaacucuaucaggauugguagcaagggggacguguucgucauacgggagccuuuuaucuccugcucacauuuggagugucgcacuuucuuuuuaacacaaggagcucugcuaaaugauaaacacaguaacggcaccgugaaggaccgaagcccauaucgugcccucaugucuugcccgcugggcgaagcacccuccccuuacaauucaaaguucgagagcguugccuggagugcuucugcaugucaugaugggaugggauggcuuacgauugguaucuccggcccagacaacggggccguggcuguccugaaauauaacggaauaauuacugaaaccaucaagagcuggaaaaagcagaucuugagaacacaggagucggagugcguguguguaaauggcucuugcuuuacuauuaugaccgauggucccuccaacggggccgcgucauacaaaaucuucaagauugaaaagggaaaaauaacaaagaguaucgagcucaaugcaccuaacuuucacuaugaagaguguagcugcuacccagacaccggcacgguuaugugugugugcagggauaauuggcacggcuccaaccggcccugggucucuuucaaucagaaccuggacuaccaaauuggguauaucugcagcggaguguuuggugauaauccucgcccaaaagacggcgaggggucauguaacccggugacugucgauggagccaauggcguuaaggguuucaguuacaaauaugggaacggcguguggaucggaagaacaaaguccaauaggcugcggaaaggcuuugaaaugauuugggaccccaacggguggaccgacacugauagcgacuucucuguaaagcaggauguggucgcuauaacagacuggucaggauacagugguagcuuugugcagcauccugagcucaccggcuuaaauugcauccgcccauguuucuggguugaacuggugcgagggcuucccaaggagaacacgaccauuuggacauccggaucuucgaucagcuucugcggcgucaacuccgauacugccaauuggucauggccugacggugcagaauugccauuuaccauugauaaauga

SEQ ID NO: 142974 - RNA, 1413 nt, Artificial Sequence; identical to SEQ ID NO: 142444
  derived and/or modified CDS sequence (opt3) from neuraminidase__InfluenzaA__ABD95067

SEQ ID NO: 142975 - RNA, 1413 nt, Artificial Sequence; identical to SEQ ID NO: 142444
  derived and/or modified CDS sequence (opt3) from neuraminidase__InfluenzaA__ABD95078

SEQ ID NO: 142976 - RNA, 1413 nt, Artificial Sequence; identical to SEQ ID NO: 142973
  derived and/or modified CDS sequence (opt3) from neuraminidase__InfluenzaA__ABD95089

SEQ ID NO: 142977 - RNA, 1413 nt, Artificial Sequence; identical to SEQ ID NO: 142444
  derived and/or modified CDS sequence (opt3) from neuraminidase__InfluenzaA__ABD95100

SEQ ID NO: 142978 - RNA, 1413 nt, Artificial Sequence
  derived and/or modified CDS sequence (opt3) from neuraminidase__InfluenzaA__ABD95111
augaaccccaaucagaagaucauuaccauaggcagcaucuccauugccaucgggaugauuucucugaugcuccaaaucggaaacauaaucucaauuugggcuagucacagcauccagacagguucccagaaucauacuggcgugugcaaccagagaauuaucacguacgaaaauucuaccugggucaaccacacauauguuaauauaaacaauacuaacgugauugcagggaaagacaagaccucgguaacacuugccggaaauucaagccuguguaguaucuccggcugggcgauuuacaccaaagauaacucuaucaggaucgguagcaagggggacguguucgucauucgggagccuuuuauauccugcucacauuuggagugucgcacuuucuuuuuaacacaaggagcucugcuaaaugauaaacacaguaacggcaccgugaaggaccgaagcccauaucgugcccucaugucuugcccgcugggcgaagcacccuccccuuacaauucaaaguucgagagcguugccuggagugcuucugcaugucaugaugggaugggauggcuuacgaucgguauuuccggcccagacaacggggccguggcuguccugaaauauaacggaaucauaacugaaaccauuaagagcuggaaaaagcagaucuugagaacacaggagucggagugcguguguguaaauggcucuugcuuuacuaucaugaccgauggucccuccaacggggccgcgucauacaaaauuuucaagaucgaaaagggaaaaguuacaaagaguauugagcucaaugcaccuaacuuucacuaugaagaguguagcugcuacccagacaccggcacggugaugugugucugcagggauaauuggcacggcuccaaccggcccugggugucuuucaaucagaaccuggacuaccaaauaggguauaucugcagcggaguguuuggugauaauccucgcccaaaagacggcgaggggucauguaacccggucacuguugauggagccaauggcgugaaggguuucaguuacaaauaugggaacggcguauggauuggaagaacaaaguccaauaggcugcggaaaggcuuugaaaugaucugggaccccaacggguggaccgacacugauagcgacuucucugugaagcaggaugucguggcuaucacagacuggucaggauacagugguagcuuuguucagcauccugagcucaccggcuuagauugcauucgcccauguuucuggguggaacugguccgagggcuucccaaggagaauacgaccauauggacauccggaucuucgaucagcuucugcggcgugaacuccgacacugccaacuggucauggccugauggugcagaauugccauuuaccauugacaaauga

SEQ ID NO: 142979 - RNA, 1413 nt, Artificial Sequence; identical to SEQ ID NO: 142978
  derived and/or modified CDS sequence (opt3) from neuraminidase__InfluenzaA__ABD95122

SEQ ID NO: 142980 - RNA, 1413 nt, Artificial Sequence; identical to SEQ ID NO: 142444
  derived and/or modified CDS sequence (opt3) from neuraminidase__InfluenzaA__ABD95144

SEQ ID NO: 142981 - RNA, 1413 nt, Artificial Sequence; identical to SEQ ID NO: 142444
  derived and/or modified CDS sequence (opt3) from neuraminidase__InfluenzaA__ABD95155

SEQ ID NO: 142982 - RNA, 1413 nt, Artificial Sequence
  derived and/or modified CDS sequence (opt3) from neuraminidase__InfluenzaA__ABD95166
augaaccccaaucagaagaucauuaccauaggcagcaucuccauugccaucgggaugauuucucugaugcuccaaaucggaaacauaaucucaauuugggcuagucacagcauccagacagguucccagaaucauacuggcgugugcaaccagagaauuaucacguacgaaaauucuaccugggucaaccacacauauguuaauauaaacaauacuaacgugauugcagagaaagacaagaccucgguaacacuugccggaaauucaagccuguguaguaucuccggaugggcgauuuacaccaaagauaacucuaucaggaucggcagcaagggugacguguucgucauucgggagccuuuuauauccugcucacauuuggaaugucgcacuuucuuuuuaacacaaggggcucugcuaaaugauaaacacaguaacggaaccgugaaggaccgaagcccauaucgugcccucaugucuugcccgcugggcgaggcacccuccccuuacaauucaaaguucgaaagcguugccuggagugcuucugcaugucaugauggcaugggguggcuuacgaucggaauuuccgguccagacaacggcgccguggcuguccugaaauauaacgggaucauaacugagaccauuaagagcuggaaaaagcagaucuugagaacacaggagucggaaugcguguguguaaauggaucuugcuuuacuaucaugaccgauggccccuccaacggugccgcgucauacaaaauuuucaagaucgagaaggggaaaguuacaaagaguauugaacucaaugcaccuaacuuucacuaugaggaguguagcugcuacccagacaccggaacggugaugugugucugcagggauaauuggcacggcuccaaccggcccugggugucuuucaaucagaaccuggacuaccaaauaggcuauaucugcagcgggguguuuggagauaauccucgcccaaaagacggugaaggcucauguaacccggucacuguugauggggccaauggagugaagggcuucaguuacaaauaugguaacgggguauggauuggcagaacaaaguccaauaggcugcggaaaggauuugagaugaucugggaccccaacggcuggaccgacacugauagcgacuucucugugaagcaggaugucguggcuaucacagacuggucaggguacagugggagcuuuguucagcauccugaacucaccgguuuagauugcauucgcccauguuucuggguggagcugguccgaggccuucccaaggaaaauacgaccauauggacauccgggucuucgaucagcuucugcggagugaacuccgacacugccaacuggucauggccugauggcgcagaguugccauuuaccauugacaaauga

SEQ ID NO: 142983 - RNA, 1413 nt, Artificial Sequence; identical to SEQ ID NO: 142973
  derived and/or modified CDS sequence (opt3) from neuraminidase__InfluenzaA__ABD95177

SEQ ID NO: 142984 - RNA, 1413 nt, Artificial Sequence
  derived and/or modified CDS sequence (opt3) from neuraminidase__InfluenzaA__ABD95188
augaaccccaaucagaagaucauuaccauaggcagcaucuccacaacuauugggaucauuucucugaugcuccaaaucggaaacauaaucucaauuugggccagucacagcauccagacggguucccagaaucauaccggcgugugcaaccagagaauuaucacauacgaaaauucuacuugggucaaccacaccuauguuaauauaaacaauacaaacgugauugcugggaaagacaagaccucgguaacucuugcaggaaauucaagccuguguaguaucuccggcugggccauuuacacaaaagauaacucuaucaggaucgguagcaagggggacguguucgucauucgggagccuuuuauauccugcucacauuuggagugucgcaccuucuuuuuaacgcaaggagcgcugcuaaaugauaaacacaguaacggcacugugaaggaccgaagcccauaucgugcucucaugucuugcccgcugggcgaagcccccuccccuuacaauucaaaguucgagagcguugcauggagugccucugcuugucaugaugggaugggauggcuuaccaucgguauuuccggcccagacaacggggcaguggccguccugaaauauaacggaaucauaacagaaacuauuaagagcuggaaaaagcagaucuugagaacccaggagucggagugcguguguguaaauggcucuugcuuuacaaucaugaccgauggucccuccaacggggcugccucauacaaaauuuucaagaucgaaaagggaaaaguuacgaagaguauugagcucaaugcgccuaacuuucacuaugaagaguguagcugcuacccagacacuggcacagugaugugugucugcagggauaauuggcacggcuccaaccggcccugggugucuuucaaucagaaccuggacuaccaaauaggguauaucugcagcggaguguuuggugauaauccucgcccaaaagacggcgaggggucauguaacccggucaccguugauggagcaaauggcgugaaggguuucaguuacaaauaugggaacggcguauggauuggaagaacuaaguccaauaggcugcggaaaggcuuugaaaugaucugggaccccaacggguggacagacaccgauagcgacuucucugugaagcaggaugucguggccaucacggacuggucaggauacagugguagcuuuguucagcauccugagcucaccggcuuagauugcauucgcccauguuucuggguggaacugguccgagggcuucccaaggagaauacaacuauauggaccuccggaucuucgaucagcuucugcggcgugaacuccgacacagcuaacuggucauggccugauggugccgaauugccauuuacuauugacaaauga

SEQ ID NO: 142985 - RNA, 1413 nt, Artificial Sequence; identical to SEQ ID NO: 142973
  derived and/or modified CDS sequence (opt3) from neuraminidase__InfluenzaA__ABD95199

SEQ ID NO: 142986 - RNA, 1413 nt, Artificial Sequence; identical to SEQ ID NO: 142463
  derived and/or modified CDS sequence (opt3) from neuraminidase__InfluenzaA__ABD95210

SEQ ID NO: 142987 - RNA, 1413 nt, Artificial Sequence
  derived and/or modified CDS sequence (opt3) from neuraminidase__InfluenzaA__ABD95221
augaaccccaaucagaagaucauuaccauaggcagcaucuccauugccaucgggaugauuucucugaugcuccaaaucggaaacauaaucucaauuugggcuagucacagcauccagacagguucccagaaucauacuggcgugugcaaccagagaauuaucacguacgaaaauucuaccugggucaaccacacauauguuaauauaaacaauacuaacgugauugcagggaaagacaagaccucgguaacacuugccggaaauucaagccuguguaguaucuccggcugggcgauuuacaccaaagauaacucuaucaggaucgguagcaagggggacguguucgucauucgggagccuuuuauauccugcucacauuuggagugucgcacuuucuuuuuaacacaaggagcucugcuaaaugauaaacacaguaacggcaccgugaaggaccgaagcccauaucgugcccucaugucuugcccgcugggcgaagcacccuccccuuacaauucaaaguucgagagcguugccuggagugcuucugcaugucaugaugggaugggauggcuuacgaucgguauuuccggcccagacaacggggccguggcuguccugaaauauaacggaaucauaacugaaaccauuaagagcuggaaaaagcagaucuugagaacacaggagucggagugcguguguguaaauggcucuugcuuuacuaucaugaccgauggucccuccaacggggccgcgucauacaaaauuuucaagaucgaaaagggaaaaguuacaaagaguauugagcucaaugcaccuaacagccacuaugaagaguguuccugcuacccagacaccggcacggugaugugugucugcagggauaauuggcacggcucuaaccggcccugggugagcuuuaaucagaaccuggacuaccaaauaggguauaucugcucaggaguguucggugauaauccucgcccaaaagacggcgaggggaguuguaacccggucacuguugauggagccaauggcgugaaggguuuuuccuacaaauaugggaacggcguauggauuggaagaacaaagagcaauaggcugcggaaaggcuucgaaaugaucugggaccccaacggguggaccgacacugauucugacuuuucagugaagcaggaugucguggcuaucacagacuggaguggauacagcgguuccuucguucagcauccugagcucaccggcuuagauugcauucgcccauguuuuuggguggaacugguccgagggcuucccaaggagaauacgaccauauggacaucuggaucgagcaucuccuucugcggcgugaacucagacacugccaacuggaguuggccugauggugcagaauugccauucaccauugacaaauga

SEQ ID NO: 142988 - RNA, 1413 nt, Artificial Sequence; identical to SEQ ID NO: 142978
  derived and/or modified CDS sequence (opt3) from neuraminidase__InfluenzaA__ABD95232

SEQ ID NO: 142989 - RNA, 1413 nt, Artificial Sequence; identical to SEQ ID NO: 142444
  derived and/or modified CDS sequence (opt3) from neuraminidase__InfluenzaA__ABD95243

SEQ ID NO: 142990 - RNA, 1413 nt, Artificial Sequence; identical to SEQ ID NO: 142978
  derived and/or modified CDS sequence (opt3) from neuraminidase__InfluenzaA__ABD95254

SEQ ID NO: 142991 - RNA, 1413 nt, Artificial Sequence; identical to SEQ ID NO: 142463
  derived and/or modified CDS sequence (opt3) from neuraminidase__InfluenzaA__ABD95265

SEQ ID NO: 142992 - RNA, 1413 nt, Artificial Sequence; identical to SEQ ID NO: 142444
  derived and/or modified CDS sequence (opt3) from neuraminidase__InfluenzaA__ABD95276

SEQ ID NO: 142993 - RNA, 1413 nt, Artificial Sequence
  derived and/or modified CDS sequence (opt3) from neuraminidase__InfluenzaA__ABD95287
augaaccccaaucagaagaucauuaccauaggcagcaucuccguggccauugggaucauuucucugaugcuccaaaucggaaacauaaucucaauuugggcuagucacagcauccagacagguucccagaaucauacuggcgucugcaaccagagaauuaucacguacgaaaauucuaccuggguuaaccacacauaugugaauauaaacaauacuaacguaauugcagggaaagacaagaccucggugacacuugccggaaauucaagccuguguaguaucuccggcugggcgauuuacaccaaagauaacucuaucaggaucgguagcaagggggacgucuucgugauucgggagccuuuuauauccugcucacauuuggagugucgcacuuucuuuuuaacacaaggagcucugcuaaaugauaaacacaguaacggcaccguuaaggaccgaagcccauaucgugcccucaugucuugcccgcugggcgaagcacccuccccuuacaauucaaaguucgagagcguggccuggagugcuucugcaugucaugaugggaugggauggcuuacgaucgguauuuccggcccagacaacggggccgucgcugugcugaaauauaacggaaucauaacugaaaccauuaagagcuggaaaaagcagaucuugagaacacaggagucggagugcguauguguuaauggcucuugcuuuacuaucaugaccgauggucccuccaacggggccgcgucauacaaaauuuucaagaucgaaaagggaaaagugacaaagaguauugagcucaaugcaccuaacuuucacuaugaagaguguagcugcuacccagacaccggcacggucaugugugugugcagggauaauuggcacggcuccaaccggcccugggugucuuucaaucagaaccuggacuaccaaauaggguauaucugcagcggagucuuuggugauaauccucgcccaaaagacggcgaggggucauguaacccgguuacuguggauggagccaauggcguaaaggguuucaguuacaaauaugggaacggcguguggauuggaagaacaaaguccaauaggcugcggaaaggcuuugaaaugaucugggaccccaacggguggaccgacacugauagcgacuucucugucaagcaggaugugguugcuaucacagacuggucaggauacagugguagcuuugugcagcauccugagcucaccggcuuagauugcauucgcccauguuucugggucgaacuggugcgagggcuucccaaggagaauacgaccauauggacauccggaucuucgaucagcuucugcggcguaaacuccgacacugccaacuggucauggccugauggugcagaauugccauuuaccauugacaaauga

SEQ ID NO: 142994 - RNA, 1413 nt, Artificial Sequence; identical to SEQ ID NO: 142444
  derived and/or modified CDS sequence (opt3) from neuraminidase__InfluenzaA__ABD95298

SEQ ID NO: 142995 - RNA, 1413 nt, Artificial Sequence
  derived and/or modified CDS sequence (opt3) from neuraminidase__InfluenzaA__ABD95309
augaaccccaaucagaagaucauuaccauaggcagcaucuccauugccaucgggaugauuucucugaugcuccaaaucggaaacauaaucucaauuugggcuagucacagcauccagacagguucccagaaucauacuggcgugugcaaccagagaauuaucacguacgaaaauucuaccugggucaaccacacauauguuaauauaaacaauacuaacgugauugcagggaaagacaagaccucgguaacacuugccggaaauucaagccuguguaguaucuccggcugggcgauuuacaccaaagauaacucuaucaggaucgguagcaagggggacguguucgucauucgggagccuuuuauauccugcucacauuuggagugucgcacuuucuuuuuaacacaaggagcucugcuaaaugauaaacacaguaacggcaccgugaaggaccgaagcccauaucgugcccucaugucuugcccgcugggcgaagcacccuccccuuacaauucaaaguucgagagcguugccuggagugcuucugcaugucaugaugggaugggauggcuuacgaucgguauuuccggcccagacaacggggccguggcuguccugaaauauaacggaaucauaacugaaaccauuaagagcuggaaaaagcagaucuugagaacacaggagucggagugcguguguguaaauggcucuugcuuuacuaucaugaccgauggucccuccaacggggccgcgucauacaaaauuuucaagaucgaaaagggaaaaguuacaaagaguauugagcucaaugcaccuaacuuucacuaugaagaguguagcugcuacccagacaccggcacggugaugugugucugcagggauaauuggcacggcuccaaccggcccugggugucuuucaaucagaaccuggacuaccaaauaggguauaucugcagcggaguguuuggugauaauccucgcccaaaagacggcgaggggucauguaacccggucacuguugauggagccaauggcgugaaggguuucaguuacaaauaugggaacggcguauggauuggaagaacaaagugcaauaggcugcggaaaggcuuugaaaugaucugggaccccaacggguggaccgacacugauuccgacuucagcgugaagcaggaugucguggcuaucacagacuggucuggauacucagguaguuuuguucagcauccugagcucaccggcuuagauuguauucgcccaugcuucuggguggaacugguccgagggcuucccaaggagaauacgaccauauggacaagcggauccucuaucucguucuguggcgugaacagcgacacugccaacugguccuggccugauggugcagaauugccauuuaccauugacaaauga

SEQ ID NO: 142996 - RNA, 1413 nt, Artificial Sequence; identical to SEQ ID NO: 142444
  derived and/or modified CDS sequence (opt3) from neuraminidase__InfluenzaA__ABD95320

SEQ ID NO: 142997 - RNA, 1413 nt, Artificial Sequence; identical to SEQ ID NO: 142973
  derived and/or modified CDS sequence (opt3) from neuraminidase__InfluenzaA__ABD95331

SEQ ID NO: 142998 - RNA, 1413 nt, Artificial Sequence
  derived and/or modified CDS sequence (opt3) from neuraminidase__InfluenzaA__ABD95342
augaaccccaaucagaagaucauuaccauaggcagcaucugcauggccauugggaucauuucccugauccuccaaauaggaaacaucauuucuaucugggugucacacaguauucagacagguagccagaaucauacuggcaucuguaaccagagaauaauuacguacgaaaauuccaccugggucaaccaaacauauguuaauaucaacaauacuaacgugguagcugggaaagacaccacaucugugacccuugcaggaaauucgucacugugcccugucaggggcugggccauuuacagcaaggauaacaguauccggaucgguuccaaaggggacguguucguuauucgcgaaccauuuauaucuuguagccacuuggagugccgaacuuucuuuuuaacacagggagcgcugcuaaaugauaagcauuccaacggcaccgugaaagaccguucaccguauagagcucucaugaguugucccaucggcgaagccccuagcccauacaauucuagguucgaguccgucgcauggucagccagcgcuugccacgaugggaugggauggcugacgauugguaucaguggccccgacgauggggcaguggccguacuuaaguauaacggaauaauuacugaaaccaucaagucuuggcggaaacgcauccugagaacacaggaguccgaguguguuugcauuaacggcagcuguuuuacuaucaugaccgacgguccuucgaaugggccagcuucuuacaggauuuucaagauagaaaaaggaaagaucacaaaauccauugaguuggaugcccccaacucacauuaugaagagugcaguuguuacccugacaccggcacggugaugugcgucugccgggauaauuggcacggcagcaaccgcccauggguguccuuuaaucagaaccucgacuaccaaaucggguauaucuguucuggaguguucggugauaauccgcgacccaaggacggcaaggggagcugcggaccugucacuguugacggcgcggauggugugaaaggguuuucauacagauauggcaacggaguauggauuggcaggacaaagaguaauuccagccggaaaggguucgagaugauaugggacccaaacggauggaccgauacugacucuaauuuucuggugaagcaggaugucguggcaaugacagacuggucagguuacaguggcagcuucguucagcaccccgaacugaccgggcucgauuguaugcguccuugcuuuuggguggaguuaauccgcggaagaccaagggagaaaacgaccauuuggacauccgguucuucgaucagcuucuguggcgucaacuccgacacugugaauuggucauggcccgauggggccgagcugccguucaccauugacaaguga

SEQ ID NO: 142999 - RNA, 1413 nt, Artificial Sequence
  derived and/or modified CDS sequence (opt3) from neuraminidase__InfluenzaA__ABD95353
augaaccccaaucagaagaucauuaccauaggcagcaucugcauggccauugggaucauuucccugauccuccaaauaggaaacaucauuucuaucugggugucacacaguauucagacagguagccagaaucauacuggcaucuguaaccagagaauaauuacguacgaaaauuccaccugggucaaccaaacauauguuaauaucucuaacacuaaugugguagcugggaaagacaccacaucgaugacccuugcaggaaacucaagccugugcccuauuaggggcugggccaucuacaguaaggauaauuccauccggauugguucuaaaggggacguguucgucauacgcgaaccauuuaucagcuguucccacuuggagugccgaacuuucuuuuuaacacagggagcgcugcuaaacgauaagcauucaaauggcaccgugaaagaccguaguccguauagagcucucaugagcugucccauuggcgaagccccuucuccauacaacuccagguucgagucaguugcauggagcgccagugcuugccacgaugggaugggauggcugacgaucgguauaucuggccccgacgauggggcaguggccguccuuaaguauaauggaauuaucacugaaaccaucaaguccuggcggaaacagauucugcgcacacaggagagcgagugugugugcguaaacggcucguguuuuacuaucaugaccgacgguccuucugaugggccagcuuccuacagaauuuucaagauagaaaaaggaaagaucacaaaaucaauugaguuggacgcccccaacagucauuaugaagagugcagcuguuacccugauaccggcacgguuaugugcgugugcagggacaauuggcacggcuccaaccggccaugggucucuuuuaaucaaaaccucgauuaccagaucggguauaucuguagcggaguguucggugacaauccgcgccccaaggacggcaaggggucaugcgauccugugaacgucgacggagcggauggcguuaaagguuuuaguuaccgauaugggaauggcguguggauuggaagaacuaaguccaacagcucuaggaaaggcuucgagaugauaugggacccaaauggguggacagauaccgacucaaacuuucugguaaagcaggauguggucgcaaugacugacuggaguggauacagcgguuccuucgugcagcaccccgaacugacaggccucgauuguaugcggccuugcuuuuggguugaguuaauccgugggcgcccaagagagaaaaccacgauuuggaccucuggaucgagcaucuccuucuguggcgucaauucagacacagugaacuggaguuggcccgauggugccgagcugccguucacuauugacaaguga

SEQ ID NO: 143000 - RNA, 1413 nt, Artificial Sequence; identical to SEQ ID NO: 142876
  derived and/or modified CDS sequence (opt3) from neuraminidase__InfluenzaA__ABE11660

SEQ ID NO: 143001 - RNA, 1413 nt, Artificial Sequence
  derived and/or modified CDS sequence (opt3) from neuraminidase__InfluenzaA__ABE11671
augaaccccaaucagaagaucauuaccauaggcagcaucuccauugccaucgggauuaucucucugaugcuccaaauaggaaacaucauuucaaucugggcuagucacagcauucagacagguucccagaaucauacuggcgugugcaaccagagaaucauaacguacgaaaauucuaccugggucaaccacacauauguuaauauuaacaauacuaacgugguagcagggaaagacaagaccucggugacacuugccggaaauucaagccuguguaguaucuccggcugggcgauuuacaccaaagauaacucuaucaggaucgguagcaagggggacgucuucgugauucgggagccuuuuauauccugcucacauuuggagugucgcacuuucuuuuuaacacaaggagcucugcuaaaugauaaacacaguaacggcaccguuaaggaccgaagcccauaucgugcccucaugucuugcccgcugggcgaagcacccuccccuuacaauucaaaguucgagagcguggccuggagugcuucugcaugucaugaugggaugggauggcuuacgaucgguauuuccggcccagacaacggggccgucgcugugcugaaauauaacggaaucauaacugaaaccauuaagagcuggaaaaagcagaucuugagaacacaggagucggagugcguauguguuaauggcucuugcuuuacuaucaugaccgauggucccuccaacggggccgcgucauacaaaauuuucaagaucgaaaagggaaaagugaauaagaguauugagcucaacgcaccuaauuuucacuaugaagaguguagcugcuacccagacacaggcaccgucaugugugugugcagggauaacuggcacggcuccaaucggcccugggugucuuucaaccagaaucuggacuaccaaauaggguauaucugcagcggagucuuuggugauaacccucgcccaaaagacggcgaggggucauguaauccgguuacgguggauggagccaacggcguaaaggguuucaguuacaaauaugggaauggcguguggauuggaagaacuaaguccaacaggcugcggaaaggcuuugaaaugaucugggaccccaauggguggacagacaccgauagcgacuucucugucaagcaggaugugguugcuaucacugacuggucaggauacagugguagcuuugugcagcauccugagcucacaggcuuagauugcauucgcccauguuucugggucgaacuggugcgagggcuucccagagagaacaccacgauauggaccuccggaucuucgaucagcuucugcggcguaaacuccgacacagccaauuggucauggccugauggugcagaauugccauuuacuauugacaaguga

SEQ ID NO: 143002 - RNA, 1413 nt, Artificial Sequence
  derived and/or modified CDS sequence (opt3) from neuraminidase__InfluenzaA__ABE11682
augaaccccaaucagaagaucauuaccauaggcagcaucuccauugccaucgggauuaucucucugaugcuccaaauaggaaacaucauuucaaucugggcuagucacagcauucagacagguucccagaaucauacuggcaucugcaaccagagaauaauuacguacgaaaauucuaccugggugaaccacacauaugugaauaucaacaauacuaacguuguggcaggggaggacaaaaccucgguaacacuugccggaaauucaagccuguguaguauuuccggcugggcgaucuacaccaaggauaacucuaucaggauugguagcaaaggggacguguucgucauacgggagccuuuuaucuccugcucacauuuggaaugucgcacuuucuuuuuaacacaaggagcucugcuaaaugauaagcacaguaacggcaccgugaaagaccgaagcccauaucgugcccucaugucuugcccgcugggcgaggcacccuccccuuacaauucaaaguucgaaagcguugccuggagugcuucugcaugucaugaugggaugggauggcuuacgauugguaucuccggcccagacaacggggccguggcuguccugaaguauaacggaauaauuacugagaccaucaaaagcuggaagaaaagaaucuugaggacacaggagucggaaugcguguguguaaauggcucuugcuuuacuauuaugaccgauggucccuccaacggggccgcgucauacaagaucuucaaaauugagaagggaaagguuacaaaaaguauagaacucaaugcaccuaacuuucacuaugaggaguguagcugcuacccagacaccggcacggugaugugugucugccgggauaauuggcacggcuccaaccgccccugggugucuuucaaucagaaccuggacuaccagaucggguauauuugcagcggaguguuuggugauaauccuagaccaaaggacggcgaagggucauguaacccggucacuguugauggagccgacggcgugaaagguuucaguuacaaguaugggaauggcguauggaucggaaggacaaaauccaaccggcugcgcaagggcuuugagaugaucugggaccccaauggguggaccgauacugacagcgauuucucugugaaacaagacgucguggcuauuacagauuggucaggauacagugguagcuuuguucagcauccugaacucaccggcuuagacugcauacgaccauguuucuggguggagcuggucagagggcuucccagggaaaacacgaccaucuggacauccggaucuucgauuagcuucugcggcgucaauuccgauacugccaacuggucauggccugacggugcagaguugccauuuaccaucgauaaguga

SEQ ID NO: 143003 - RNA, 1413 nt, Artificial Sequence; identical to SEQ ID NO: 142444
  derived and/or modified CDS sequence (opt3) from neuraminidase__InfluenzaA__ABE11693

SEQ ID NO: 143004 - RNA, 1413 nt, Artificial Sequence; identical to SEQ ID NO: 142444
  derived and/or modified CDS sequence (opt3) from neuraminidase__InfluenzaA__ABE11704

SEQ ID NO: 143005 - RNA, 1413 nt, Artificial Sequence; identical to SEQ ID NO: 142444
  derived and/or modified CDS sequence (opt3) from neuraminidase__InfluenzaA__ABE11715

SEQ ID NO: 143006 - RNA, 1413 nt, Artificial Sequence; identical to SEQ ID NO: 142973
  derived and/or modified CDS sequence (opt3) from neuraminidase__InfluenzaA__ABE11726

SEQ ID NO: 143007 - RNA, 1413 nt, Artificial Sequence; identical to SEQ ID NO: 142978
  derived and/or modified CDS sequence (opt3) from neuraminidase__InfluenzaA__ABE11737

SEQ ID NO: 143008 - RNA, 1413 nt, Artificial Sequence; identical to SEQ ID NO: 142444
  derived and/or modified CDS sequence (opt3) from neuraminidase__InfluenzaA__ABE11815

SEQ ID NO: 143009 - RNA, 1413 nt, Artificial Sequence; identical to SEQ ID NO: 142973
  derived and/or modified CDS sequence (opt3) from neuraminidase__InfluenzaA__ABE11826

SEQ ID NO: 143010 - RNA, 1413 nt, Artificial Sequence; identical to SEQ ID NO: 142973
  derived and/or modified CDS sequence (opt3) from neuraminidase__InfluenzaA__ABE11837

SEQ ID NO: 143011 - RNA, 1413 nt, Artificial Sequence; identical to SEQ ID NO: 142973
  derived and/or modified CDS sequence (opt3) from neuraminidase__InfluenzaA__ABE11848

SEQ ID NO: 143012 - RNA, 1413 nt, Artificial Sequence; identical to SEQ ID NO: 142978
  derived and/or modified CDS sequence (opt3) from neuraminidase__InfluenzaA__ABE11859

SEQ ID NO: 143013 - RNA, 1413 nt, Artificial Sequence
  derived and/or modified CDS sequence (opt3) from neuraminidase__InfluenzaA__ABE11903
augaaccccaaucagaagaucauuaccauaggcagcaucuccauggccauugggaucauuucucugauccuccaaauaggaaacaucauuucaaucugggcuagucacagcauucagacagguucccagaauuacacuggcaucugcaaccagagaauaauuacguaugaaaauucuaccugggugaaccaaacauacgucaauaucaacaauacuaacguuguggcagggaaagacaagaccucgaugacacuugccggaaauucaagccuguguccuauuaggggcugggcgaucuauaccaaagauaacaguauccggauugguuccaagggggacguauucgugauacgcgagccauuuaucucuugcagccauuuggagugucgaacuuucuuuuuaacacagggagcucugcuaaaugauaaacacuccaacggcaccgucaaggaccguucaccguacagagcccucaugaguugcccccugggcgaagcaccuagcccauauaauucuagguucgaguccguggccuggucagcuagcgcaugucaugaugggcuuggauggcugacgauugguaucaguggccccgacaacggggccguugcuguguugaaguacaacggaauaauuacugaaaccaucaaaucuuggaagaaacagauccuccggacacaggaguccgagugcgucugugugaauggcagcugcuuuacuauuaugaccgaugguccuucgaacggggccgcgucuuaucgcaucuucaagauugaaaaaggaagaguaacaaaguccauagagcuggacgcaccaaauuaccacuacgaagaguguucaugcuaucccgauaccggcacgguuaugugugugugcagggacaacuggcauggcaguaaucggccuugggucagcuuuaaccaaaaucuggauuaccagaucggguauauuugcuccggaguguucggugacaacccacgcccgaaggauggcgaggggucuuguaaucccgugacugucgacggagccgacggcguuaaagguuuuagcuaccgauaugggaacggcguguggaucggaagaacaaagucaaauaggcuccggaaaggcuucgaaaugaucugggauccuaacggguggaccgacacugauagugacuuuuccaugaagcaggauguaguggcuaugacagacuggagcggauacucugguucauucguccagcacccagaguuaaccggccuggauugcaugcgucccuguuuuuggguggaacuuguucgcggguugccuagagagaauacgaccauuuggacaaguggaagcuccauaucuuucugcggcgugaacucggaaacugccaauuggagcuggccagacggugcagagcugcccuucaccaucgauaaauga

SEQ ID NO: 143014 - RNA, 1413 nt, Artificial Sequence
  derived and/or modified CDS sequence (opt3) from neuraminidase__InfluenzaA__ABE11925
augaaccccaaucagaagaucauuaccauaggcagcaucuccauugccaucgggauuaucucucugauacuccaaaucggaaacauuaucucaauuugggcuagucacagcauccagacagguucccagaaucauacuggcauaugcaaccagagaauuaucacguacgaaaauucuaccugggugaaccaaacauaugucaauauuaacaauacuaacguuguggcagggaaagacaagaccucgaugacacuugccggaaauucaagccuguguccuaucaggggcugggcgaucuacaccaaagauaacaguauucggauagguuccaagggggacguauucgugauccgcgagccauuuauuucuugcagccacuuggagugucgaacuuucuuuuuaacacagggagcucugcuaaaugauaaacauuccaacggcaccgucaaggaccguucaccguauagagcccucaugaguugcccccugggcgaagcaccuagcccauacaauucuagguucgaguccguggccuggucagcuagcgcaugucacgaugggcuuggauggcugacgaucgguauaaguggccccgacaacggggccguugcuguguugaaguauaacggaauuaucacugaaaccaucaaaucuuggaagaaacggauucuccgcacacaggaguccgagugcgucuguaugaauggcagcugcuuuacuaucaugaccgaugguccuucgaacggggccgcgucuuacagaauuuucaagauagaaaaaggaaaggugacaaaguccaucgagcuggacgcaccaaauuaucauuacgaagaguguucaugcuaccccgauaccggcacgguaauguguguuugcagggacaacuggcacggcaguaaucggccuugggugagcuuuaaccagaaucuggauuaucaaauuggguacaucugcuccggagucuucggugacaacccacgcccgaaagauggcgaggggucuuguaaucccgugacugccgacggagcugacggcgugaaggguuuuagcuaucgauacgggaacggcgucuggaucggaagaacaaaaucaaauaggcuccggaagggcuucgaaaugauuugggauccuaacggguggaccgacacugauagugacuuuuccaugaaacaggauauaguugccaugacagacuggagcggauauucugguucauucgugcagcacccagaguuaaccggccuggauugcaugcgucccuguuuuuggguagaacuugugcgcggguugccuagagagaauacgaccaucuggacaaguggaagcuccauuucuuucugcggcgucaacucggacacugcaaauuggagcuggccagauggugcugaacugcccuucaccaucgacaaguga

SEQ ID NO: 143015 - RNA, 1413 nt, Artificial Sequence
  derived and/or modified CDS sequence (opt3) from neuraminidase__InfluenzaA__ABE11952
augaaccccaaucagaagaucauuaccauaggcagcaucuccauggccauugggaucauuucucugauccuccaaauaggaaacaucauuucaaucugggcuagucacagcauucagacagguucccagaauuacacuggcaucugcaaccagagaauaauuacguaugaaaauucuaccugggugaaccaaacauacgucaauaucaacaauacuaacguuguggcagggaaagacaagaccucgaugacacuugccggaaauucaagccuguguccuauuaggggcugggcgaucuauaccaaagauaacaguauccggauugguuccaagggggacguauucgugauacgcgagccauuuaucucuugcagccauuuggagugucgaacuuucuuuuuaacacagggagcucugcuaaaugauaaacacuccaacggcaccgucaaggaccguucaccguacagagcccucaugaguugcccccugggcgaagcaccuagcccauauaauucuagguucgaguccguggccuggucagcuagcgcaugucaugaugggcuuggauggcugacgauugguaucaguggccccgacaacggggccguugcuguguugaaguacaacggaauaauuacugaaaccaucaaaucuuggaagaaacagauccuccggacacaggaguccgagugcgucugugugaauggcagcugcuuuacuauuaugaccgaugguccuucgaacggggccgcgucuuaucgcaucuucaagauugaaaaaggaagaguaacaaaguccauagagcuggacgcaccaaauuaccacuacgaagaguguucaugcuaucccgauaccggcacgguuaugugugugugcagggacaacuggcauggcaguaaucggccuugggucagcuuuaaccaaaaucuggauuaccagaucggguauauuugcuccggaguguucggugacaacccacgcccgaaggauggcgaggggucuuguaaucccgugacugucgacggagccgacggcguuaaagguuuuagcuaccgauaugggaacggcguguggaucggaagaacaaagucaaauaggcuccggaaaggcuucgaaaugaucugggauccuaacggguggaccgacacugauagugacuuuuccaugaagcaggauguaguggcuaugacagacuggagcggauacucugguucauucguccagcacccagaguuaaccggccuggauugcaugcgucccuguuuuuggguggaacuuguucgcggguugccuagagagaauacgaccauuuggacaaguggaagcuccauaucuuucugcggcgugaacucggaaacugccgacuggagcuggccagauggugcagagcugcccuucaccaucgacaaauga

SEQ ID NO: 143016 - RNA, 1413 nt, Artificial Sequence
  derived and/or modified CDS sequence (opt3) from neuraminidase__InfluenzaA__ABE12035
augaaccccaaucagaagaucauuaccauaggcagcaucuccauugccaucgggauuaucucucugauacuccaaaucggaaacauuaucucaauuugggcuagucacagcauccagacagguucccagaaucauacuggcauaugcaaccagagaauuaucacguacgaaaauucuaccugggugaaccaaacauaugucaauauuaacaauacuaacguuguggcagggaaagacaagaccucgaugacacuugccggaaauucaagccuguguccuaucaggggcugggcgaucuacaccaaagauaacaguauucggauagguuccaagggggacguauucgugauccgcgagccauuuauuucuugcagccacuuggagugucgaacuuucuuuuuaacacagggagcucugcuaaaugauaaacauuccaacggcaccgucaaggaccguucaccguauagagcccucaugaguugcccccugggcgaagcaccuagcccauacaauucuagguucgaguccguggccuggucagcuagcgcaugucacgaugggcuuggauggcugacgaucgguauaaguggccccgacaacggggccguugcuguguugaaguauaacggaauuaucacugaaaccaucaaaucuuggaagaaacggauucuccgcacacaggaguccgagugcgucuguaugaauggcagcugcuuuacuaucaugaccgaugguccuucgaacggggccgcgucuuacagaauuuucaagauagaaaaaggaagggugacaaaguccaucgagcuggacgcaccaaauuaucauuacgaagaguguucaugcuaccccgauaccggcacgguaauguguguuugccgggacaacuggcacggcaguaaucgcccuugggugagcuuuaaccagaaucuggauuaucaaauuggguacaucugcuccggagucuucggugacaacccacgaccgaaggauggcgaggggucuuguaaucccgugacuguggacggagccgacggcgucaaagguuuuagcuauagauacgggaacggcguuuggaucggaaggacaaagucaaaucggcuccguaaaggcuucgaaaugauuugggauccuaacggguggaccgacacugauagugacuuuuccaugaagcaggauauaguggcuaugacagacuggagcggauauucugguucauucguacagcacccagaguuaaccggccuggauugcaugcgccccuguuuuuggguggaacuugucagaggguugccuagggagaauacgaccaucuggacaaguggaagcuccauuucuuucugcggcgugaacucggacacugccaauuggagcuggccagauggugcagaacugcccuucaccaucgacaaauga

SEQ ID NO: 143017 - RNA, 1410 nt, Artificial Sequence; identical to SEQ ID NO: 142778
  derived and/or modified CDS sequence (opt3) from neuraminidase__InfluenzaA__ABE12094

SEQ ID NO: 143018 - RNA, 1410 nt, Artificial Sequence; identical to SEQ ID NO: 142910
  derived and/or modified CDS sequence (opt3) from neuraminidase__InfluenzaA__ABE12126

SEQ ID NO: 143019 - RNA, 1413 nt, Artificial Sequence; identical to SEQ ID NO: 142444
  derived and/or modified CDS sequence (opt3) from neuraminidase__InfluenzaA__ABE12263

SEQ ID NO: 143020 - RNA, 1410 nt, Artificial Sequence
  derived and/or modified CDS sequence (opt3) from neuraminidase__InfluenzaA__ABE12626
augaaccccaaucagaagaucauuaccauaggcagcgugucccugacaaucgccacuauuugcuuccucaugcaaaucgcuauucuugucacgaccguuacacugcacuuuaaacaguacgagugugacucuccugcaaacaaucaggugaugccaugcgaaccgaucauaaucgagagaaacauuacugaaaucguauauuugaccaauacaaccauugagaaggaaaucugucccaaauuaguggaguacaggaaguggucaaaaccucagugcaagauaacuggguucgccccauuuaguaaggauaacagcauucggcuguccgcgggaggugacaucugggucacacgcgagcccuaugugucuugugauccuggcaaaugcuaccaauucgcucuagggcagggaaccacgcucgacaauaagcauucgaacgauacuauucacgaccgaaucccacaucguacccugcuuaugaaugaacugggcguucccuuucacuuggguacaagacagguguguaucgccuggucaagcaguuccugccaugaugggaaagcauggcuccacgucugugugacuggagacgauaagaacgccaccgcuucuuucauuuaugacggcaggcugguagauagcauaggcuccuggucacagaauauccugcggacacaagagagugaaugcguuuguauuaacgggaccugcacgguggucaugacugacggaagcgcaucuggucgcgccgauacaagaauccucuuuauagaggagggcaaaauugugcacaucuccccuuuaucagggagcgcucagcauguggaagagugcaguuguuacccaagguauccgggaguccggugcaucugucgcgacaauuggaagggcucuaaccgacccguuguggacauuaauguaaaggauuacuccaucgacagcucguacgugugcucuggucuggucggggauaccccuagaaacaacgacagguccucaaauaguuauugucggaacccaaauaacgaacguggaaaucacggcgugaaaggcugggccuucgaugacgggaacgauguuuggaugggacgcacuauuagcaaggacuccagaucugguuacgagacauuuaaagugauaggcggguggagcacccccaauucaaagagucagaucaacaggcaggucauuguggauuccgacaaucggagcggauauucuggcaucuucucaguagaagguaaaaguugcaucaaccgauguuuuuacguugagcuuauucgcgggagagagcaagaaacgagggugugguggaccagcaauuccauagucguguucugcggcacaucuggaacuuauggcaccgggucguggccugauggagcggacaucaacuugaugccaauuuga

SEQ ID NO: 143021 - RNA, 1410 nt, Artificial Sequence
  derived and/or modified CDS sequence (opt3) from neuraminidase__InfluenzaA__ABE12650
augaaccccaaucagaagaucauuaccauaggcagcgugucccugacaaucgccacuauuugcuuccucaugcaaaucgcuauucuugucacgaccguuacacugcacuuuaaacaguacgaguguaacucuccuccaaauaaccaggugauguugugcgaaccgacuaucauagagagaaauaucaccgaaauuguauauuuaacaaacaccacuaucgagaaggaaauuugucccaaacuggcagaguacaggaauuggucaaagccucagugcaaaaucacaggguucgccccauuuaguaaggacaacagcauacggcuauccgcgggaggugauauuugggugacccgcgagcccuaugucucuugugacccugauaagugcuaccaauucgcucucggccaggggacgacucugaauaaccgacauucgaaugacaccgugcacgaucguacaccauauagaacucuucugaugaacgaauugggaguucccuuucaucucggcaccaaacagguguguaucgccuggucaagcaguuccugccacgacgguaaggcauggcugcaugucugugugacagggcacgaugagaaugccaccgcuucuuucauuuacgacggaaggcugguagauagcaucggcuccuggaguaaaaagauccuccggacgcaggaaucagagugcguuuguauuaacggcacuugcacaguggucaugaccgacgggagcgcaucuggacgcgccgauacuaaaauauuauuuaucaaggaggguaagauugugcacaucuccccucugcuuggcucagcucaacauguggaagagugcagcuguuauccaagauacccgggggucaggugcguuugucgggacaauuggaaaggaaguaaccgccccauaguggauauuaacguaaaggacuacucuaucguguccagcuaugucugcucgggcuuggugggugacacaccucggaaaaaugauucuuccucaaguagccacugucugaacccaaauaacgaagaagggggacauggcguuaagggcugggccuucgacgaugggaaugacguguggaugggaagaaccaucuccgagaaacuaaggucugguuacgagacguuuaaggucauugagggcuggagcaaacccaacucaaagcuccagaucaaucgacaggugauuguagaucgugggaaccgcaguggauauuccggcauauucagcguugaagguaagucuugcaucaauagauguuuuuacguggagcugauuagggggcggaaacaggaaaccgaggucugguggacaucaaacaguaucguggucuucugcggcacuagcggaaccuauggcacaggguccuggccugacggagcggauaucaaucuuaugccaauuuga

SEQ ID NO: 143022 - RNA, 1410 nt, Artificial Sequence
  derived and/or modified CDS sequence (opt3) from neuraminidase__InfluenzaA__ABE13095
augaaccccaaucagaagaucauuaccauaggcagcgugucccugacaaucacuacgauuugcuuccucaugcaaaucgccauucuugucaucaccguuacacugcacuuuaaacagugugagugcaacucuccuccaaauaaccaggugauguugugugaaccgacuauaaucgagagaaauauuaccgaaaucguauacuuaacaaacaccacuauugagaaggaaaucugccccaaacuggcugaguauaggaauuggucaaagccucaguguaaaauaacaggguucgcaccauuuaguaaggacaacagcauucggcuauccgccggaggugauaucugggugacccgcgagcccuacgucucuugcgacccuggcaaguguuaucaauucgcgcucgggcagggaacgacucugaauaaccgacauucgaaugauaccgugcacgaccguacaccauacagaacucuucugaugaacgaauugggcguucccuuucaucucgguaccaaacaggugugcauugcuuggucaagcaguuccugucacgaugggaaggccuggcugcaugucugcgugacaggacacaaugagaacgcaaccgccucuuucaucuaugacggcaggcugguagauagcaucggcuccuggaguaaaaauauucuccggacgcaggaaucagaguguguuugcauaaacgggacuugcacaguggucaugaccgacggaagcgcuucuggucgcgcagauacuaagaucuuauuuauugaggaaggcaaaaucgugcacauauccccucugucagggagcgcccaacauguggaggaauguaguugcuacccaagauauccgggagucagguguguuugccgggacaacuggaagggcucuaaucgccccauuguggauaucaacguaaaggacuacuccaucgugagcucguacgucuguucuggucuugugggggauacaccucggaaaaaugacggauccucaaguagcuauugcuuggacccaaacaaugaggaaggcggccacgggguuaagggaugggcuuucgaugacgguaacgauguguggaugggcagaaccauuuccgagaaacugaggucuggguacgagacguuuaaggucaucggaggcuggagcaaacccaauucaaagcuacagauuaaccgacaggugauaguagacaaagguaaucguaguggguauuccggcaucuucagcguugaaggaaagucuuguauuaaccgcugcuuuuacguggagcucaucagaggcaggaagcaggaaaccgaggucugguggacaucaaauaguaucguggucuucugugggacuagcggaaccuaugguacaggcuccuggccugauggggccgacauuaaccugaugccaauauga

SEQ ID NO: 143023 - RNA, 1410 nt, Artificial Sequence; identical to SEQ ID NO: 142174
  derived and/or modified CDS sequence (opt3) from neuraminidase__InfluenzaA__ABE13332

SEQ ID NO: 143024 - RNA, 1410 nt, Artificial Sequence; identical to SEQ ID NO: 142174
  derived and/or modified CDS sequence (opt3) from neuraminidase__InfluenzaA__ABE13558

SEQ ID NO: 143025 - RNA, 1410 nt, Artificial Sequence
  derived and/or modified CDS sequence (opt3) from neuraminidase__InfluenzaA__ABE13642
augaaccccaaucagaagaucauuaccauaggcagcgugucccugacaaucgccacuauuugcuuccucaugcaaaucgcuauucuugucacgaccguuacacugcacuuuaaacaguacgaguguaacucuccuccaaauaaccaggugauguugugcgaaccgacuaucauagagagaaauaucaccgaaauuguauauuuaacaaacaccacuaucgagaaggaaauuugucccaaacuggcagaguacaggaauuggucaaagccucagugcaaaaucacaggguucgccccauuuaguaaggacaacagcauacggcuauccgcgggaggugauauuugggugacccgcgagcccuaugucucuugugacccuggcaagugcuaccaauucgcucucgggcagggaacgacucugaauaaccgacauucgaaugauaccgugcacgaacguacaccauauagaacucuucugaugaacgaguugggcguucccuuucaucucgguaccaaacagguguguaucgccuggucaagcaguuccugccacgacgggaaggcauggcugcaugucugugugacaggacacgaugaaaaugccaccgcuucuuucauuuacaacggcaggcugguagacagcaucggcuccuggaguaaaaauauccuccggacgcaggagucagagugcguuuguauuaacgggacuugcacaguggucaugaccgauggaagcgcaucuggucgcgccgacacuaagauauuauuuaucgaagagggcaaaauugugcacaucuccccucugucagggagcgcucaacauguggaagagugcaguuguuauccaagauacccgggagucaggugcguuugucgggauaacuggaagggcucuaaucgccccauaguggacauuaacguaaaggauuacuccaucgugagcucguaugucugcucuggucuugugggggacacaccucggaaaaaugauuccucaaguagcucccacuguuugaacccaaauaacgaagagggaggccauggcguuaaggggugggccuucgacgacggaaaugauguguggauggguagaaccaucucugagaaacugaggagcggcuacgaaacguuuaaggucauugggggauggucaaaacccaacaguaagcuacagaucaaucgacaggugauuguagaccguggcaaccgcuccgguuauagcgggauauucucuguugagggcaaaucaugcaucaauagauguuuuuacguggaacucauuaggggacggaagcaggagaccgaagucugguggacaaguaacagcaucguggucuucugcggcacuuccgggaccuauggaacagguucuuggccugauggcgcggacaucaaucugaugccaauuuga

SEQ ID NO: 143026 - RNA, 1410 nt, Artificial Sequence
  derived and/or modified CDS sequence (opt3) from neuraminidase__InfluenzaA__ABE13668
augaaccccaaucagaagaucauuaccauaggcagcgugucccugacaaucgccacuauuugcuuccucaugcaaaucgcuauucuugucacgaccguuacacugcacuuuaaacaguacgaguguaacucuccuccaaauaaccaggugauguugugcgaaccgacuaucauagagagaaauaucaccgaaauuguauauuuaacaaacaccacuaucgagaaggaaauuugucccaaacuggcagaguacaggaauuggucaaagccucagugcaaaaucacaggguucgccccauuuaguaaggacaacagcauacggcuauccgcgggaggugauauuugggugacccgcgagcccuaugucucuugugacccuggcaagugcuaccaauucgcucucgggcagggaacgacucugaauaaccgacauucgaaugauaccgugcacgaccguacaccauauagaacucuucugaugaacgaauugggcguucccuuucaucucgguaccaaacagguguguaucgccuggucaagcaguuccugccacgaugggaaggcauggcugcaugucugugugacaggacacgacgagaaugccaccgcuucuuucauuuacgauggcaggcugguagacagcaucggcuccuggaguaaaaacauccuccggacgcaggaaucagagugcguuuguauuaaugggacuugcacaguggucaugaccgauggaagcgcaucuggucgcgccgacacuaagauauuauuuaucgaggaaggcaaaauugugcacaucuccccucugucagggagcgcucaacauguggaggaaugcaguuguuauccaagauacccgggagucaggugcguuugucgggauaacuggaagggcucuaaccgccccauaguggacauuaauguaaaggauuacuccaucgugagcucguaugucugcucuggucuugugggggacacaccucggaaaaacgacuccucaaguagcucccacuguuugaauccaaacaaugaggaaggaggccauggcguuaaggggugggccuucgaugacggaaacgauguguggauggguagaaccaucucugagaaacugaggagcggcuacgagacguuuaaggucauugggggauggucaaaacccaauaguaagcuacagaucaaccgacaggugauuguagaccguggcaaucgcuccgguuauagcgggauauucucuguugaaggcaaaucaugcaucaacagauguuuuuacguggagcucauuaggggacggaagcaggaaaccgaggucugguggacaaguaauagcaucguggucuucugcggcacuuccgggaccuauggaacagguucuuggccugauggcgcggacaucaaccugaugccaauuuga

SEQ ID NO: 143027 - RNA, 1410 nt, Artificial Sequence
  derived and/or modified CDS sequence (opt3) from neuraminidase__InfluenzaA__ABE13836
augaaccccaaucagaagaucauuaccauaggcagcgugucccugacaaucgccacuauuugcuuccucaugcaaaucgcuauucuugucacgaccguuacacugcacuuuaaacaguacgaguguaacucuuugccuaauaaccaggugauguuaugcgaaccaacuaucauagagagaaauaucaccgaaauuguauaucugacaaacaccacuaucgagaaggaaauuuguccgaaacuagcagaguacaggaauuggucaaagccccagugcaaaaucacaggguucgccccuuuuaguaaggacaacagcauacggcucuccgcgggaggugauauuugggugacccgcgagccauaugucucuugugaccccggcaagugcuaccaauucgcucuggggcagggaacgacucuuaauaaccgacauucgaaugauaccgugcacgaccguacaccuuauagaacucuguugaugaacgaacucggcguuccauuucaucuggguaccaaacagguguguaucgccuggucaagcaguuccugccacgaugggaaggcauggcugcaugucugugugacaggacacgacgagaaugccaccgcuucuuucauuuacgauggcaggcucguagacagcaucggcuccugguccaaaaacaucuuacggacgcaggaaagugagugcguuuguauuaaugggacuugcacaguggucaugaccgauggaagcgcaucuggucgcgccgacacuaagauacuguuuaucgaggaaggcaaaauugugcacaucucaccccuuucagggagcgcucaacauguggaggaaugcaguuguuauccuagauacccaggagucaggugcguuugucgggauaacuggaagggcucuaaccgcccgauaguggacauuaauguaaaggauuacuccaucgugagcucguaugucugcucugguuuggugggggacacaccccggaaaaacgacuccucaaguagcucccacugucugaauccuaacaaugaggaaggaggccauggcguuaaggggugggccuucgaugacggaaacgauguguggauggguagaaccaucucugagaaacuaaggagcggcuacgagacguuuaaggucauugggggauggucaaaaccaaauaguaagcuccagaucaaccgacaggugauuguagaccguggcaaucgcuccgguuauagcgggauauucucuguugaaggcaaaucaugcaucaacagauguuuuuacguggagcugauuaggggacggaagcaggaaaccgaggucugguggacaaguaauagcaucguggucuucugcggcacuuccgggaccuauggaacagguucuuggcccgauggcgcggacaucaaccuuaugccuauuuga

SEQ ID NO: 143028 - RNA, 1410 nt, Artificial Sequence
  derived and/or modified CDS sequence (opt3) from neuraminidase__InfluenzaA__ABE14033
augaaccccaaucagaagaucauuaccauaggcagcgugucccugacaaucgccacuauuugcuuccucaugcaaaucgcuauucuugucacgaccguuacacugcacuuuaaacaguacgaguguaacucuccuccaaauaaccaggugauguugugcgaaccgacuaucauagagagaaauaucaccgaaauuguauauuuaacaaacaccacuaucgagaaggaaauuugucccaaacuggcagaguacaggaauuggucaaagccucagugcaaaaucacaggguucgccccauuuaguaaggacaacagcauacggcuauccgcgggaggugauauuugggugacccgcgagcccuaugucucuugugacccuggcaagugcuaccaauucgcucucgggcagggaacgacucugaauaaccgacauucgaaugauaccgugcacgaccguacaccauauagaacucuucugaugaacgaauugggcguucccuuucaucucgguaccaaacagguguguaucgccuggucaagcaguuccugccacgaugggaaggcauggcugcaugucugugugacaggacacgacgagaaugccaccgcuucuuucauuuacgauggcaggcugguagacagcaucggcuccuggaguaaaaacauccuccggacgcaggaaucagagugcguuuguauuaaugggacuugcacaguggucaugaccgauggaagcgcaucuggucgcgccgacacuaagauauuauuuaucgaggaaggcaaaauugugcacaucuccccucugucagggagcgcucaacauguggaggaaugcaguuguuauccaagauacccgggagucaggugcguuugucgggauaacuggaagggcucuaaccgccccauaguggacauuaauguaaaggauuacuccaucgugagcucguaugucugcucuggucuugugggggacacaccucggaaaaacgacuccucaaguagcuccuacuguuugaauccaaacaaugaggaaggaggccacggcguuaaggggugggccuucgaugacggaaacgauguguggauggguagaaccaucucugagaaacugaggagcggcuaugagacguuuaaggucauugggggauggucaaaacccaauaguaagcuacagaucaaccgacaggugauuguagaccguggcaaucgcuccgguuacagcgggauauucucuguugaaggcaaaucaugcaucaacagauguuuuuauguggagcucauuaggggacggaagcaggaaaccgaggucugguggacaaguaauagcaucguggucuucugcggcacuuccgggaccuacggaacagguucuuggccugauggcgcggacaucaaccugaugccaauuuga

SEQ ID NO: 143029 - RNA, 1410 nt, Artificial Sequence
  derived and/or modified CDS sequence (opt3) from neuraminidase__InfluenzaA__ABE14055
augaaccccaaucagaagaucauuaccauaggcagcgugucccugacaaucgccacuauuugcuuccucaugcaaaucgcuauucuugucacgaccguuacacugcacuuuaaacaguacgaguguaacucuccuccaaauaaccaggugauguugugcgaaccgacuaucauagagagaaauaucaccgaaauuguauauuuaacaaacaccacuaucgagaaggaaauuugucccaaacuggcagaguacaggaauuggucaaagccucagugcaaaaucacaggguucgccccauuuaguaaggacaacagcauacggcuauccgcgggaggugauauuugggugacccgcgagcccuaugucucuugugacccugauaagugcuaccaauucgcucucggccaggggacgacucugaauaaccgacauucgaaugacaccgugcacgaucguacaccauauagaacucuucugaugaacgaauugggaguucccuuucaucucggcaccaaacagguguguaucgccuggucaagcaguuccugccacgacgguaaggcauggcugcaugucugugugacagggcacgaugagaaugccaccgcuucuuucauuuacgacggaaggcugguagauagcaucuccucauggaguaaaaacauccuccggacgcaggaaagcgagugcguuuguauuaauggcacuugcacaguggucaugaccgacgggucuuccucaggccgcgcagauacuaagauauuauuuaucgaggaaggaaaaauugugcacaucagcccucugagugguucugcccaacauguggaggaaugcuccuguuauccaagauacccgggcgucaggugcguuugucgggacaacuggaaggggagcaaccgccccauaguggauauuaauguaaaggacuacucgaucgugucuuccuaugucugcucaggacuugugggcgacacaccucggaaaaacgauaguagcuccucuagcuacuguuugaauccaaacaaugaggaaggugggcacggaguuaagggcugggcuuucgacgauggcaacgacguguggauggggagaaccaucucagagaaacugaggaguggauaugagacguuuaaggucauugguggcugguccaaacccaauagcaagcuacagaucaaccgacaggugauuguagaucgugggaaucgcucuggauacucaggcauauucaguguugaagguaaaagcugcgugaacagauguuuuuaugucgagcucaucagggggcggaagcaggaaaccgaggugugguggacauccaauucuauugucguguucugcggcacuucgggaaccuacggcacagggagcuggccugacggagccgauaucaaccugaugccaaucuga

SEQ ID NO: 143030 - RNA, 1410 nt, Artificial Sequence
  derived and/or modified CDS sequence (opt3) from neuraminidase__InfluenzaA__ABE14857
augaaccccaaucagaagaucauuaccauaggcagcgugucccugacaaucgccacuauuugcuuccucaugcaaaucgcuauucuugucacgaccguuacacugcacuuuaaacaguacgaguguaacucuccuccaaauaaccaggugauguugugcgaaccgacuaucauagagagaaauaccacagaaaucguauauuuaaccaacacuacaauugagaaggaaaucugucccaaacuggcagaguacaggaauuggucaaagccucagugcaaaauuaccggguucgccccauuuaguaaggacaacagcauccggcuauccgcgggaggugauauaugggugacgcgcgagcccuaugucucuugugacccuggcaagugcuaccaauucgcucucgggcagggaacuacccugaauaaccgacauucgaaugauacagugcacgaccguacuccauauagaacccuucugaugaacgaauugggcguucccuuucaucucgguacaaaacagguguguauugccuggucaagcaguuccugccacgaugggaaggcauggcugcaugucugugugaccggacacgacgagaaugccacggcuucuuucaucuacgauggcaggcugguagacagcauuggcuccuggaguaaaaacauccuccggacucaggaaagugagugcguuuguaucaaugggacaugcaccguggucaugacugauggaagcgcaucuggucgcgccgacacaaagauuuuauuuauagaggaaggcaaaaucgugcacauuuccccucugucagggagcgcucaacauguggaggaaugcaguuguuauccaagauacccgggagucaggugcguuugucgggauaacuggaagggcucuaaccgccccaucguggacauaaauguaaaggauuacuccauugugagcucguaugucugcucuggucuugugggggacaccccucggaaaaacgacuccucaaguagcuccuacuguuugaauccaaacaaugaggaaggaggccacggcguuaaggggugggccuucgaugacggaaacgauguguggauggguagaacgaucucugagaaacugaggagcggcuaugagaccuuuaaggucaucgggggauggucaaaacccaauaguaagcuacagauuaaccgacaggugaucguagaccguggcaaucgcuccgguuacagcgggauuuucucuguugaaggcaaaucaugcauaaacagauguuuuuauguggagcucaucaggggacggaagcaggaaacagaggucugguggacuucaaauagcauuguggucuucugcggcaccuccgggacauacggaacugguucuuggccugauggcgcggacaucaaccugaugccaaucuga

SEQ ID NO: 143031 - RNA, 1410 nt, Artificial Sequence; identical to SEQ ID NO: 143028
  derived and/or modified CDS sequence (opt3) from neuraminidase__InfluenzaA__ABE15594

SEQ ID NO: 143032 - RNA, 1413 nt, Artificial Sequence
  derived and/or modified CDS sequence (opt3) from neuraminidase__InfluenzaA__ABE26994
augaaccccaaucagaagaucauuaccauaggcagcaucuccauugccaucgggauuaucucucugauacuccaaaucggaaacauuaucucaauuugggcuagucacagcauccagacagguucccagaaucauacuggcauaugcaaccagagaauuaucacguacgaaaauucuaccugggugaaccaaacauaugucaauauuaacaauacuaacguuguggcagggaaagacaagaccucgaugacacuugccggaaauucaagccuguguccuaucaggggcugggcgaucuacaccaaagauaacaguauucggauagguuccaagggggacguauucgugauccgcgagccauuuauuucuugcagccacuuggagugucgaacuuucuuuuuaacacagggagcucugcuaaaugauaaacauuccaacggcaccgucaaggaccguucaccguauagagcccucaugaguugcccccugggcgaagcaccuagcccauacaauucuagguucgaguccguggccuggucagcuagcgcaugucacgaugggcuuggauggcugacgaucgguauaaguggccccgacaacggggccguugcuguguugaaguauaacggaauuaucacugaaaccaucaaaucuuggaagaaacggauucuccgcacacaggaguccgagugcgucuguaugaauggcagcugcuuuacuaucaugaccgaugguccuucgaacggggccgcgucuuacagaauuuucaagauagaaaaaggaagggugacaaaguccaucgagcuggacgcaccaaauuaucauuacgaagaguguucaugcuaccccgauaccggcacgguaauguguguuugccgggacaacuggcacaguagcaaucgcccuuggguguccuuuaaccagaaucuggauuaucaaauuggcuacaucugcucuggggucuucggagacaacccacgaccgaaggauggugagggcagcuguaaucccgugacuguggacggggccgacggagucaaaggcuuuucauauagauacgguaacgggguuuggaucggcaggacaaagaguaaucggcuccguaaaggauucgaaaugauuugggauccuaacggcuggaccgacacugauuccgacuuuagcaugaagcaggauauaguggcuaugacagacuggucuggguauucaggaaguuucguacagcacccagaguuaaccggucuggauugcaugcgccccuguuuuuggguggaacuugucagaggcuugccuagggagaauacgaccaucuggacaagcggguccucuauuucguucugcggagugaacagcgacacugccaauugguccuggccagauggcgcagaacugcccuucaccaucgacaaauga

SEQ ID NO: 143033 - RNA, 1350 nt, Artificial Sequence
  derived and/or modified CDS sequence (opt3) from neuraminidase__InfluenzaA__ABE97641
augaaccccaaucagaagaucauuaccauaggcagcaucugcauggugauugggaucauuucccugaugcuccaaaucggaaacaugauaucuaucugggucucacacaguauucagacauggaaucagcaucaggccgagagcaucuccaacacuaauccucuuacggaaaaagcuguugcaucugugacccuggccgguaacucgucauuguguccaauuagaggcugggcgguacacagcaaggacaauaguaucaggauaggguccaaaggagauguguucgucauucgggagccguuuaucucuugcagccauuuagaaugucgcacauucuuucugacucaaggcgcucuacucaacgacaagcacuccaaugguaccgugaaagaucgaucaccccaucguacacugaugaguugcccuguuggggaggccccaagccccuacaacucuagauucgaauccguggcauggucagccagcgcuugucacgacggaaccaguuggcuuacuauuggcaucucuggcccugauaauggggcagucgccgugcugaaguauaacggaaucauuacagacaccauaaaguccuggaggaauaacaucuugcggacgcaggagagcgagugcgcuuguguaaaugguucgugcuuuacuguuaugaccgauggcccaucuaacgggcaggccuccuacaaaauuuucaagauggaaaaaggaaagguggucaaaucaguggagcucgacgcgcccaacuaucacuacgaagaguguaguugcuauccugaugcaggcgagaucacaugugugugccgcgacaauuggcaugguagcaacagaccauggauauccuuuaaucagaaccuggaauaccaaauuggguauaucugcucuggagucuucggcgauaauccgaggcccaacgacggcacugggagcuguggaccuaugucaccaaauggugccuacggcguuaagggguuuaguuucaaguacggaaacggcguguggaucggucggaccaaauccacaaauagccgcucuggguuugagaugauuugggaucccaacggcuggaucggaaccgacucaaguuucagcguaaagcaggacauuguggcuauaacggauugguccggcuauucugggucguuuguccagcacccugaacugacuggacucgacugcauccgaccauguuucuggguggaguuaauuagagguaggcccaaagaaagcacaaucuggaccuccggcucaaguaucucuuucugcgggguuaauagcgauauuguguccuggucauggccggacggagccgagcugccuuuuacuauagauaaguga

SEQ ID NO: 143034 - RNA, 1350 nt, Artificial Sequence
  derived and/or modified CDS sequence (opt3) from neuraminidase__InfluenzaA__ABE97642
augaaccccaaucagaagaucauuaccauaggcagcaucugcauggugauugggauggucucccugaugcuccaaaucggaaacaugauuucuaucuggcuuucacacaguauacagacagguaaucagcaucaggccgagagcaucuccaacaauaaccuguugacugaaaaugcuguugcaucugugacguuagccggcaacucgucacuguguccuauuagagggugggcgguacacagcaaagacaauaguaucaggauuggauccaagggcgauguguucgucauccgggagccauuuauaucuugcagccaucuagaaugucgcaccuucuuucucacacaaggugcucugcuuaacgacaaacacuccaaugggacugugaaggaucgaucaccgcaucguacccugaugaguugccccguuggagaggccccuagcccauacaacucuagauucgaauccguggcauggucagccagcgcuugucacgacggcauuaguugguugacaaucggcauuucugggcccgauaauggagcagucgccgugcucaaauauaacgguaucaucaccgacacuauuaaguccuggaggaauaacauacugcggacacaggagagcgagugcgcuuguguaaacggcucgugcuuuaccguuaugacggaugggccuucuaauggacaggccuccuacaagaucuucaaaauggaaaagggcaaaguggucaagucaguggagcuggacgcgccaaacuaucacuacgaagaguguaguugcuaucccgaugccggugagauuacuugugugugccgcgacaauuggcaugggagcaacagaccuugggucuccuuuaaucagaaccucgaauaccaaaucggauauauaugcucuggcguuuucggcgauaauccaaggccgaacgacgggaccggaagcuguggucccaugucaccuaauggcgcauacggggugaaaggauuuaguuucaaguacggcaacgguguauggauugggcggacaaaguccacuaauagccgcucuggcuuugagaugaucugggauccaaacggauggaccggcacagacucaaguuucagcgugaaacaggacaucgucgcuauuaccgauugguccggguauucuggaucguuugugcagcaccccgaauuaacgggucuggacugcauccgaccuuguuucuggguugagcuuauuagaggcaggccaaaggaaagcacuauauggacauccgggucaaguaucucuuucugcggagugaauggcgauaccgucagcugguccuggcccgacggugccgaguugccguuuauuaucgauaaauga

SEQ ID NO: 143035 - RNA, 1350 nt, Artificial Sequence
  derived and/or modified CDS sequence (opt3) from neuraminidase__InfluenzaA__ABE97644
augaaccccaaucagaagaucauuaccauaggcagcaucugcauggugauugggaucgucucccugaugcuccaaauuggaaacaugaucucuauauggguuucacacaguauccagacagguaaucagcaucaggccgagagcauuuccaacacuaauccucuuacggaaaaagcuguggcaucuguaacccuggccggcaacucgucauuguguccaaucagagggugggcggugcacagcaaggacaauaacauuaggaucggaaguaaaggcgaugucuucgugauacgggagccguuuauuuccugcucucauuuagaaugucgcacauucuuucugacucaaggugcucuacucaaugacaagcacagcaacgggaccguuaaagaucgaucaccccaucguacacugauguccugcccugugggagaggccccaagucccuacaauagcagauucgaaucugucgcaugguccgccucagcuugucacgacggcaccagcuggcuuacuaucggcauuagugggccugauaacggagcaguggccguacugaaguauaaugguaucaucacagacaccauuaagucuuggaggaacaauauauugcggacgcaggaguccgagugcgcuuguguuaacggcagcugcuuuacugugaugaccgaugggccaucgaacggacaggccucuuacaaaaucuucaagauggaaaaaggcaaggucgugaaauccguggagcucgacgcgcccaauuaucacuacgaagaguguucaugcuauccugaugccggugagauuacaugugucugccgcgacaacuggcaugggaguaauagaccauggguuagcuuuaaccagaaucuggaauaccaaaucggauauauaugcuccggcguguucggcgauaacccgaggcccaaugacgggacuggaucuugugguccuaugagcccaaacggcgcauacgggguaaagggauuuucauucaaguacggcaaugguguguggauugggcggaccaaaaguacaaacucccgcagcggcuuugagaugaucugggaucccaauggauggaccggcacggacucuucauucagugucaagcaggacaucguggcucugacugauuggagcggguauuccggaucuuuuguucagcacccugaacucacagguuuagacugcauucgaccauguuucuggguggagcugaucagaggcaggcccaaagaaucgaccauuuggacuagcggguccucaauaaguuucugcggagucaacucugauacagugagcugguccuggccggacggcgccgagcuuccuuuuaccaucgauaaguga

SEQ ID NO: 143036 - RNA, 1350 nt, Artificial Sequence
  derived and/or modified CDS sequence (opt3) from neuraminidase__InfluenzaA__ABE97645
augaaccccaaucagaagaucauuaccauaggcagcaucugcauggugauugggacagucucccugaugcuccaaaucggaaacaugauuucuaucuggguuucacacaguauacagacugguaaucagcaucaggccgagccuacgagcuccaccaacccacuuacagaaaaagcuguggcaucuguaacucuggccggcaauucgucauuguguccgaucagagggugggcgauucacagcaaggacaacaguaucaggauuggauccaaaggcgauguguucgucauccgggagcccuuuauaucuugcagccauuuagaaugucgcaccuucuuucugacacaaggugcucuacucaaugacaagcacuccaacgggaccgugaaagaucgaucaccucaucguacucugaugaguugcccaguuggagaggcccccagcccuuacaauucuagauucgaauccguggcauggucagccagcgcuugucacgacggcacaaguuggcuuaccauuggcaucucugggccagauaacggagcagucgccgugcugaaguauaaugguauuaucacggacacuaucaaguccuggaggaacaauauuuugcggacccaggagagcgagugcgcuuguguaaacggcucgugcuuuacaguuaugacugaugggcccucuaauggacaggccuccuacaaaauauucaagauggaaaaaggcaagguggucaaaucaguggagcucgacgcgccuaacuaucacuacgaagaguguaguugcuauccagaugccggugagaucaccugugugugccgcgacaacuggcaugggagcaauagaccgugggucuccuuuaaccagaaucuggaauaccaaauuggauauaucugcucuggcguuuucggcgauaaccccaggccuaaugacgggacaggaagcugugguccaaugucacccaacggcgcauacggggugaagggauuugcuuucaaguacggcaaugguguauggauagggcggaccaaaaguacgaacucccgcagcggcuuugagaugauuugggauccuaauggauggacuggcccagacucuucauucagugugaagcaggacaucgucgccaucacagauuggagcggguauuccggaucuuuugugcagcaccccgaacugaccggucucgacugcauucgaccguguuucuggguugaguuaaucagaggcaggccuaaagaaucgacuauuuggacaagcggguccucaauaaguuucugcggagugaacucugauaccgucagcugguccuggcccgacggcgcagagcugccauuuacgaucgauaaguga

SEQ ID NO: 143037 - RNA, 1350 nt, Artificial Sequence
  derived and/or modified CDS sequence (opt3) from neuraminidase__InfluenzaA__ABE97646
augaaccccaaucagaagaucauuaccauaggcagcaucugcauggugauugggaucgucucccugaugcuccaaauuggaaacaugaucucuauauggguuucacacaguauccagacagagaaucagcaucaggccgaaagcauuuccaacacuaauccuccaacggagaaagcuguggcaucuguaacccuugccgguaacucgucacuguguccgaucagaggcugggcggugcacagcaaggacaauaguauuaggaucggguccaaaggagaugucuucgugauacgggaacccuuuauuucuugcagccauuuggagugucgcacauucuuuuuaacucaaggcgcucugcuaaacgacaagcacuccaaugguaccguuaaagaucgaucaccucaucguacacucaugaguugcccagugggggaagcccccagcccuuacaacucuagauucgaguccgucgcauggucagccagcgcuugucacgacggaaccaguuggcugacuaucggcauuucuggcccagauaauggggcaguggccguacuuaaguauaacggaaucaucacagacaccauuaaguccuggaggaauaacacgcugcggacucaggagagcgaaugcgcuuguguuaaugguucgugcuuuaccgugaugacagauggccccucuaacgggcaggccuccuacaaaauauucaagauggagaaaggaaaggucgugaaaucaguggaauuggacgcgccuaacuaucacuacgaggaguguaguugcuauccagaugcaggcgaaaucacuugugucugccgcgacaauuggcaugguagcaacagaccguggguuuccuuuaaucagaaccucgaguaccaaauuggguauaucugcucuggaguguucggcgauaaucccaggccuaacgacggcaccgggagcuguggaccaaugucacccaauggugccuacggcguaaagggguuuaguuucaaguacggaaacggcguguggauaggucggacaaaauccaccaauagccgcucuggguuugaaaugauuugggauccuaacggcuggacgggaacugacucaaguuucagcgucaagcaggacaucguguccaucacagauuggucuggcuauucggggagcuuuguucagcacccagagcugaccggacuggacugcauucgacccuguuucuggguggaacucaucagagguaggccgaaagaguccacuauuuggacaucaggcaguucuaucagcuucugcggggucaauuccgauaccgugucauggagcuggccugacggagcugaguuacccuuuacgauagauaaguga

SEQ ID NO: 143038 - RNA, 1350 nt, Artificial Sequence
  derived and/or modified CDS sequence (opt3) from neuraminidase__InfluenzaA__ABE97647
augaaccccaaucagaagaucauuaccauaggcagcaucugcauggugauugggaucgucucccugaugcuccaaauuggaaacaugaucucuauauggguuucacacaguauccagacagguaaucagcauagagccgagagcauuuccaacacuaauccucuuacggaaaaagcuguggcaucuguaacccuggccggcaacucgucauuguguccaaucagggggugggcggugcacagcaaggacaauaacauucggaucggaaguaaaggcgaugucuucgugauacgcgagccguuuauuuccugcucucauuuagaaugucgaacauucuuucugacucagggugcucuacucaaugacaagcacagcaacgggaccguuaaagaucguucaccccauagaacacugauguccugcccugugggagaggccccaagucccuacaauagcagguucgaaucugucgcaugguccgccucagcuugucacgacggcaccagcuggcuuacuaucggcauuagugggccugauaacggagcaguggccguacugaaguauaaugguaucaucacagacaccauuaagucuuggcggaacaauauauugcgcacgcaagaguccgagugcgcuuguguuaacggcagcugcuuuacugugaugaccgaugggccaucgaacggacaggccucuuacaaaaucuucaagauggaaaaaggcaaggucgugaaauccguggagcucgacgcgcccaauuaucacuacgaagaguguucaugcuauccugaugccggugagauuacaugugucugcagagacaacuggcaugggaguaauaggccauggguuagcuuuaaccagaaucuggaauaccagaucggauauauaugcuccggcguguucggcgauaacccgcggcccaaugacgggacuggaucuugugguccuaugagcccaaacggcgcauacgggguaaagggauuuucauucaaguacggcaaugguguguggauugggcgcaccaaaaguacaaacucccgaagcggcuuugagaugaucugggaucccaauggauggaccggcacggacucuucauucagugucaagcaagacaucguggcuauuacugauuggagcggguauuccggaucuuuuguucagcacccugaacugacaggucucgacugcaucagaccauguuucuggguggaguuaauuaggggccggcccaaagaaucgaccauauggacuagcggguccucaaucaguuucugcggagucaacucugauacagugagcugguccuggccggacggcgccgagcugccuuuuaccauugauaaguga

SEQ ID NO: 143039 - RNA, 1350 nt, Artificial Sequence
  derived and/or modified CDS sequence (opt3) from neuraminidase__InfluenzaA__ABE97649
augaaccccaaucagaagaucauuaccauaggcagcaucugcauggugauugggaucgucucccugaugcuccaaauuggaaacaugaucucuauauggguuucacacaguauccagacagguaaucagcaucaggccgagagcauuuccaacacuaauccucuuacggaaaaagcuguggcaucuguaacccuggccggcaacucgucauuguguccaaucagagggugggcggugcacagcaaggacaauaguauuaggaucggauccaaaggcgaugucuucgugauacgggagccguuuauuucuugcagccauuuagaaugucgcacauucuuucugacucaaggugcucuacucaacgacaagcacuccaaugggaccguuaaagaucgaucaccccaucguacacugaugaguugcccugugggagaggccccaagccccuacaacucuagauucgaauccgucgcauggucagccagcgcuugucacgacggcaccaguuggcuuacuaucggcauuucugggccugauaauggagcaguggccguacugaaguauaacgguaucaucacagacaccauuaaguccuggaggaauaacauauugcggacgcaggagagcgagugcgcuuguguuaauggcucgugcuuuacugugaugaccgaugggccaucuaacggacaggccuccuacaaaaucuucaagauggaaaaaggcaaggucgugaaaucaguggagcucgacgcgcccaacuaucacuacgaagaguguaguugcuauccugaugccggugagauuacaugugucugccgcgacaauuggcaugggagcaacagaccauggguuuccuuuaaucagaaccuggaauaccaaaucggauauauaugcucuggcguguucggcgauaauccgaggcccaacgacgggacuggaagcugugguccuaugucaccaaauggcgcauacgggguaaagggauuuaguuucaaguacggcaacgguguguggauugggcggaccaaauccacaaauagccgcucuggcuuugagaugaucugggaucccaacggauggaccggcacggacucaaguuucagcgucaagcaggacaucguggcuauuacugauugguccggguauucuggaucguuuguucagcacccugaacugacaggucucgacugcauccgaccauguuucuggguggaguuaauuagaggcaggcccaaagaaagcaccauauggacuuccgggucaaguaucucuuucugcggagucaauagcgauacaguguccuggucauggccggacggcgccgagcugccuuuuaccauugauaaguga

SEQ ID NO: 143040 - RNA, 1350 nt, Artificial Sequence; identical to SEQ ID NO: 143039
  derived and/or modified CDS sequence (opt3) from neuraminidase__InfluenzaA__ABE97651

SEQ ID NO: 143041 - RNA, 1350 nt, Artificial Sequence; identical to SEQ ID NO: 143039
  derived and/or modified CDS sequence (opt3) from neuraminidase__InfluenzaA__ABE97653

SEQ ID NO: 143042 - RNA, 1350 nt, Artificial Sequence; identical to SEQ ID NO: 143039
  derived and/or modified CDS sequence (opt3) from neuraminidase__InfluenzaA__ABE97654

SEQ ID NO: 143043 - RNA, 1350 nt, Artificial Sequence
  derived and/or modified CDS sequence (opt3) from neuraminidase__InfluenzaA__ABE97655
augaaccccaaucagaagaucauuaccauaggcagcaucugcauggccauugggaucgugucccugaugcuccaaauuggaaacaugaucucuauaugggucucacacaguauccagacagguaaucagcaucaggcugagagcacuuccaacacgaauccucuuaccgaaaaagcaguugccucugugacacuggcgggcaacucgucauuguguccaauuagagggugggcuauccacagcaaggacaauaguauuaggaucggauccaaaggcgauguauucgugauacgggagccguuuauuucuugcagccauuuagaaugucgcacuuucuuucugacccaaggugcccuacucaacgacaagcacuccaaugggacagucaaagaucgaucaccccaucguacccugaugaguugcccugugggagaggcaccaagccccuacaacucuagauucgaauccguugccuggucagcuagcgcaugucacgacggcacaaguuggcuuacuaucggcauuucugggccugauaauggagccguggcuguccugaaguauaacgguaucaucaccgacacgauuaaguccuggaggaauaacauauugcggacucaggagagcgagugcgccugugugaauggcucgugcuuuaccguaaugacagaugggccaucuaacggacaggcguccuacaaaaucuucaagauggaaaaaggcaagguugugaaaucagucgagcucgacgcacccaacuaucacuacgaagaguguaguugcuauccugaugccggugagauuacuugugugugccgcgacaauuggcaugggagcaacagaccauggguguccuuuaaucagaaccuggaauaccaaaucggauauauaugcucuggcgucuucggcgauaauccgaggcccaacgacgggaccggaagcugugguccuaugucaccaaauggcgcuuacgggguuaagggauuugccuucaaguacggcaacgguguguggauugggcggacaaaaaguaccaauucccgcagcggcuuugagaugaucugggaucccaacggauggacgggcccugacucuucauucaguguaaagcaggacaucguggcaauuacugauuggagcggguauuccggaucuuuuguccagcacccagaacugacaggucucgacugcauccgacccuguuucuggguggaguuaauuagaggcaggccgaaagaaucgaccauauggacuagcggguccucaaucaguuucugcggaguuaauucugauacagugagcugguccuggccugacggcgcugagcugcccuuuaccauugauaaguga

SEQ ID NO: 143044 - RNA, 1350 nt, Artificial Sequence
  derived and/or modified CDS sequence (opt3) from neuraminidase__InfluenzaA__ABE97657
augaaccccaaucagaagaucauuaccauaggcagcaucugcauggugauugggacagucucccugguucuccaaaucggaaacaugauuucuaucugggugucacacaguauacagacugguaaucagcaucaggccgagagcaucuccaacacgaauccucuuaccgaaaaagcuguagcaucugugacacuggccggcaacucgucauuguguccaauuagagggugggcgguccacagcaaggacaauaguaucaggauuggauccaaaggcgauguguucguuauccgggagccguuuauaucuugcagccauuuagaaugucgcacuuucuuucugacccaaggugcucuacucaacgacaagcacuccaaugggacagugaaagaucgaucaccccaucguacccugaugaguugcccugucggagaggccccaagccccuacaacucuagauucgaauccguggcauggucagccagcgcuugucacgacggcacuagcuggcuuacaauuggcaucucugggccugauaauggagcaguagccguucugaaguauaacgguauuaucaccgacacgaucaaguccuggagggauaauauuuugcggacucaggagagcgagugcgcuugugugaacggcucgugcuuuaccgucaugacagacgggccaucuaauggacaggccuccuacaaaauauucaagauggaaaaaggcaagguggugaaaucagucgagcucgaugcgcccaacuaucacuacgaagaguguaguugcuauccugacgcaggagagaucacuuguguuugccgcgauaacuggcaugggagcaauagaccauggguguccuuuaaccagaaucuggaauaccaaauuggauauaucugcucuggcguauucggcgacaacccgaggcccaaugaugggaccggaagcugugguccuaugucaaguaacggcgccuacggggugaagggauuuuccuucaaguacggcaauggugucuggauagggcggacaaaaagcaccaacucucgcucaggcuuugagaugauuugggacccaaauggauggacgggcacugacaguagcuucuccgugaagcaggauaucguugcuaucacagacuggucuggguauucggguagcuuugugcagcaccccgaacugaccggucucgauugcauucgaccuuguuucugggucgaguuaaucagaggcaggccaaaagaauccacuauuuggacaucagggaguucuauaaguuucugcggagugaacuccgacaccguaucauggagcuggcccgauggcgccgagcugccguuuacgaucgacaaguga

SEQ ID NO: 143045 - RNA, 1350 nt, Artificial Sequence
  derived and/or modified CDS sequence (opt3) from neuraminidase__InfluenzaA__ABE97658
augaaccccaaucagaagaucauuaccauaggcagcaucugcauggugauugggacaaucucccugaugcuccaaauuggaaacaugaucucuauaugggucucacacaguauccagacugguaaucagcaucagacggagagcauuuccaacaccaauccucuuacagaaaaagccguugcuucugugacucuggcaggcaacucgucauuguguagcaucagagggugggccguacacaguaaggacaauuccauuaggaucggaucuaaaggcgauguguucgucauacgggagccauuuauuagcugcucccauuuagaaugucgcaccuucuuucugacacaaggugcgcuacucaacgacaagcacucaaaugggaccgugaaagaucgaaguccgcaucguacucugaugagcugccccguuggagaggcuccuucuccauacaacuccagauucgaaucaguggccuggagcgcaagugccugucacgacggcacaucuuggcuuaccaucggcauuuccgggcccgauaauggagcugucgcagugcugaaguauaacgguaucaucacggacacuauuaagagcuggagggauaauauauugcggacccaggagucggagugcgccuguguaaacggcucuugcuuuacaguuaugacugacgggccuuccaauggacaggcuucauacaaaaucuucaagauggaaaaaggcaagguggucaaaaguguggagcucgaugccccaaacuaucacuacgaagaguguagcugcuaucccgacgcgggugagauuaccugugugugccgcgauaacuggcauggguccaauagaccuugggucucuuuuaaccagaaucuggaauaccaaaucggauauauaugcagcggcguuuucggcgacaacccaaggccgaaugaugggacaggaucauguggucccaugaguuccaacggcgcacacggggugaagggauuuagcuucaaguacggcaaugguguauggauugggcggaccaaaucuacgaacucacgcaguggcuuugagaugaucugggacccuaauggauggacuggcacagacagcuccuucucugugaagcaggauaucgucgccauuaccgacuggucgggguacagcggauccuuugugcagcauccagaacugacuggucucgauugcauccgacccuguuucuggguugaguuaauuagaggcaggccuaaagaaucaacaauauggaccagugggucuagcaucuccuucugcggagugaacucagacacggucagcuggucuuggccagauggcgcugagcugcccuuuaccauugacaaguga

SEQ ID NO: 143046 - RNA, 1350 nt, Artificial Sequence
  derived and/or modified CDS sequence (opt3) from neuraminidase__InfluenzaA__ABE97659
augaaccccaaucagaagaucauuaccauaggcagcaucugcauggugauugggaucgucucccugaugcuccaaauuggaaacaugaucucuauauggguuucacacaguauccagacagguaaucagcaucaggccgagagcauuuccaacacuaauccucuuacggaaaaagcuguggcaucuguaacccuggccggcaacucgucauuguguccaaucagagggugggcggugcacagcaaggacaauaguauuaggaucggauccaaaggcgaugucuucgugauacgggagccguuuauuucuugcagccauuuagaaugucgcacauucuuucugacucaaggugcucuacucaacgacaagcacuccaaugagaccguuaaagaucgaucaccccaucguacacugaugaguugcccugugggggaagccccaagccccuacaacucuagauucgaguccgucgcauggucagccagcgcuugucacgacggaaccaguuggcuuacuaucggcauuucuggcccugauaauggggcaguggccguacugaaguauaacggaaucaucacagacaccauuaaguccuggagggauaauauauugcggacgcaggagagcgaaugcgcuuguguuaacgguucgugcuuuacugugaugaccgacggcccaucuaaugggcaggccuccuacaaaaucuucaagauggagaaaggaaaggucgugaaaucaguggaacucgaugcgcccaacuaucacuacgaggaguguaguugcuauccugacgcaggcgaaauuacaugugucugccgcgauaacuggcaugguagcaauagaccauggguuuccuuuaaccagaaucuggaguaccaaaucggguauauaugcucuggaguguucggcgacaacccgaggcccaaugauggcacugggagcuguggaccuaugucaaguaacggugccuacggcguaaagggguuuuccuucaaguacggaaauggcguguggauuggucggaccaaaagcacaaacucucgcucaggguuugaaaugaucugggacccaaauggcuggaccggaacggacaguagcuucuccgucaagcaggauaucguggcuauuacugacuggucuggcuauucggggagcuuuguucagcaccccgagcugacaggacucgauugcauccgaccuuguuucuggguggaauuaauuagagguaggccaaaagaguccaccauauggacuucaggcaguucuaucagcuucugcggggucaacuccgacacagugucauggagcuggcccgauggagccgagcugccguuuaccauugacaaguga

SEQ ID NO: 143047 - RNA, 1350 nt, Artificial Sequence
  derived and/or modified CDS sequence (opt3) from neuraminidase__InfluenzaA__ABE97660
augaaccccaaucagaagaucauuaccauaggcagcaucugcauggugauugggacaaucucccugaugcuccaaauuggaaacaugaucucuauaugggucucacacaguauccagacugguaaucagcaucaggccgagagcauuuccaacacgaauccucuuaccgaaaaagcuguugcaucugugacacuggccggcaacucgucauuguguccaaucagagggugggcgguacacagcaaggacaauaguauuaggaucggauccaaaggcgauguguucgucauacgggagccguuuauuucuugcagccauuuagaaugucgcacuuucuuucugacccaaggugcucuacucaacgacaagcacuccaaugggacagugaaagaucgaucaccccaucguacccugaugaguugcccuguuggagaggccccaagccccuacaacucuagauucgaauccguggcauggucagccagcgcuugucacgacggcacuagcuggcuuacaaucggcauuucugggccugauaauggagcagucgccgugcugaaguauaacgguaucaucaccgacacgauuaaguccuggagggauaauauauugcggacucaggagagcgagugcgcuuguguaaacggcucgugcuuuaccguuaugacagacgggccaucuaauggacaggccuccuacaaaaucuucaagauggaaaaaggcaagguggucaaaucaguggagcucgaugcgcccaacuaucacuacgaagaguguaguugcuauccugacgccggugagauuacuugugugugccgcgauaacuggcaugggagcaauagaccaugggucuccuuuaaccagaaucuggaauaccaaaucggauauauaugcucuggcguuuucggcgacaacccgaggcccaaugaugggaccggaagcugugguccuaugucaaguaacggcgcacacggggugaagggauuuuccuucaaguacggcaaugguguauggauugggcggacaaaaagcaccaacucucgcucaggcuuugagaugaucugggacccaaauggauggacgggcacugacaguagcuucuccgugaagcaggauaucgucgcuauuacagacuggucuggguacucgggaaguuuugugcagcaucccgaacugaccggucucgauugcauccgaccuuguuucuggguugaguuaauuagaggcaggccaaaagaauccacuauauggacaucagggaguucuaucagcuucugcggagugaacuccgacaccgucucauggagcuggcccgauggcgccgagcugccguuuacgauugacaaguga

SEQ ID NO: 143048 - RNA, 1350 nt, Artificial Sequence
  derived and/or modified CDS sequence (opt3) from neuraminidase__InfluenzaA__ABE97661
augaaccccaaucagaagaucauuaccauaggcagcaucugcauggugauugggacaaucucccugaugcuccaaauuggaaacaugaucucuauaugggucucacacaguauccagacugguaaucagcaucagacggagagcauuuccaacaccaauccucuuacagaaaaagccguugcuucugugacucuggcaggcaacucgucauuguguccaaucagagggugggccguacacagcaaggacaauaguauuaggaucggauccaaaggcgauguguucgucauacgggagccguuuauuucuugcagccauuuagaaugucgcaccuucuuucugacacaaggugcgcuacucaacgacaagcacuccaaugggaccgugaaagaucgaucaccccaucguacucugaugaguugcccuguuggagaggcuccaagccccuacaacucuagauucgaauccguggccuggucagcaagcgccugucacgacggcacaaguuggcuuaccaucggcauuucugggccugauaauggagcugucgcagugcugaaguauaacgguaucaucacggacacuauuaaguccuggagggauaauauauugcggacccaggagagcgagugcgccuguguaaacggcucgugcuuuacaguuaugacugacgggccaucuaauggacaggcuuccuacaaaaucuucaagauggaaaaaggcaagguggucaaaucaguggagcucgaugcccccaacuaucacuacgaagaguguaguugcuauccugacgcgggugagauuaccugugugugccgcgauaacuggcaugggagcaauagaccaugggucuccuuuaaccagaaucuggaauaccaaaucggauauauaugcucuggcguuuucggcgacaacccgaggcccaaugaugggacaggaagcugugguccuaugucaaguaacggcgcacacggggugaagggauuuuccuucaaguacggcaaugguguauggauugggcggaccaaaagcacgaacucucgcucaggcuuugagaugaucugggacccaaauggauggacuggcacagacaguagcuucuccgugaagcaggauaucgucgccaccacugacuggucuggguacucggguagcuuugugcagcaucccgaacugacaggacucgauugcauucgaccuuguuucuggguugaguuaaucagaggcaggccaaaagaauccaccguguggacgucagggaguucuauuagcuucugcggagucaacuccgacaccgugucauggagcuggcccgauggcgcugagcugccguuuacaauagacaaguga

SEQ ID NO: 143049 - RNA, 1350 nt, Artificial Sequence
  derived and/or modified CDS sequence (opt3) from neuraminidase__InfluenzaA__ABE97662
augaaccccaaucagaagaucauuaccauaggcagcaucugcauggugauugggaucgucucccugaugcuccaaauuggaaacaugaucucuauauggguuucacacaguauccagacagguaaucagcaucaggccgagagcauuuccaacacuaauccucuuacggaaaaagcuguggcaucuguaacccuggccggcaacucgucauuguguccaaucagagggugggcggugcacagcaaggacaauaguauuaggaucggauccaaaggcgaugucuucgugauacgggagccguuuauuucuugcagccauuuagaaugucgcacauucuuucugacucaaggugcucuacucaacgacaagcacuccaaugggaccguuaaagaucgaucaccccaucguacacugaugaguugcccugugggagaggccccaagccccuacaacucuagauucgaauccgucgcauggucagccagcgcuugucacgacggcaccaguuggcuuacuaucggcauuucugggccugauaauggagcaguggccguacugaaguauaacgguaucaucacagacaccauuaaguccuggaggaauaacauauugcggacgcaggagagcgagugcgcuuguguuaauggcucgugcuuuacugugaugaccgaugggccaucuaacggacaggccuccuacaaaaucuucaagaugcgcaaaggcaaggucgugaaaucaguggaacucgacgcgcccaacuaucacuacgaggaauguaguugcuauccugaugccggugagauuacaugugucugcagagacaauuggcaugggagcaacaggccauggguuuccuuuaaucagaaccuggaguaccaaaucggauauauaugcucuggcguguucggcgauaauccgcggcccaacgacgggacuggaagcugugguccuaugucaccaaauggcgcauacgggguaaagggauuuaguuucaaguacggcaacgguguguggauugggcgcaccaaauccacaaauagccgaucuggcuuugaaaugaucugggaucccaacggauggaccggcacggacucaaguuucagcgucaagcaggacaucguggcuauuacugauugguccggguauucuggaucguuuguucagcacccugagcugacaggucucgacugcaucagaccauguuucuggguggaauuaauuaggggccggcccaaagagagcaccauauggacuuccgggucaaguaucucuuucugcggagucaauagcgauacaguguccuggucauggccggacggcgccgaacugccuuuuaccauugauaaguga

SEQ ID NO: 143050 - RNA, 1350 nt, Artificial Sequence
  derived and/or modified CDS sequence (opt3) from neuraminidase__InfluenzaA__ABE97663
augaaccccaaucagaagaucauuaccauaggcagcaucugcauggugacagggauugucucccugaugcuccaaaucggaaacaugauuucuaucuggguuucacacaguauacauacugguaaucagcaccaggccgagccuaucagcaacacgaauuuccuuaccgaaaaagcuguggcauccguaaagcuggccggcaacucuucguuguguccaauuaaugggugggcgguguacucaaaagacaacagcaucagaauuggaaguaagggcgaugucuuugugaucagggagccguucauauccugcucucauuuagaaugucggacauuuuuccugacucagggugcucuacucaaugacaaacacagcaacgggaccguuaaggaucgcucaccccaucgaacacugauguccugcccugugggagaggccccaagucccuauaauagccguuuugaaucugucgcaugguccgccucagcuugucacgacggcaccagcuggcuuacuauuggcaucagugggccugauaacggagcaguggccguacugaaguacaaugguauuaucacagacaccaucaaaucuuggagaaacaauauuuugaggacgcaagaguccgagugcgcuuguguuaacggcagcugcuucacugugaugaccgaugggccaucgaacggacaggccucucacaagauauuuaaaauggaaaagggcaaagucgugaaguccguggagcucgacgcgcccaauuaucauuacgaagaguguucaugcuauccugaugccggugagaucacaugugucugccgggacaacuggcacgggaguaaucgcccauggguuagcuucaaccagaaucuggaauaccagauuggauauaucugcuccggcguguuuggcgauaacccgagacccaaugacgggacuggaucuugugguccuguaagcucaaacggcgcauacggggugaagggauucaguuuuagguacggcaauggugucuggauagggcggaccaaauccacaaacagccgcucuggcuucgagaugauuugggauccaaauggauggaccgaaacggacucaaguuuuagcgugaagcaagacaucguugcuaucacugauugguccggcuauucugggucguucgugcagcaucccgagcugacaggacucgacugcauucgaccuuguuucugggucgaauuaaucagagguaggccaaaagagagcaccauuuggacuuccggcucaaguauaucuuuuugcggggugaacagcgauacaguaggaugguccuggcccgacggcgccgagcugccguucaccaucgauaaguga

SEQ ID NO: 143051 - RNA, 1350 nt, Artificial Sequence
  derived and/or modified CDS sequence (opt3) from neuraminidase__InfluenzaA__ABE97665
augaaccccaaucagaagaucauuaccauaggcagcaucugcauggugacagggauugucucccugaugcuccaaguuggaaacaugaucucuauuugggugucacacaguauccauacugguaaucagcaccaggccgagccuauaagcaacacgaauuuccuuaccgaaaaagcuguagcauccgugaagcuggccggcaacucuucguuguguccaaucaaugggugggcggucuacucaaaagacaacagcauuagaaucggaaguaagggcgauguguuuguuauuagggagccguucaucuccugcucucauuuagaaugucggacauuuuuccugacucacggugcucuacucaaugacaaacauagcaacgggaccgugaaggaucgcucaccccaccgaacacugauguccugcccugucggagaggccccaagucccuauaauagccguuuugaaucuguggcaugguccgccucagcuugucacgacggcaccagcuggcuuacuauaggcauuagugggccugauaacggagcaguagccguucugaaguacaaugguaucauuacagacaccaucaaaucuuggagaaacaauaucuugaggacgcaggaguccgagugcgcuugugugaacggcagcugcuucacugucaugaccgaugggccaucgaacggacaagccucucauaagauuuuuaaaauggaaaagggcaaaguggugaaguccgucgagcucgacgcgcccaauuaucacuacgaagaguguucaugcuauccugaugccggugagauaacauguguuugccgggacaacuggcaugggaguaaucgcccaugggugagcuucaaccagaaucuggaauaccagaucggauauauuugcuccggcguauuuggcgauaacccgagacccaaugacgggacuggaucuugugguccugugagcucaaacggcgcauacggggucaagggauucaguuuuaaauacggcaaugguguguggaucgggaggaccaaguccacaaacagccggucuggcuucgagaugauaugggauccaaauggauggaccgaaacggacucaaguuuuagcguuaaacaggacauuguggcuaucacugauugguccggcuauucugggucguucguccaacaccccgagcugacaggacucgacugcauccgcccuuguuucuggguggaauuaauucgagguagaccaaaggagagcaccaucuggacuuccggcucaaguauuucuuuuugcgggguaaacagcgauacaguuggaugguccuggcccgacggcgccgagcugccguucaccauagauaaauga

SEQ ID NO: 143052 - RNA, 1350 nt, Artificial Sequence
  derived and/or modified CDS sequence (opt3) from neuraminidase__InfluenzaA__ABE97666
augaaccccaaucagaagaucauuaccauaggcagcaucugcauggugacagggauugucucccugaugcuccaaaucggaaacaugauuucuaucuggguuucacacaguauacauacugguaaucagcaccagagcgagccuaucuccaacacgaauuuccuuaccgaaaaagccguggcuucuguaaagcuggcaggcaacucgccauuguguccgauuaaugggugggccguguacucaaaagacaacagcaucagaauuggaaguaagggcgaugucuuugugaucagggagcccuucauauccugcucucauuuagaaugucggacauuuuuccugacucagggugcgcuacucaaugacaaacacagcaacgggaccguuaaggaucgcuccccucaucgaacacugaugucaugcccagugggagaggcucccaguccuuauaauagccguuuugaaucugucgccugguccgcaucagccugucacgacggcaccagcuggcuuacuauuggcaucagugggccagauaacggagcuguggcaguacugaaguacaaugguauuaucacagacaccaucaaaucuuggagaaacaauauuuugaggacgcaagaguccgagugcgccuguguuaacggcagcugcuucacugugaugaccgaugggcccucgaacggacaggcuucucacaagauauuuaaaauggaaaagggcaaagucgugaaguccguggagcucgacgccccuaauuaucauuacgaagaguguucaugcuauccagaugcgggugagaucacaugugucugccgggacaacuggcacgggaguaaucgcccguggguuagcuucaaccagaaucuggaauaccagauuggauauaucugcuccggcguguuuggcgauucucccagaccuaacgacgggacuggaagcugugguccaguaucaaguaauggcgcauacggggugaagggauucuccuuuaaauacggcaacggugucuggauagggaggaccaagagcacaaauucucggucaggcuucgagaugauuugggaucccaacggauggaccgaaacggacaguagcuuuuccgugaaacaagacaucguugccaucacugauuggucuggcuauucggggagcuucgugcagcauccugagcugacaggacucgacugcauucgcccauguuucugggucgaauuaauccgagguagacccaaggaguccaccauuuggacuucaggcaguucuauauccuuuugcggggugaauagcgauacaguaggauggucauggccggacggcgcugagcugccuuucaccaucgauaaauga

SEQ ID NO: 143053 - RNA, 1350 nt, Artificial Sequence
  derived and/or modified CDS sequence (opt3) from neuraminidase__InfluenzaA__ABE97667
augaaccccaaucagaagaucauuaccauaggcagcaucugcauggugacagggauugucucccugaugcuccaaaucggaaacaugauuucuaucugggguucacacaguauacauacuggcaaucagcaccagagcgagccuaucuccaacacgaauuuccuuaccgaaaaagccguugcuucugugaagcuggcagggaacucgucauuguguccaauuaauggaugggccguauacagcaaagacaacaguaucagaauuggcuccaagggugauguguuugucaucagggagccguucauaucuugcagccauuuagaaugucggacauuuuuccugacucagggggcgcuacucaaugacaaacacuccaacggaaccgugaaggaucgcucaccccaucgaacacugaugaguugcccuguuggcgaggcuccaagccccuauaauucucguuuugaauccguggccuggucagcaagcgccugucacgacggcaccaguuggcuuacuauugggaucucuggaccugauaacggugcugucgcagugguaaaguacaauggcauuaucacagacaccaucaaauccuggagaaacaauauucugaggacgcaagagagcgagugcgccuguguuaacgggucgugcuucacugugaugaccgauggaccaucuaacggccaggcuucccacaagauauuuaaaauggaaaaggguaaagucgugaagucaguggaguuggacgcccccaauuaucauuacgaagaguguaguugcuauccugaugcggggaagaucacaugugucugccgggacaacuggcacggaagcaaucgcccauggguuuccuucaaccagaaucucgaguaccagauuggcuauaucugcucuggcguguuuggggauaacccgagacccaaugacggaacugguagcuguggcccuguaucaaguaacggggcauacggagugaaaggcuucuccuuuaaguacgguaauggggucuggauaggcaggaccaaaagcacaaacucucggucaggauucgaaaugauuugggauccaaauggcuggaccgagacggacaguagcuuuuccgugaagcaagacaucguugccaucacugauuggucuggguauucggguagcuucgugcagcaucccgaacugacaggacuggacugcauucgcccuuguuucugggucgagcucauccgaggcagaccaaaagaauccaccauuuggacuucagggaguucuaucagcuuuugcggagugaacuccgauauaguaggcuggucauggcccgacggugcugaguuaccguucacaauugauaaguga

SEQ ID NO: 143054 - RNA, 1350 nt, Artificial Sequence
  derived and/or modified CDS sequence (opt3) from neuraminidase__InfluenzaA__ABE97669
augaaccccaaucagaagaucauuaccauaggcagcaucugcauggugacagggauugucucccugaugcuccaaaucggaaacaugauuucuaucuggguuucacacaguauacauacugguaaucagcaccagagcgagccuaucuccaacacgaauuuccuuaccgaaaaagccguggcuucuguaaagcuggcaggcaacucgucauuguguccaauuaaugggugggccguguacagcaaagacaacaguaucagaauuggauccaagggcgaugucuuugugaucagggagccguucauaucuugcagccauuuagaaugucggacauuuuuccugacucagggugcgcuacucaaugacaaacacuccaacgggaccguuaaggaucgcucaccccaucgaacacugaugaguugcccugugggagaggcuccaagccccuauaauucucguuuugaauccgucgccuggucagcaagcgccugucacgacggcaccaguuggcuuacuauuggcaucucugggccugauaacggagcuguggcaguaguuaaguacaaugguauuaucacagacaccaucaaauccuggagaaacaauauucugaggacgcaagagagcgagugcgccugugugaacggcucgugcuucacugucaugaccgaugggccaucuaacggacaggcuucccacaagauauuuaaaauggaaaagggcaaaguggugaagucagucgaguuggacgcccccaauuaucauuacgaagaguguaguugcuauccugaugcgggugagaucacauguguuugccgggacaacuggcacgggagcaaucgcccauggguguccuucaaccagaaucucgaauaccagauuggauauaucugcucuggcguauuuggcgauaacccgagacccaaugacgggacuggaagcugugguccugugucaaguaacggcgcauacggggucaagggauucuccuuuaaauacggcaaugguguguggauagggaggaccaagagcacaaacucucggucaggcuucgagaugauuugggauccaaauggauggaccgaaacggacaguagcuuuuccguuaaacaagacaucguggccaucacugauuggucuggcuauucggggagcuucguccagcaucccgagcugacaggacuggacugcauucgcccuuguuucuggguggaacucauccgagguagaccaaaggaguccaccauuuggacuucaggcaguucuaucagcuuuugcgggguaaacuccgauacaguuggauggucauggcccgacggcgcugaguuaccguucaccauagauaaauga

SEQ ID NO: 143055 - RNA, 1350 nt, Artificial Sequence
  derived and/or modified CDS sequence (opt3) from neuraminidase__InfluenzaA__ABE97670
augaaccccaaucagaagaucauuaccauaggcagcaucugcauggugacagggauugucucccugaugcuccaaaucggaaacaugauuucuaucuggguuucacacaguauacauacugguaaucagcaccagagcgagccuaucuccaacacgaauuuccuuaccgaaaaagccguggcuucuguaaagcuggcaggcaacucgucauuguguccaauuaaugggugggccguguacagcaaagacaacaguaucagaauuggauccaagggcgaugucuuugugaucagggagccguucauaucuugcagccauuuagaaugucggacauuuuuccugacucagggugcgcuacucaaugacaaacacuccaacgggaccguuaaggaucgcucaccccaucgaacacugaugaguugcccugugggagaggcuccaagccccuauaauucucguuuugaauccgucgccuggucagcaagcgccugucacgacggcaccaguuggcuuacuauuggcaucucugggccugauaacggagcuguggcaguaguuaaguacaaugguauuaucacagacaccaucaaauccuggagaaacaauauucugaggacgcaagagagcgagugcgccugugugaacggcucgugcuucacugucaugaccgaugggccaucuaacggacaggcuucccacaagauauuuaaaauggaaaagggcaaaguggugaagucagucgaguuggacacacccaauuaucauuacgaagaguguaguugcuauccugaugccggugagaucacuuguguuugccgggacaacuggcacgggagcaaucgcccauggguguccuucaaccagaaucucgaauaccagauuggauauaucugcucuggcguauuuggcgauaacccgagacccaaugacgggaccggaagcugugguccugugucaaguaacggcgcguacggggucaagggauucuccuuuaaauacggcaaugguguguggauagggaggacaaagagcaccaacucucggucaggcuucgagaugauuugggauccaaauggauggacggaaacugacaguagcuuuuccguuaaacaagacaucguggcaaucacagauuggucuggcuauucggggagcuucguccagcaucccgagcugaccggacuggacugcauucgcccuuguuucuggguggaacucauccgagguagaccaaaggaguccacuauuuggacaucaggcaguucuaucagcuuuugcgggguaaacuccgauaccguuggauggucauggcccgacggcgccgaguuaccguucacgauagauaaauga

SEQ ID NO: 143056 - RNA, 1350 nt, Artificial Sequence
  derived and/or modified CDS sequence (opt3) from neuraminidase__InfluenzaA__ABE97671
augaaccccaaucagaagaucauuaccauaggcagcaucugcauggugacagggauugucucccugaugcuccaaaucggaaacaugauuucuaucuggguuucacacaguauacauacugguaaucagcaccaggccgagccuaucagcaacacgaauuuccuuaccgaaaaagcuguggcauccguaaagcuggccggcaacucuucguuguguccaauuaaugggugggcgguguacucaaaagacaacagcaucagaauuggaaguaagggcgaugucuuugugaucagggagccguucauauccugcucucauuuagaaugucggacauuuuuccugacucagggugcucuacucaaugacaaacacagcaacgggaccguuaaggaucgcucaccccaucgaacacugauguccugcccugugggagaggccccaagucccuauaauagccguuuugaaucugucgcaugguccgccucagcuugucacgacggcaccagcuggcuuacuauuggcaucagugggccugauaacggagcaguggccguacugaaguacaaugguauuaucacagacaccaucaaaucuuggagaaacaauauuuugaggacgcaagaguccgagugcgcuuguguuaacggcagcugcuucacugugaugaccgaugggccaucgaacggacaggccucucacaagauauuuaaaauggaaaagggcaaagucgugaaguccguggagcucgacgcgcccaauuaucauuacgaagaguguucaugcuauccugaugccggugagaucacaugugucugccgggacaacuggcacgggaguaaucgcccauggguuagcuucaaccagaaucuggaauaccagauuggauauaucugcuccggcguguuuggcgauaacccgagacccaaugacgggacuggaucuugugguccuguaagcucaaacggcgcauacggggugaagggauucaguuuuaaauacggcaauggugucuggauagggaggaccaaguccacaaacagccggucuggcuucgagaugauuugggauccaaauggauggaccgaaacggacucaaguuuuagcgugaaacaagacaucguugcuaucacugauugguccggcuauucugggucguucgugcagcaucccgagcugacaggacucgacugcauucgcccuuguuucugggucgaauuaauccgagguagaccaaaggagagcaccauuuggacuuccggcucaaguauaucuuuuugcggggugaacagcgauacaguaggaugguccuggcccgacggcgccgagcugccguucaccaucgauaaauga

SEQ ID NO: 143057 - RNA, 1350 nt, Artificial Sequence
  derived and/or modified CDS sequence (opt3) from neuraminidase__InfluenzaA__ABE97672
augaaccccaaucagaagaucauuaccauaggcagcaucugcauggugacagggauugucucccugaugcuccaaaucggaaacaugauuucuaucuggguuucacacaguauacauacugguaaucagcaccaggccgagccuaucagcaacacgaauuuccuuaccgaaaaagcucuggcauccgugaaguuggccggcaacucuucguuauguccaauuaaugggugggcgguauacucaaaagacaacagcaucagaauuggaaguaagggcgauguguuugucaucagggagccguucauauccugcucucaucuggaaugucggacauuuuuccuaacucagggugcucuccugaaugacaaacacagcaacgggaccgugaaggaucgcucaccccaucgaacacuuauguccugcccuguuggagaggccccaagucccuauaauagccguuuugaaucuguggcaugguccgccucagcuugucacgacggcaccagcuggcugacuauuggcaucagugggccugauaacggagcagucgccguguugaaguacaaugguauuaucacagacaccaucaaaucuuggagaaacaauauucucaggacgcaagaguccgagugcgcuuguguaaacggcagcugcuucacuguuaugaccgaugggccaucgaacggacaggccucucacaagauauuuaaaauggaaaagggcaaaguggucaaguccguggagcuggacgcgcccaauuaucauuacgaagaguguucaugcuauccugaugccggugagaucacaugugugugccgggacaacuggcacgggaguaaucgcccaugggucagcuucaaccagaaucuggaauaccagauuggauauaucugcuccggcguuuuuggcgauaacccgagacccaaugacgggacuggaucuugugguccugugagcucaaacggcgcauacgggguaaagggauucaguuuuaaauacggcaaugguguguggauagggaggaccaaguccacaaacagccggucuggcuucgagaugauuugggauccaaauggauggaccgaaacggacucaaguuuuagcgucaaacaagacaucguggcuaucacugauugguccggcuauucugggucguucguucagcaucccgagcucacaggauuagacugcauucgcccuuguuucuggguggaacugauccgagguagaccaaaggagagcaccauuuggacuuccggcucaaguauaucuuuuugcggggucaacagcgauacagugggaugguccuggcccgacggcgccgagcuuccguucaccaucgauaaauga

SEQ ID NO: 143058 - RNA, 1350 nt, Artificial Sequence
  derived and/or modified CDS sequence (opt3) from neuraminidase__InfluenzaA__ABE97675
augaaccccaaucagaagaucauuaccauaggcagcaucugcauggugacagggauugucucccugaugcuccaaguuggaaacaugaucucuauuugggugucacacaguauccauacugguaaucagcaccaggccgagccuauaagcaacacgaauuuccuuaucgaaaaagcuguagcauccgugaagcuggccggcaacucuucguuguguccaauuaaugggugggcggucuacucaaaagacaacagcaucagaauuggaaguaagggcgauguguuuguuaucagggagccguucauauccugcucucauuuagaaugucggaccuuuuuccugacacagggugcucuacucaaugacaaacacagcaacgggacugugaaggaucgcucaccccaucgaacccugauguccugcccugucggagaggccccaagucccuauaauagccguuuugaaucuguggcaugguccgccucagcuugucacgacggcacaagcuggcuuaccauuggcaucagugggccugauaacggagcaguagccguucugaaguacaaugguauuaucacugacacaaucaaaucuuggagaaacaauauuuugaggacccaagaguccgagugcgcuugugugaacggcagcugcuucacggucaugacugaugggccaucgaacggacaggccucucacaagauauuuaaaaucgaaaagggcaaaguggugaaguccgucgagcucgacgcgcccaauuaucauuacgaagaguguucaugcuauccugaugccggugagauuaccuguguuugccgggacaacuggcacgggaguaaucgcccaugggugagcuucaaccagaaucuggaauaccagaucggauauauaugcuccggcguauuuggcgauaacccgagacccaaugacgggacaggaucuugugguccugugagcucaaacggcgcauacggggucaagggauucaguuuuaaauacggcaaugguguguggauugggaggacuaaguccaccaacagccggucuggcuucgagaugaucugggauccaaauggauggucagaaacagacaguagcuuuuccguuaaacaagacaucguggcuauuaccgauuggucuggcuauucggggagcuucguccagcaucccgagcugacgggacucgacugcauccgcccuuguuucuggguggaauuaauucgagguagaccaaaggaguccacuauauggacaucaggcaguucuaucagcuuuugcgggguaaacuccgauaccguuggauggucauggcccgacggcgccgagcugccguucacuauugauaaauga

SEQ ID NO: 143059 - RNA, 1350 nt, Artificial Sequence
  derived and/or modified CDS sequence (opt3) from neuraminidase__InfluenzaA__ABE97676
augaaccccaaucagaagaucauuaccauaggcagcaucugcauggugacagggauugucucccugaugcuccaaaucggaaacaugauuucuaucuggguuucacacaguauacauacugguaaucagcaccaggccgagccuaucagcaacacgaauuuccuuaccgaaaaagcuguggcauccguaaagcuggccggcaacucuucguuguguccaauuaaugggugggcgguguacucaaaagacaacagcaucagaauuggaaguaagggcgaugucuuugugaucagggagccguucauauccugcucucauuuagaaugucggacauuuuuccugacucagggugcucuacucaaugacaaacacagcaacgggaccguuaaggaucgcucaccccaucgaacacugauguccugcccugugggagaggccccaagucccuauaauagccguuuugaaucugucgcaugguccgccucagcuugucacgacggcaccagcuggcuuacuauuggcaucagugggccugauaacggagcaguggccguacugaaguacaaugguauuaucacagacaccaucaaaucuuggagaaacaauauuuugaggacgcaagaguccgagugcgcuuguguuaacggcagcugcuucacugugaugaccgaugggccaucgaacggacaggccucucacaagauauuuaaaauggaaaagggcaaagucgugaaguccguggagcucgacgcgcccaauuaucauuacgaagaguguucaugcuauccugaugccggugagaucacaugugucugccgggacaacuggcacgggaguaaucgcccauggguuagcuucaaccagaaucuggaauaccagauuggauauaucugcuccggcguguuuggcgauaacccgagacccaaugacgggacuggaucuugugguccuguaagcucaaacggcgcauacggggugaagggauucaguuuuaaauacggcaauggugucuggauagggaggaccaaguccacaaacagccggucuggcuucgagaugauuugggauccaaauggauggaccgaaacggacucaaguuuuagcgugaaacaagacaucguugcuaucaacgauugguccggcuauucugggucguucgugcagcaucccgagcugacuggacucgacugcauucgcccuuguuucugggucgaauuaauccgagguagaccaaaggagagcacaauuuggaccuccggcucaaguauaucuuuuugcggggugaauagcgauacuguaggaugguccuggcccgacggcgccgagcugccguucacaaucgauaaauga

SEQ ID NO: 143060 - RNA, 1350 nt, Artificial Sequence
  derived and/or modified CDS sequence (opt3) from neuraminidase__InfluenzaA__ABE97677
augaaccccaaucagaagaucauuaccauaggcagcaucugcauggugacagggauugucucccugaugcuccaaaucggaaacauuaucucuauauggguuagacacucaauccauacugguaaucagcaccagagugagccuauuagcaacacgaauuuccuuaccgaaaaagccguggcuuccguaaagcuggcaggcaacucuucguuguguccaaucaaugggugggccguguacucaaaagacaacagcauuaggaucggaaguaagggcgaugucuuugugauacgggagccguucauuuccugcucucauuuagaaugucgcacauuuuuccugacucagggugcgcuacucaaugacaaacacagcaacgggaccguuaaggaucgaucaccccaucguacacugauguccugcccugugggagaggcuccaagucccuauaauagcagauuugaaucugucgccugguccgcaucagccugucacgacggcaccagcuggcuuacuaucggcauuagugggccugauaacggagcuguggcaguaguuaaguacaaugguaucaucacagacaccauuaaaucuuggaggaacaauauacugcggacgcaagaguccgagugcgccugugugaacggcagcugcuucacugucaugaccgaugggccaucgaacggacaggcuucucacaagaucuuuaaaauggaaaagggcaaaguggugaaguccgucgaguuggacgcccccaauuaucauuacgaagaguguucaugcuauccugaugcgggugagauuacauguguuugccgcgacaacuggcacgggaguaauagaccaugggugagcuucaaccagaaucucgaauaccagaucggauauauaugcuccggcguauuuggcgauaacccgaggcccaaugacgggacuggaucuugugguccugugagcucaaacggcgcauacggggucaagggauucaguuuuaaauacggcaaugguguguggauugggcggaccaaguccacaaacagccgcucuggcuucgagaugaucugggauccaaauggauggaccgaaacggacucaaguuuuagcguuaaacaagacaucguggccauuacugauugguccggcuauucugggucguucguccagcaucccgagcugacaggacuggacugcauccgaccuuguuucuggguggaacucauuagagguaggccaaaggagagcaccauauggacuuccggcucaaguaucucuuuuugcgggguaaacagcgauacaguuggaugguccuggcccgacggcgcugaguuaccguucaccauugauaaauga

SEQ ID NO: 143061 - RNA, 1350 nt, Artificial Sequence
  derived and/or modified CDS sequence (opt3) from neuraminidase__InfluenzaA__ABE97679
augaaccccaaucagaagaucauuaccauaggcagcaucugcauggugacagggauugucucccugaugcuccaaaucggaaacaugauuucuaucuggguuagacacucaauacauacugguaaucagcaccagagugagccuaucagcaacacgaauuuccuuaccgaaaaagccguggcuuccguaaagcuggcaggcaacucuucguuguguccaauuaaugggugggccguguacucaaaagacaacagcaucaggauuggaaguaagggcgaugucuuugugauccgggagccguucauauccugcucucauuuagaaugucgcacauuuuuccugacucagggugcgcuacucaaugacaaacacagcaacgggaccguuaaggaucgaucaccccaucguacacugauguccugcccugugggagaggcuccaagucccuauaauagcagauuugaaucugucgccugguccgcaucagccugucacgacggcaccagcuggcuuacuauuggcaucagugggccugauaacggagcuguggcaguaguuaaguacaaugguauuaucacagacaccaucaaaucuuggaggaacaauauucugcggacgcaagaguccgagugcgccugugugaacggcagcugcuucacugucaugaccgaugggccaucgaacggacaggcuucucacaagauauuuaaaauggaaaagggcaaaguggugaaguccgucgaguuggacgcccccaauuaucauuacgaagaguguucaugcuauccugaugcgggugagaucacauguguuugccgcgacaacuggcacgggaguaauagaccaugggugagcuucaaccagaaucucgaauaccagauuggauauaucugcuccggcguauuuggcgauaacccgaggcccaaugacgggacuggaucuugugguccugugagcucaaacggcgcauacggggucaagggauucaguuuuaaauacggcaaugguguguggauagggcggaccaaguccacaaacagccgcucuggcuucgagaugauuugggauccaaauggauggaccgaaacggacucaaguuuuagcguuaaacaagacaucguggccaucacugauugguccggcuauucugggucguucguccagcaucccgagcugacaggacuggacugcauucgaccuuguuucuggguggaacucaucagagguaggccaaaggagagcaccauuuggacuuccggcucaaguauaucuuuuugcgggguaaacagcgauacaguuggaugguccuggcccgacggcgcugaguuaccguucaccaucgauaaauga

SEQ ID NO: 143062 - RNA, 1350 nt, Artificial Sequence; identical to SEQ ID NO: 143054
  derived and/or modified CDS sequence (opt3) from neuraminidase__InfluenzaA__ABE97680

SEQ ID NO: 143063 - RNA, 1350 nt, Artificial Sequence; identical to SEQ ID NO: 143054
  derived and/or modified CDS sequence (opt3) from neuraminidase__InfluenzaA__ABE97681

SEQ ID NO: 143064 - RNA, 1350 nt, Artificial Sequence; identical to SEQ ID NO: 143054
  derived and/or modified CDS sequence (opt3) from neuraminidase__InfluenzaA__ABE97682

SEQ ID NO: 143065 - RNA, 1350 nt, Artificial Sequence
  derived and/or modified CDS sequence (opt3) from neuraminidase__InfluenzaA__ABE97684
augaaccccaaucagaagaucauuaccauaggcagcaucugcauggugacagggauugucucccugaugcuccaaaucggaaacaugauuucuaucuggguuucacacaguauacauacugguaaucagcaccaggccgagccuaucagcaacacgaauuuccuuaccgaaaaagcuguggcauccguaaagcuggccggcaacucuucguuguguccaauuaaugggugggcgguguacucaaaagacaacagcaucagaauuggaaguaagggcgaugucuuugugaucagggagccguucauauccugcucucauuuagaaugucggacauuuuuccugacucagggugcucuacucaaugacaaacacagcaacgggaccguuaaggaucgcucaccccaucgaacacugauguccugcccugugggagaggccccaagucccuauaauagccguuuugaaucugucgcaugguccgccucagcuugucacgacggcaccagcuggcuuacuauuggcaucagugggccugauaacggagcaguggccguacugaaguacaaugguauuaucacagacaccaucaaaucuuggagaaacaauauuuugaggacgcaagaguccgagugcgcuuguguuaacggcagcugcuucacugugaugaccgaugggccaucgaacggacaggccucucacaagauauuuaaaauggaaaagggcaaagucgugaaguccguggagcucgacgcgcccaauuaucauuacgaagaguguucaugcuauccugaugccggugagaucacaugugucugccgggacaacuggcacgggaguaaucgcccauggguuagcuucaaccagaaucuggaauaccagauuggauauaucugcuccggcguguuuggcgauaacccgagacccaaugacgggacuggaucuugugguccuguaagcucaaacggcgcauacggggugaagggauucaguuuuaaauacggcaauggugucuggauagggaggaccaaguccacaaacagccggucuggcuucgagaugauuugggauccaaauggauggaccgaaacggacucaaguuuuagcgugaaacaagacaucguugcuaucacugauugguccggcuauucugggucguucgugcagcaucccgagcugacaggacucgacugcauucgcccuuguuucugggucgaauuaauccgagguagaccaaaggagagcaccauuuggacuuccggcucaaguauaucuuuuugcggggugaacagcggaacaguaggcugguccuggcccgauggugccgagcugccguucaccaucgacaaauga

SEQ ID NO: 143066 - RNA, 1350 nt, Artificial Sequence
  derived and/or modified CDS sequence (opt3) from neuraminidase__InfluenzaA__ABE97685
augaaccccaaucagaagaucauuaccauaggcagcaucugcauggugacagggauugucucccugaugcuccaaaucggaaacaugauuucuaucuggguuucacacaguauacauacugguaaucagcaccaggccgagccuaucagcaacacgaauuuccuuaccgaaaaagcuguggcauccguaaagcuggccggcaacucuucguuguguccaauuaaugggugggcgguguacucaaaagacaacagcaucagaauuggaaguaagggcgaugucuuugugaucagggagccguucauauccugcucucauuuagaaugucggacauuuuuccugacucagggugcucuacucaaugacaaacacagcaacgggaccguuaaggaucgcucaccccaucgaacacugauguccugcccugugggagaggccccaagucccuauaauagccguuuugaaucugucgcaugguccgccucagcuugucacgacggcaccagcuggcuuacuauuggcaucagugggccugauaacggagcaguggccguacugaaguacaaugguauuaucacagacaccaucaaaucuuggagaaacaauauuuugaggacgcaagaguccgagugcgcuuguguuaacggcagcugcuucacugugaugaccgaugggccaucgaacggacaggccucucacaagauauuuaaaauggaaaagggcaaagucgugaaguccguggagcucgacgcgcccaauuaucauuacgaagaguguucaugcuauccugaugccggugagaucacaugugucugccgggacaacuggcacgggaguaaucgcccauggguuagcuucaaccagaaucuggaauaccagauuggauauaucugcuccggcguguuuggcgauaacccgagacccaaugacgggacuggaucuugugguccuguaagcucaaacggcgcauacggggugaagggauucaguuuuaaauacggcaauggugucuggauagggaggaccaaguccacaaacagccggucuggcuucgagaugauuugggauccaaauggauggaccgaaacggacucaaguuuuagcgugaaacaagacaucguugcuaucacugauugguccggcuauucugggucguucgugcagcaucccgagcugacaggacucgacugcauucgcccuuguuucugggucgaauuaauccgagguagaccaaaggagagcaccauuuggacuuccggcucaaguauaucuuuuugcggggugaacagcgauacaggaggcugguccuggcccgacggugccgagcugccguucaccaucgauaaauga

SEQ ID NO: 143067 - RNA, 1350 nt, Artificial Sequence; identical to SEQ ID NO: 143056
  derived and/or modified CDS sequence (opt3) from neuraminidase__InfluenzaA__ABE97686

SEQ ID NO: 143068 - RNA, 1350 nt, Artificial Sequence
  derived and/or modified CDS sequence (opt3) from neuraminidase__InfluenzaA__ABE97687
augaaccccaaucagaagaucauuaccauaggcagcaucugcauggugacagggauugucucccugaugcuccaaguuggaaacaugaucucuauuugggugucacacaguauccauacugguaaucagcaccaggccgagccuauaagcaacacgaauuuccuuaccgaaaaagcuguagcauccgugaagcuggccggcaacucuucguuguguccaaucaaugggugggcggucuacucaaaagacaacagcauuagaaucggaaguaagggcgauguguuuguuauuagggagccguucaucuccugcucucauuuagaaugucggacauuuuuccugacucagggugcucuacucaaugacaaacacagcaacgggaccgugaaggaucgcucaccccaucgaacacugauguccugcccugucggagaggccccaagucccuauaauagccguuuugaaucuguggcaugguccgccucagcuugucacgacggcaccagcuggcuuacuauaggcauuagugggccugauaacggagcaguagccguucugaaguacaaugguaucauuacagacaccaucaaaucuuggagaaacaauaucuugaggacgcaagaguccgagugcgcuugugugaacggcagcugcuucacugucaugaccgaugggccaucgaacggacaggccucucacaagauuuuuaaaauggaaaagggcaaaguggugaaguccgucgagcucgacgcgcccaauuaucauuacgaagaguguucaugcuauccugaugccggugagauaacauguguuugccgggacaacuggcacgggaguaaucgcccaugggugagcuucaaccagaaucuggaauaccagaucggauauauuugcuccggcguauuuggcgauaacccgagacccaaugacgggacuggaucuugugguccugugagcucaaacggcgcauacggggucaagggauucaguuuuaaauacggcaaugguguguggaucgggaggaccaaguccacaaacagccggucuggcuucgagaugauaugggauccaaauggauggaccgaaacggacucaaguuuuagcguuaaacaagacauuguggcuaucacugauugguccggcuauucugggucguucguccagcaucccgagcugacaggacucgacugcauccgcccuuguuucuggguggaauuaauucgagguagaccaaaggagagcaccaucuggacuuccggcucaaguauuucuuuuugcgggguaaacagcgauacaguuggaugguccuggcccgacggcgccgagcugccguucaccauagauaaauga

SEQ ID NO: 143069 - RNA, 1350 nt, Artificial Sequence
  derived and/or modified CDS sequence (opt3) from neuraminidase__InfluenzaA__ABE97688
augaaccccaaucagaagaucauuaccauaggcagcaucugcauggugacagggauugucucccugaugcuccaaguuggaaacaugaucucuauuugggugucacacaguauccauacugguaaucagcaccaggccgagccuauaagcaacacgaauuuccuuaccgaaaaagcuguagcauccgugaagcuggccggcaacucuucguuguguccaaucaaugggugggcggucuacucaaaagacaacagcauuagaaucggaaguaagggcgauguguuuguuauuagggagccguucaucuccugcucucauuuagaaugucggacauuuuuccugacucagggugcucuacucaaugacaaacacagcaacgggaccgugaaggaucgcucaccccaucgaacacugauguccugcccugucggagaggccccaagucccuauaauagccguuuugaaucuguggcaugguccgccucagcuugucacgacggcaccagcuggcuuacuauaggcauuagugggccugauaacggagcaguagccguucugaaguacaaugguaucauuacagacaccaucaaaucuuggagaaacaauaucuugaggacgcaagaguccgagugcgcuugugugaacggcagcugcuucacugucaugaccgaugggccaucgaacggacaggccucucacaagauuuuuaaaauggaaaagggcaaagugauaaaguccguggagcucgacgcgcccaauuaucauuacgaagaguguucaugcuauccugaugccggugagaucacaugugucugccgggacaacuggcacgggaguaaucgcccauggguuagcuucaaccagaaucuggaauaccagauuggauauaucugcuccggcguguuuggcgauaacccgagacccaaugacgggacuggaucuugugguccuguaagcucaaacggcgcauacggggugaagggauucaguuuuaaauacggcaauggugucuggguggggaggaccaaguccacaaacagccggucuggcuucgagaugauaugggauccaaauggauggaccgaaacggacucaaguuuuagcguuaaacaagacauuguggcuaucacugauugguccggcuauucugggucguucguccagcaucccgagcugacaggacucgacugcauccgcccuuguuucuggguggaauuaauucgagguagaccaaaggagagcaccaucuggacuuccggcucaaguauuucuuuuugcgggguaaacagcgauacaguuggaugguccuggcccgacggcgccgagcugccguucauaaucgauaaauga

SEQ ID NO: 143070 - RNA, 1350 nt, Artificial Sequence
  derived and/or modified CDS sequence (opt3) from neuraminidase__InfluenzaA__ABE97690
augaaccccaaucagaagaucauuaccauaggcagcaucugcauggugacagggauugucucccugaugcuccaaguuggaaacaugaucucuauuugggugucacacaguauccauacugguaaucagcaccaggccgagccuauaagcaacacgaauuuccuuaccgaaaaagcuguagcauccgugaagcuggccggcaacucuucguuguguccaaucaaugggugggcggucuacucaaaagacaacagcauuagaaucggaaguaagggcgauguguuuguuauuagggagccguucaucuccugcucucauuuagaaugucggacauuuuuccugacucagggugcucuacucaaugacaaacacagcaacgggaccgugaaggaucgcucaccccaucgaucccugaugaguugcccugucggagaggccccaagccccuauaauucucguuuugaauccguggcauggucagccagcgcuugucacgacggcacaaguuggcuuaccauaggcauuucugggccugauaacggagcaguagccguucugaaguacaaugguaucauuacugacacaaucaaauccuggagaaacaauaucuugaggacccaagagagcgagugcgcuugugugaacggcucgugcuucacggucaugacugaugggccaucuaacggacaggccucccacaagauuuuuaaaaugaagaaaggcaagguggugaagucagucgaacucgacgcgcccaauuaucauuacgaggaauguaguugcuauccugaugccggugagauaaccuguguuugccgggacaacuggcacgggagcaaucgcccauggguguccuucaaccagaaucuggaguaccagaucggauauauuugcucuggcguauuuggcgauaacccgagacccaaugacgggacaggaagcugugguccugugucaaguaacggcgcauacggggucaaaggauucuccuuuaaguacggcaaugguguguggaucgggaggacuaaaagcaccaacucucggucaggcuucgaaaugauaugggauccaaauggauggacagagaccgacaguagcuuuuccguuaagcaagacauuguggcuaucacggauuggucuggcuauucggggagcuucguccagcaucccgaacugacuggacucgacugcauccgcccuuguuucuggguggaguuaauucgagguagaccaaaagaauccacaaucuggaccucaggcaguucuauuagcuuuugcgggguaaacuccgauacuguuggauggucauggcccgacggcgccgagcugccguucacaauagauaaguga

SEQ ID NO: 143071 - RNA, 1350 nt, Artificial Sequence
  derived and/or modified CDS sequence (opt3) from neuraminidase__InfluenzaA__ABE97691
augaaccccaaucagaagaucauuaccauaggcagcaucugcauggugacagggauugucucccugaugcuccaaguuggaaacaugaucucuauuugggugucacacaguauccauacugguaaucagcaccaggccgagccuauaagcaacacgaauuuccuuaccgaaaaagcuguagcauccgugaagcuggccggcaacucuucguuguguccaaucaaugggugggcggucuacucaaaagacaacagcauuagaaucggaaguaagggcgauguguuuguuaaaagggagccgugcauuuccuguucucauuuaaagugccggacauucuuucugacucagggugcucuacucaaugacaagcacagcaacgggaccgugaaagaucgcucaccccaucgaacacugauguccuguccugucggagaagccccaagucccuauaauagccguuucgagucuguggcaugguccgccucagcuugccacgacggcaccagcuggcuuacuaucggcauaagugggccugauaacggagcaguagccguucugaaguacaaugguauuaucacagacaccauuaaaucuuggagaaacaauaucuugaggacgcaagaauccgagugugcuugcgugaacggcagcuguuuuacugucaugaccgaugggccaucgaacggacaggccucucacaagaucuucaaaauggagaagggcaagguggugaaauccgucgaacucgacgcgcccaauuaucauuacgaggaaugcucauguuauccugaugccggugagauuacaugcguuugccgggacaacuggcacgggaguaaucgcccaugggugagcuuuaaccagaaucuggaguaccagauaggauauaucuguuccggcguauucggcgauaacccgagacccaaugacgggacuggaucuugcgguccugugagcucaaacggcgcauacggggucaagggauuuaguuucaaauacggcaaugguguguggauugggaggaccaaguccacaaacagccggucuggcuuugaaaugaucugggauccaaauggauggaccgagacggacucaaguuucagcguuaaacaagacauaguggcuauuacugauugguccggcuauucugggucguuuguccagcaucccgaacugacaggacucgacuguauccgcccuugcuucuggguggaguuaauccgagguagaccaaaggaaagcaccauuuggacuuccggcucaaguaucucuuucugugggguaaacagcgauacaguuggaugguccuggcccgacggcgccgagcugccguuuaccauugauaaauga

SEQ ID NO: 143072 - RNA, 1350 nt, Artificial Sequence
  derived and/or modified CDS sequence (opt3) from neuraminidase__InfluenzaA__ABE97694
augaaccccaaucagaagaucaugaccauuggcagcauaugcauggugacagggaucgucucccugaugcuccaaguuggaaacaugauuucuaucugggugucacacaguauucauacugguaaucagcaccaggccgagccuaucagcaacacgaauuuccuuaccgaaaaagcuguagacuccgugaagcuggcaggcaacucuucguuguguccaauaaaugggugggccgucuacucaaaagauaacagcaucagaauuggaaguaagggcgacguguuuguuaucagggagccguccgugucuugcagccauuuagaaugucggacauucuuucugacucagggugcgcuacucaaugauaaacacuccaacgggaccgucaaggaccgcucaccccaucgaacacugaugaguugcccugugggagaggcuccaagccccuauaauucucguuucgaauccguagccuggucagcaagcgccugucacgauggcaccaguuggcuuacuauuggcaucucugggccugacaacggagcuguugcagugcugaaguacaaugguauaauuacagauaccaucaaauccuggagaaacaauauuuugaggacgcaagagagcgagugcgccugugucaacggcucgugcuuuacugugaugaccgacgggccaucuaacggacaggcuucccacaagaucuucaaaauggaaaagggcaaaguggucaagucaguugagcucgaugcccccaauuaucauuacgaagaguguaguugcuauccugacgcgggugagaucacaugugugugccgggauaacuggcacgggagcaaucgcccauggguauccuuuaaccagaaucuggaauaccagauuggauauauaugcucuggcguguucggcgacaacccgagacccaaugaugggacuggaagcugugguccugucucaaguaacggcgcauacggggugaagggauuuuccuucaaauacggcaaugguguuuggaucgggaggaccaagagcacaaacucucggucaggcuuugagaugauuugggacccaaauggauggaccgaaacggacaguagcuucuccgugaaacaagaugucguggccaucacugacuggucuggcuauucggggagcuuuguacagcaucccgagcugacaggacucgauugcauacgcccuuguuucuggguugaauuaauucgagguagaccaaaggaguccaccaucuggacuucaggcaguucuaucagcuucugcggggugaacuccgacacagucggauggucauggcccgauggcgcugagcugccguuuaccauugacaaauga

SEQ ID NO: 143073 - RNA, 1350 nt, Artificial Sequence
  derived and/or modified CDS sequence (opt3) from neuraminidase__InfluenzaA__ABE97696
augaaccccaaucagaagaucauuaccauaggcagcaucugcauggugacagggauugucucccugaugcuccaaguuggaaacaugaucucuauuugggugucacacaguauccauacugguaaucagcaccaggccgagccuauaagcaacacgaauuuccuuaccgaaaaagcuguagcauccgugaagcuggccggcaacucuucguuguguccaaucaaugggugggcggucuacucaaaagacaacagcauuagaaucggaaguaagggcgauguguuuguuauuagggagccguucaucuccugcucucauuuagaaugucggacauuuuuccugacucagggugcucuacucaaugacaaacacagcaacggguccgugaaggaucgcucaccccaucgaacccugaugaguugcagcgucggagaggccccuucuccauauaauucccguuuugaaucaguggcauggagcgccagugcuugucacgacggcacaucuuggcuuaccauaggcauuuccgggcccgauaacggagcaguagccguucugaaguacaaugguaucauuacugacacaaucaaaagcuggagaaacaauaucuugaggacccaagagucggagugcgcuugugugaacggcucuugcuucacggucaugacugaugggccuuccaacggacaggccucacacaagauuuuuaaaauggaaaagggcaaaguggugaagagugucgagcucgacgcgccaaauuaucauuacgaagaguguagcugcuaucccgaugccggugagauaaccuguguuugccgggacaacuggcacggguccaaucgcccuugggugucuuucaaccagaaucuggaauaccagaucggauauauuugcagcggcguauuuggcgauaacccaagaccgaaugacgggacaggaucauguggucccgugaguuccaacggcgcauacggggucaagggauucagcuuuaaauacggcaaugguguguggaucgggaggacuaagucuaccaacucacggaguggcuucgagaugauaugggauccuaauggauggacagaaaccgacagcuccuuuucuguuaaacaagacauuguggcuaucacggauuggucgggcuauagcggguccuucguccagcauccagagcugacuggacucgacugcauccgccccuguuucuggguggaauuaauucgagguagaccuaaggagucaacaaucuggaccaguggcucuagcauuuccuuuugcgggguaaacucagauacuguuggauggagcuggccagacggcgccgagcugcccuucacaauagauaaauga

SEQ ID NO: 143074 - RNA, 1350 nt, Artificial Sequence
  derived and/or modified CDS sequence (opt3) from neuraminidase__InfluenzaA__ABE97697
augaaccccaaucagaagaucauuaccauaggcagcaucugcauggugacagggauugucucccugaugcuccaaguuggaaacaugaucucuauuugggugucacacaguauccauacugguaaucagcaccaggccgagccuauaagcaacacgaauuuccuuaacgaaaaagcuguagcauccgugaagcuggccggcaauucuucguuguguccaaucaacgggugggcggucuacucaaaagacaauagcauuagaaucggaaguaagggcgauguguuuguuauuagggagccguucaucuccugcucucauuuagaaugucggaccuuuuuccugacacagggugcucuacucaacgacaaacacagcaaugggacugugaaggaucgcucaccccaucgaacccugauguccugcccugucggagaggccccaagucccuauaacagccguuuugaaucuguggcaugguccgccucagcuugucacgacggcacaagcuggcuuaccauaggcauuagugggccugauaauggagcaguagccguucugaaguacaacgguaucauuacugacacaaucaaaucuuggagaaauaacaucuugaggacccaagaguccgagugcgcuugugugaacggcagcugcuucacggucaugacugaugggccaucgaauggacaggccucucacaagauuuuuaaaauggaaaagggcaaaguggugaaguccgucgagcucgacgcgcccaacuaucauuacgaagaguguucaugcuauccugaugccggugagauaaccuguguuugccgggacaauuggcacgggaguaaccgcccaugggugagcuucaaucagaaccuggaauaccagaucggauauauuugcuccggcguauuuggcgauaauccgagacccaacgacgagacagggucuuguggaccugugagcucaaauggugcauacggcgucaagggguucaguuuuaaauacggaaacggcguguggaucgguaggacuaaguccaccaauagccggucuggguucgaaaugauaugggauccaaacggcuggacagagaccgacucaaguuuuagcguuaaacaagacauuguggcuaucacggauugguccggauauucuggcucguucguccagcaucccgaacugacugggcucgacugcauccgcccuuguuucuggguggaguuaauucgaggaagaccaaaggagagcacaaucuggaccuccgguucaaguauuucuuuuugcggcguaaauagcgauacuguugggugguccuggcccgacggagccgaacugccguucacaauagauaaauga

SEQ ID NO: 143075 - RNA, 1350 nt, Artificial Sequence
  derived and/or modified CDS sequence (opt3) from neuraminidase__InfluenzaA__ABE97702
augaaccccaaucagaagaucauuaccauaggcagcaucugcauggugacagggauugucucccugaugcuccaaguuggaaacaugaucucuauuugggugucacacaguauccauacugguaaucagcaccaggccgagccuauaagcaacacgaauuuccuuaccgaaaaagcuguagcauccgugaagcuggccggcaacucuucguuguguccaaucaaugggugggcggucuacucaaaagacaacagcauuagaaucggaaguaagggcgauguguuuguuauuagggagccguucaucuccugcucucauuuagaaugucggacauuuuuccugacucagggugcucuacucaaugacaaacacagcaacgggaccgugaaggaucgcucaccccaucgaacacugauguccugcccugucggagaggccccaagucccuauaauagccguuuugaaucuguggcaugguccgccucagcuugucacgacggcaccagcuggcuuacuauaggcauuagugggccugauaacggagcaguagccguucugaaguacaaugguaucauuacagacaccaucaaaucuuggagaaacaauaucuugaggacgcaagaguccgagugcgcuugugugaacggcagcugcuucacugucaugaccgaugggccaucgaacggacaggccucucacaagauuuuuaaaauggaaaagggcaaaguggugaaguccgucgagcucgacgcgcccuauuaccauuaugaagaguguucaugcuacccugaugccggugagauaacauguguuugccgggacaauuggcacgggaguaaccgcccaugggugagcuucaaucagaaccuggaauaucagaucggauacauuugcuccggcguauuuggcgauaauccgagacccaacgacgggacuggaucuugugguccugugagcucaaauggcgcauacggggucaagggauucaguuuuaaauauggcaacgguguguggaucgggaggaccaaguccacaaauagccggucuggcuucgagaugauaugggauccaaacggauggaccgaaacggacucaaguuuuagcguuaaacaagacauuguguccaucacugauuggucuggcuacucggggagcuucguccagcaucccgagcugacaggacucgacugcauccgcccuuguuucuggguggaauuaauucgagguagaccaaaggaguccaccaucuggacuucaggcaguucuauuagcuuuugcgggguaaauuccgauacaguuggauggucauggcccgacggcgcugagcugccguucaccacggauaaauga

SEQ ID NO: 143076 - RNA, 1350 nt, Artificial Sequence; identical to SEQ ID NO: 143068
  derived and/or modified CDS sequence (opt3) from neuraminidase__InfluenzaA__ABE97703

SEQ ID NO: 143077 - RNA, 1350 nt, Artificial Sequence; identical to SEQ ID NO: 143068
  derived and/or modified CDS sequence (opt3) from neuraminidase__InfluenzaA__ABE97705

SEQ ID NO: 143078 - RNA, 1350 nt, Artificial Sequence
  derived and/or modified CDS sequence (opt3) from neuraminidase__InfluenzaA__ABE97706
augaaccccaaucagaagaucauuaccauaggcagcaucugcauggugacagggauugucucccugaugcuccaaguuggaaacaugaucucucuuugggugucacacaguauucauacugguaaucagcaccaggccgagccuaucagcaacacgaauuuccugaccgaaagagcuguagcauccgugaaauuggccggcaacucuucguuauguccaauaaaugggugggcggucuacucaaaggacaacagcaucaggauuggaaguaaaggcgauguguuuguuauccgggagccguucauuuccugcucucaucuggaaugucgcacauuuuuccuaacucagggugcucuccugaaugacaagcacagcaacgggaccgugaaagaucgaucaccccaucguacacuuauguccugcccugucggagaggccccaagucccuauaauagcagauuugaaucuguggcaugguccgccucagcuugucacgacggcaccagcuggcugacuaucggcauaagugggccugauaacggagcaguagccguuuugaaguacaaugguauuaucacagacaccauuaagucuuggaggaacaauauccuccggacgcaagaguccgagugcgcuugugugaacggcagcugcuucacugucaugaccgaugggccaucgaacggacaggccucucacaaaaucuuuaagauggaaaaaggcaagguggugaaauccgucgagcuggacgcgcccaauuaucauuacgaagaguguucaugcuauccugaugccggugagauuacauguguuugccgcgacaacuggcacgggaguaauagaccaugggugagcuucaaccagaaucuggaauaccagauaggauauaucugcuccggcguauuuggcgauaacccgaggcccaaugacgggacuggaucuugugguccugugagcucaaacggcgcauacggggucaagggauucaguuuuaaguacggcaaugguguguggauugggcggaccaaauccacaagcucucgcucaggcuucgagaugaucugggauccaaacggauggaccgaaacggacaguagcuuuuccguuaagcaagacauaguggcuauuacugauuggucuggcuauucggggagcuucguccagcaucccgagcucacaggauuagacugcauccgaccuuguuucuggguggaacugaucagagguaggccaaaagaguccaccauuugggccucaggcaguucuaucagcuuuugcgggguaaauuccgauacuguuggauggucauggcccgacggcgcagagcuuccguucacaauugauaaguga

SEQ ID NO: 143079 - RNA, 1350 nt, Artificial Sequence
  derived and/or modified CDS sequence (opt3) from neuraminidase__InfluenzaA__ABE97707
augaaccccaaucagaagaucauuaccauaggcagcaucugcauggugacagggauugucucccugaugcuccaaguuggaaacaugaucucuauuugggugucacacaguauccauacugguaaucagcaccaggccgagccuauaagcaacacgaauuuccuuaccgaaaaagcuguagcauccgugaagcuggccggcaacucuucguuguguccaaucaaagggugggcggucuacucaaaggacaauagcauuagaaucggaaguaaaggcgauguguuuguuauuagggagccguucaucuccugcucucauuuagaaugucggacauuuuuccugacucagggugcucuacucaacgacaagcacagcaaugggaccgugaaggaucgcucaccccaucgaacacugauguccugcccugucggagaggccccaagucccuauaacagccguuuugaaucuguggcaugguccgccucagcuugucacgacggcaccagcuggcuuacuauaggcauuagugggccugauaauggagcaguagccguucugaaauacaacgguaucauuacagacaccaucaagucuuggagaaauaacaucuugaggacgcaagaguccgagugcgcuugugugaauggcagcugcuucacugucaugaccgaugggccaucgaacggacaggccucucacaaaauuuuuaagauggaaaaaggcaagguggugaaguccgucgagcucgacgcgcccaacuaucauuacgaagaguguucaugcuauccugaugccggugagauaacauguguuugccgggacaauuggcacgggaguaaccgcccaugggugagcuucaaucagaaccuggaauaccagaucggauauauuugcuccggcguauuuggcgauaauccgagacccaacgacgggacuggaucuugugguccugugagcucaaauggcgcauacggggucaaaggauucaguuuuaaguacggcaacgguguguggaucgggaggaccaaauccacaaauagccggucuggcuucgagaugauaugggauccaaacggauggaccgaaacggacucaaguuuuagcguuaagcaagacauuguggcuaucacugauugguccggcuauucugggucguucguccagcaucccgagcugacaggacucgacugcauccgcccuuguuucuggguggaauuaauucgagguagaccaaaagagagcaccaucuggacuuccggcucaaguauuucuuuuugcgggguaaauagcgauacaguuggaugguccuggcccgacggcgccgagcugccguucaccauagauaaguga

SEQ ID NO: 143080 - RNA, 1350 nt, Artificial Sequence
  derived and/or modified CDS sequence (opt3) from neuraminidase__InfluenzaA__ABE97708
augaaccccaaucagaagaucauuaccauaggcagcaucugcauggugacagggauugucucccugaugcuccaaguuggaaacaugaucucuauuugggugucacacaguauccauacugguaaucagcaccaggccgagccuauaagcaacacgaauuuccuuaccgaaaaagcuguagcauccgugaagcuggccggcaacucuucguuguguccaaucaaugggugggcggucuacucaaaagacaacagcauuagaaucggaaguaagggcgauguguuuguuauuagggagccguucaucuccugcucucauuuagaaugucggacauuuuuccugacucacggugcucuacucaaugacaaacauagcaacgggaccgugaaggaucgcucaccccaccgaacacugauguccugcccugucggagaggccccaagucccuauaauagccguuuugaaucuguggcaugguccgccucagcuugucacgacggcaccagcuggcuuacuauaggcauuagugggccugauaacggagcaguagccguucugaaguacaaugguaucauuacagacaccaucaaaucuuggagaaacaauaucuugaggacgcaggaguccgagugcgcuugugugaacggcagcugcuucacugucaugaccgaugggccaucgaacggacaagccucucauaagauuuuuaaaaugaagaaaggcaagguggugaaguccgucgaacucgacgcgcccaauuaucacuacgaggaauguucaugcuauccugaugccggugagauaacauguguuugccgggacaacuggcaugggaguaaucgcccaugggugagcuucaaccagaaucuggaguaccagaucggauauauuugcuccggcguauuuggcgauaacccgagacccaaugacgggacuggaucuugugguccugugagcucaaacggcgcauacggggucaaaggauucaguuuuaaguacggcaaugguguguggaucgggaggaccaaauccacaaacagccggucuggcuucgaaaugauaugggauccaaauggauggaccgagacggacucaaguuuuagcguuaagcaggacauuguggcuaucacugauugguccggcuauucugggucguucguccaacaccccgaacugacaggacucgacugcauccgcccuuguuucuggguggaguuaauucgagguagaccaaaagaaagcaccaucuggacuuccggcucaaguauuucuuuuugcgggguaaacagcgauacaguuggaugguccuggcccgacggcgccgagcugccguucaccauagauaaguga

SEQ ID NO: 143081 - RNA, 1350 nt, Artificial Sequence
  derived and/or modified CDS sequence (opt3) from neuraminidase__InfluenzaA__ABE97710
augaaccccaaucagaagaucauuaccauaggcagcaucugcauggugacagggauugucucccugaugcuccaaguuggaaacaugaucucuauuugggugucacacaguauccauacugguaaucagcaccaggccgagccuauaagcaacacgaauuuccuuaccgaaaaagcuguagcauccgugaagcuggccggcaacucuucguuguguccaaucaaugggugggcggucuacucaaaagacaacagcauuagaaucggaaguaagggcgauguguuuguuauuagggagccguucaucuccugcucucauuuagaaugucggacauuuuuccugacucagggugcucuacucaaugacaaacacagcaacgggaccgugaaggaucgcucaccccaucgaacacugauguccugcccugucggagaggccccaagucccuauaauagccguuuugaaucuguggcaugguccgccucagcuugucacgacggcaccagcuggcuuacuauaggcauuagugggccugauaacggagcaguagccguucugaaguacaaugguaucauuacagacaccaucaaaucuuggagaaacaauaucuugaggacgcaagaguccgagugcgcuugugugaacggcagcugcuucacugucaugaccgaugggccaucgaacggacaggccucucacaagauuuuuaaaauggaaaagggcaaaguggugaaguccgucgagcucaaugcgcccaacuaucauuacgaagaguguucaugcuauccugacgccggugagauaacauguguuugccgggauaauuggcacgggaguaaccgcccaugggugagcuucaaucagaaccuggaauaccagaucggauauauuugcuccggcguauuuggcgacaauccgagacccaacgaugggacuggaucuugugguccugugagcucaaauggcgcauacggggucaagggauucaguuuuaaauacggcaacgguguguggaucgggaggaccaaguccacaaauagccggucuggcuucgagaugauaugggacccaaacggauggaccgaaacggauucaaguuuuagccugaaacaagacauuguugcuaucacugacugguccggcuauucugggucguucgugcagcaucccgagcucacaggauuagauugcauccgcccuuguuucugggucgaacugauucgagguagaccaaaggagagcaccaucuggacuuccggcucaaguauuucuuuuugcggggugaauagcgacacaguaggaugguccuggcccgauggcgccgagcuuccguucaccauagacaaauga

SEQ ID NO: 143082 - RNA, 1350 nt, Artificial Sequence
  derived and/or modified CDS sequence (opt3) from neuraminidase__InfluenzaA__ABE97711
augaaccccaaucagaagaucauuaccauaggcagcaucugcauggugacagggauugucucccugaugcuccaaguuggaaacaugaucucuauuugggugucacacaguauccauacugguaaucagcaccaggccgagccuauaagcaacacgaauuuccuuaccgaaaaagcuguagcauccgugaagcuggccggcaacucuucguuguguccaaucaaugggugggcggucuacucaaaagacaacagcauuagaaucggaaguaagggcgauguguuuguuauuagggagccguucaucuccugcucucauuuagaaugucggacauuuuuccugacucagggugcucuacucaaugacaaacacagcaacgggaccgugaaggaucgcucaccccaucgaacacugauguccugcccugucggagaggccccaagucccuauaauagccguuuugaaucuguggcaugguccgccucagcuugucacgacggcaccagcuggcuuacuauaggcauuagugggccugauaacggagcaguagccguucugaaguacaaugguaucauuacagacaccaucaaaucuuggagaaacaauaucuugaggacgcaagaguccgagugcgcuugugugaacggcagcugcuucacugucaugaccgaugggccaucggacggacaggccucucacaagauuuuuaaaauggaaaagggcaaaguggugaaguccgucgagcucgaugcgcccaacuaucauuacgaagaguguucaugcuauccugacgccggugagauaacauguguuugccgggauaauuggcacgggaguaaccgcccaugggugagcuucaaucagaaccuggaauaccagaucggauauauuugcuccggcguauuuggcgacaauccgagacccaacgaugggacuggaucuugugguccugugagcucaaauggcgcauacggggucaagggauucaguuuuaaauacggcaacgguguguggaucgggaggaccaaguccacaaauagccggucuggcuucgagaugguuugggacccaaacggauggaccgaaacggacucaaguuuuagcgugaaacaagauauagucgcuauuacugacugguccggcuauucugggucguucgugcagcaucccgagcugacaggacucgauugcauccgcccuuguuucuggguagaauuaauccgagguagaccaaaggagagcaccauuuggacuuccggcucaaguaucucuuuuugcgggguuaauagcgacacagugggaugguccuggcccgauggcgccgagcugccguucaccauugacaaauga

SEQ ID NO: 143083 - RNA, 1350 nt, Artificial Sequence; identical to SEQ ID NO: 143068
  derived and/or modified CDS sequence (opt3) from neuraminidase__InfluenzaA__ABE97712

SEQ ID NO: 143084 - RNA, 1350 nt, Artificial Sequence; identical to SEQ ID NO: 143068
  derived and/or modified CDS sequence (opt3) from neuraminidase__InfluenzaA__ABE97713

SEQ ID NO: 143085 - RNA, 1350 nt, Artificial Sequence; identical to SEQ ID NO: 143068
  derived and/or modified CDS sequence (opt3) from neuraminidase__InfluenzaA__ABE97715

SEQ ID NO: 143086 - RNA, 1350 nt, Artificial Sequence
  derived and/or modified CDS sequence (opt3) from neuraminidase__InfluenzaA__ABE97717
augaaccccaaucagaagaucauuaccauaggcagcaucugcauggugacagggauugucaaccugaugcuccaaguuggaaauaugaucuccauuugggugucucacucaauccauacugguaaccagcaccaggccgagccuauaaguaauacgaacuuccuuaccgaaaaagcuguagcaagcgugaagcuggccggcaauuccucuuuguguccaaucaacgggugggcggucuacucgaaagacaauucaauuagaaucggaagcaagggcgauguguuuguuauuagggagccguucaucaguugcucccauuuagaaugucggacauuuuuccugacucagggugcucuacucaacgacaaacacucuaaugggaccgugaaggaucgcagcccccaucgaacacugauguccugcccugucggagaggccccaucacccuauaacagucguuuugaaagcguggcauggucugccuccgcuugucacgacggcaccucauggcuuacuauaggcauuagcgggccugauaauggagcaguagccguucugaaguacaacgguaucauuacagacaccaucaaaaguuggagaaauaacaucuugaggacgcaagagucugagugcgcuugugugaacggcuccugcuucacugucaugaccgaugggccaagcaauggacaggccucgcacaagauuuuuaaaauggaaaagggcaaaguggugaagucugucgagcucgacgcgcccaacuaucauuacgaagaguguuccugcuauccugaugccggugagauaacauguguuugccgggacaauuggcacgggucaaaccgcccaugggugaguuucaaucagaaccuggaauaccagaucggauauauuugcagcggcguauuuggcgauaauccgagacccaacgacgggacuggauccugugguccugugccaucuaauggcgcauacggggucaagggauucagcuuuaaauacggcaacgguguguggaucgggaggaccaagucaacaaauagucgguccggcuucgagaugauaugggaucccaacggauggaccgaaacggacagcucuuuuucaguuaaacaagacauuguggcuaucacugauuggaguggcuauagcggguccuucguccagcauccugagcugacaggacucgacugcauccgcccauguuucuggguggaauuaauucgagguagacccaaggagucuaccaucuggacuucgggcagcuccauuucauuuugcgggguaaauagugauacaguuggauggucuuggccggacggcgccgagcugccuuucaccauagauaaauga

SEQ ID NO: 143087 - RNA, 1350 nt, Artificial Sequence
  derived and/or modified CDS sequence (opt3) from neuraminidase__InfluenzaA__ABE97718
augaaccccaaucagaagaucauuaccauaggcagcaucugcauggugacagggauugucucccugaugcuccaaguuggaaacaugaucucuauuugggugucacacaguauccauacugguaaucagcaccaggccgagccuauaagcaacacgaauuuccuuaccgaaaaagcuguagcauccgugaagcuggccggcaacucuucguuguguccaaucaaugggugggcggucuacucaaaagacaacagcauuagaaucggaaguaagggcgauguguuuguuauuagggagccguucaucuccugcucucauuuagaaugucggacauuuuuccugacucagggugcucuacucaaugacaaacacagcaacgggaccgugaaggaucgcucaccccaucgaacacugauguccugcccugucggagaggccccaagucccuauaauagccguuuugaaucuguggcaugguccgccucagcuugucacgacggcaccagcuggcuuacuauaggcauuagugggccugauaacggagcaguagccguucugaaguacaaugguaucauuacagacaccaucaaaucuuggagaaacaauaucuugaggacgcaagaguccgagugcgcuugugugaacggcagcugcuucacugucaugaccgaugggccaucgaacggacaggccucucacaagauuuuuaaaauggaaaagggcaaaguggugaaguccgucgagcucgacgcgcccaauuaucauuacgaagaguguucaugcuauccugaugccggugagauaacauguguuugccgggacaacuggcacgggaguaaucgcccaugggugagcuucaaccagaaucuggaauaccagaucggauauauuugcuccggcguauuuggcgauaacccgagacccaaugacgggacuggaucuugugguccugugagcucaaacggcgcauacggggucaagggauucaguuuuaaauacggcaaugguguguggaucgggaggaccaaguccacaaacagccggucuggcuucgagaugauaugggauccaaauggauggaccgaaacggacucaaguuuuagcguuaaacaagacauuguggcuaucacugauugguccggcuauucugggucguucguccagcaucccgagcugacaggacucgacugcauccgcccuuguuucuggguggaauuaauucgagguagaccaaaggagagcaccaucuggacuuccggcucaaguauuucuuuuugcgggguagauagcgacacaguuggaugguccuggcccgauggcgccgagcugccguucaccauagacaaauga

SEQ ID NO: 143088 - RNA, 1350 nt, Artificial Sequence
  derived and/or modified CDS sequence (opt3) from neuraminidase__InfluenzaA__ABE97719
augaaccccaaucagaagaucauuaccauaggcagcaucugcauggugacagggauugucucccugaugcuccaaguuggaaacaugaucucuauuugggugucacacaguauccauacugguaaucagcaccaggccgagccuauaagcaacacgaauuuccuuaccgaaaaagcuguagcauccgugaagcuggccggcaacucuucguuguguccaaucaaugggugggcggucuacucaaaagacaacagcauuagaaucggaaguaagggcgauguguuuguuauuagggagccguucaucuccugcucucauuuagaaugucggacauuuuuccugacucagggugcucuacucaaugacaaacacagcaacgggaccgugaaggaucgcucaccccaucgaacacugauguccugcccugucggagaggccccaagucccuauaauagccguuuugaaucuguggcaugguccgccucagcuugucacgacggcaccagcuggcuuacuauaggcauuagugggccugauaacggagcaguagccguucugaaguacaaugguaucauuacagacaccaucaaaucuuggagaaacaauaucuugaggacgcaagaguccgagugcgcuugugugaacggcagcugcuucacugucaugaccgaugggccaucgaacggacaggccucucacaagauuuuuaaaaugaagaaaggcaagguggugaaguccgucgaacucgacgcgcccaauuaucauuacgaggaauguucaugcuauccugaugccggugagauaacauguguuugccgggacaacuggcacgggaguaaucgcccaugggugagcuucaaccagaaucuggaguaccagaucggauauauuugcuccggcguauuuggcgauaacccgagacccaaugacgggacuggaucuugugguccugugagcucaaacggcgcauacggggucaaaggauucaguuuuaaguacggcaaugguguguggaucgggaggaccaaauccacaaacagccggucuggcuucgaaaugauaugggauccaaauggauggaccgagacggacucaaguuuuagcguuaagcaagacauuguggcuaucacugauugguccggcuauucugggucguucguccagcaucccgaacugacaggacucgacugcauccgcccuuguuucuggguggaguuaauucgagguagaccaaaagaaagcaccaucuggacuuccggcucaaguauuucuuuuugcgggguaaacagcgauacaguuggaugguccuggcccgacggcgccgagcugccguucaccauagauaaguga

SEQ ID NO: 143089 - RNA, 1350 nt, Artificial Sequence
  derived and/or modified CDS sequence (opt3) from neuraminidase__InfluenzaA__ABE97720
augaaccccaaucagaagaucauuaccauaggcagcaucugcauggugacagggauugucucccugaugcuccaaguuggaaacaugaucucuauuugggugucacacaguauccauacugguaaucagcaccaggccgagccuauaagcaacgcuaauuuccuuacggaaaaagcaguagccuccgugaagcuggcgggcaacucuucguuguguccaaucaaugggugggcugucuacucaaaagacaacagcauuagaaucggaaguaagggcgauguguuuguuauuagggagccguucaucuccugcucucauuuagaaugucggaccuuuuuccugacacagggugcccuacucaaugacaaacacagcaacgggacugugaaggaucgcucaccccaucgaacccugauguccugcccugucggagaggcaccaagucccuauaauagccguuuugaaucuguggccugguccgcuucagcaugucacgacggcacaagcuggcuuaccauaggcauuagugggccugauaacggagccguagcuguucugaaguacaaugguaucauuacugacacaaucaaaucuuggagaaacaauaucuugaggacccaagaguccgagugcgccugugugaacggcagcugcuucacggucaugacugaugggccaucgaacggacaggcgucucacaagauuuuuaaaauggaaaagggcaaaguggugaaguccgucgagcucgacgcacccaauuaucauuacgaagaguguucaugcuauccugaugccggugagauaaccuguguuugccgggacaacuggcacgggaguaaucgcccaugggugagcuucaaccagaaucuggaauaccagaucggauauauuugcuccggcguauuuggcgauacaccgagacccaacgacgggacuggaucuugugguccugugagcucaaauggcgcuuacggggucaagggauucaguuuuaaauacggcaacgguguguggaucgggaggaccaaguccacaaauagccggucuggcuucgagaugauaugggauccaaacggauggaccgaaacggacucaaguuuuagcguuaaacaagacauuguggccaucacugauugguccggcuauucugggucguucguccagcaucccgagcugacaggacucgacugcauccgcccuuguuucuggguggaauuaauucgagguagaccaaaggagagcaccaucuggacuuccggcucaaguauuucuuuuugcgggguaaauagcgauacaguuggaugguccuggcccgacggcgcagagcugccguucaccauagauaaauga

SEQ ID NO: 143090 - RNA, 1410 nt, Artificial Sequence; identical to SEQ ID NO: 142861
  derived and/or modified CDS sequence (opt3) from neuraminidase__InfluenzaA__ABF47553

SEQ ID NO: 143091 - RNA, 1413 nt, Artificial Sequence; identical to SEQ ID NO: 142444
  derived and/or modified CDS sequence (opt3) from neuraminidase__InfluenzaA__ABF47564

SEQ ID NO: 143092 - RNA, 1413 nt, Artificial Sequence
  derived and/or modified CDS sequence (opt3) from neuraminidase__InfluenzaA__ABF47575
augaaccccaaucagaagaucauuaccauaggcagcaucuccauugccaucgggauuaucucucugaugcuccaaauaggaaacaucauuucaaucugggcuagucacagcauucagacagguucccagaaucauacuggcgugugcaaccagagaaucauaacguacgaaaauucuaccugggucaaccacacauauguuaauauuaacaauacuaacgugaucgcagggaaagacaagaccucgguagcccuugcgggaaauucaagccuguguaguauuuccggcugggcuaucuacacaaaagauaacucuaucaggauugguagcaagggggacguguucgucauacgggagccuuuuaucuccugcucacauuucgagugucgcaccuuuuucuugacucaaggagccuuacugaaugauaaacacaguaacggcacagugaaggaccgaagcccauaucgugcacuaaugucuugcccgcucggcgaagcccccuccccuuacaauucaaaguuugagagcguugcuuggagugcaucugccugucaugaugggaugggauggcugaccauugguaucuccggcccagacaacggggcuguggccguccuuaaauauaacggaauaauuacggaaacuaucaagagcuggaaaaagcagauccugagaacccaggagucggagugcguguguguaaauggcucuugcuucacaauuaugacugauggucccuccaacggggcggcaucauacaaaaucuuuaagauugaaaagggaaaaguuaccaagaguauagaguugaaugccccuaacuuccacuaugaagaguguagcugcuacccagacacaggcaccgugaugugugucugcagggauaauuggcacggcuccaaccggcccugggugucuuuuaaucagaaccucgacuaccaaaucggguauauuugcagcggaguguucggugauaauccucgcccaaaagacggcgaggggucauguaacccggucacgguugauggagcuaauggcgugaaggguuuuaguuacaaauaugggaacggcguauggaucggaagaacuaaguccaauaggcugcggaaaggcuucgaaaugaucugggaccccaacggguggacagacaccgauagcgacuuuucugugaagcaggaugucguggccauuacugacuggucaggauacagugguagcuucguucagcauccugagcugacaggccucgauugcauacgcccauguuucuggguggaauuaguccgagggcugcccaaggagaauaccacgaucuggaccuccggaucuucgauuagcuuuugcggcgugaacuccgacacagcaaacuggucauggccugauggugcugaacuuccauucacuaucgacaaauga

SEQ ID NO: 143093 - RNA, 1413 nt, Artificial Sequence; identical to SEQ ID NO: 142444
  derived and/or modified CDS sequence (opt3) from neuraminidase__InfluenzaA__ABF47586

SEQ ID NO: 143094 - RNA, 1410 nt, Artificial Sequence; identical to SEQ ID NO: 142174
  derived and/or modified CDS sequence (opt3) from neuraminidase__InfluenzaA__ABF47597

SEQ ID NO: 143095 - RNA, 1413 nt, Artificial Sequence; identical to SEQ ID NO: 143016
  derived and/or modified CDS sequence (opt3) from neuraminidase__InfluenzaA__ABF47608

SEQ ID NO: 143096 - RNA, 1410 nt, Artificial Sequence
  derived and/or modified CDS sequence (opt3) from neuraminidase__InfluenzaA__ABF47619
augaaccccaaucagaagaucauuaccauaggcagcgugucccugacaaucgccacuauuugcuuccucaugcaaaucgcuauucuugucacgaccguuacacugcacuuuaaacaguacgaguguaacucuccuccaaauaaccaggugauguugugcgaaccgacuaucauagagagaaauaucaccgaaauuguauauuuaacaaacaccacuaucgagaaggaaauuugucccaaacuggcagaguacaggaauuggucaaagccucagugcaaaaucacaggguucgccccauuuaguaaggacaacagcauacggcuauccgcgggaggugauauuugggugacccgcgagcccuaugucucuugugacccuggcaagugcuaccaauucgcucucgggcagggaacgacucugaauaaccgacauucgaaugauaccgugcacgaccguacaccauauagaacucuucugaugaacgaauugggcguucccuuucaucucgguaccaaacagguguguaucgccuggucaagcaguuccugccacgaugggaaggcauggcugcaugucugugugacaggacacgacgagaaugccaccgcuucuuucauuuacgauggcaggcugguagacagcaucggcuccuggaguaaaaacauccuccggacgcaggaaucagagugcguuuguauuaaugggacuugcacaguggucaugaccgauggaagcgcaucuggucgcgccgacacuaagauauuauuuaucgaggaaggcaaaauugugcacaucuccccucugucagggagcgcucaacauguggaggaaugcaguuguuauccaagauacccgggagucaggugcguuugucgggauaacuggaagggcucuaaccgccccauaguggacauuaauguaaaggauuacuccaucgugagcucguaugucugcucuggucuugugggggacacaccucggaaaaacgacuccgccucaaguagccacuguuugaauccaaacaaugaggaaggaggccauggcguuaaggggugggcguucgaugacggaaacgauguguggauggguagaaccaucuccgagaaacugaggucuggcuacgagacguuuaaggucauugggggauggagcaaacccaauucaaagcuacagaucaaccgacaggugauuguagaccguggcaaucgcagugguuauuccgggauauucagcguugaaggcaaaucuugcaucaacagauguuuuuacguggagcucauuaggggacggaagcaggaaaccgaggucugguggacaucaaauaguaucguggucuucugcggcacuagcgggaccuauggaacagguuccuggccugauggcgcagacaucaaccugaugccaauuuga

SEQ ID NO: 143097 - RNA, 1413 nt, Artificial Sequence
  derived and/or modified CDS sequence (opt3) from neuraminidase__InfluenzaA__ABF47630
augaaccccaaucagaagaucauuaccauaggcagcaucuccauugccaucgggauuaucucucugauacuccaaaucggaaacauuaucucaauuugggcuagucacagcauccagacagguucccagaaucauacuggcauaugcaaccagagaauuaucacguacgaaaauucuaccugggugaaccaaacauaugucaauauuaacaauacuaacguuguggcagggaaagacaagaccucgauggcccuugcgggaaauucaagccuguguccuaucaggggcugggcuaucuacacaaaagauaacaguauucggauagguuccaagggggacguauucgugauccgcgagccauuuauuucuugcagccacuuggagugucgaaccuucuuuuuaacucagggagcccugcuaaaugauaaacauuccaacggcacagucaaggaccguucaccguauagagcacucaugaguugcccccugggcgaagccccuagcccauacaauucuagguucgaguccguggcuuggucagcaagcgccugucacgaugggcuuggauggcugaccaucgguauaaguggccccgacaacggggcuguugccguguugaaguauaacggaauuaucacggaaacuaucaaaucuuggaagaaacggauucuccgcacccaggaguccgagugcgucuguaugaauggcagcugcuuuacaaucaugacugaugguccuucgaacggggcggcaucuuacagaauuuucaagauagaaaaaggaagggugaccaaguccaucgagcuggacgccccaaauuaucauuacgaagaguguucaugcuaccccgauacaggcaccguaauguguguuugccgggacaacuggcacggcaguaaucgcccuugggugagcuuuaaccagaaucuggauuaucaaauuggguacaucugcuccggagucuucggugacaacccacgaccgaaggauggcgaggggucuuguaaucccgugacgguggacggagcugacggcgucaaagguuuuagcuauagauacgggaacggcguuuggaucggaaggacuaagucaaaucggcuccguaaaggcuucgaaaugauuugggauccuaacggguggacagacaccgauagugacuuuuccaugaagcaggauauaguggccaugacugacuggagcggauauucugguucauucguacagcacccagaguuaacaggccuggauugcaugcgccccuguuuuuggguggaacuugucagaggguugccuagggagaauaccacgaucuggaccaguggaagcuccauuucuuucugcggcgugaacucggacacagcaaauuggagcuggccagauggugcugaacugcccuucacuaucgacaaauga

SEQ ID NO: 143098 - RNA, 1413 nt, Artificial Sequence
  derived and/or modified CDS sequence (opt3) from neuraminidase__InfluenzaA__ABF47652
augaaccccaaucagaagaucauuaccauaggcagcaucuccauugccaucgggauuaucucucugauacuccaaaucggaaacauuaucucaauuugggcuagucacagcauccagacagguucccagaaucauacuggcauaugcaaccagagaauuaucacguacgaaaauucuaccugggugaaccaaacauaugugaauauuaacaauacuaacguuguggcagggaaagacaagaccucgaugacacuugccggaaauucaagccuguguccuaucaggggcugggcgaucuacaccaaagauaacaguauucggauagguuccaagggggacguauucgugauccgcgagccauuuauuucuugcagccacuuggagugucgaacuuucuuuuuaacacagggagcucugcuaaaugauaaacauuccaacggcaccgucaaggaccguucaccguauagagcccucaugaguugcccccugggcgaagcaccuagcccauacaauucuagguucgaguccguggccuggucagcuagcgcaugucacgaugggcuuggauggcugacgaucgguauaaguggccccgacaacggggccguugcuguguugaaguauaacggaauuaucacugaaaccaucaaaucuuggaagaaacggauucuccgcacacaggaguccgagugcgucuguaugaauggcagcugcuuuacuaucaugaccgaugguccuucgaacggggccgcgucuuacagaauuuucaagauagaaaaaggaagggugacaaaguccaucgagcuggacgcaccaaauuaucauuacgaagaguguucaugcuaccccaacaccggcacgguaauguguguuugccgggauaauuggcacggcaguaaccgcccuugggugagcuuuaaucagaaccuggacuaucaaauuggguacaucugcuccggagucuucggugauaauccacgaccgaaggacggcgaggggucuuguaaccccgugacuguggauggagccgacggcgucaaagguuuuagcuauagauacgggaauggcguuuggaucggaaggacaaagucaaaccggcuccguaaaggcuucgaaaugauuugggacccuaauggguggaccgauacugacagugauuuuuccaugaagcaggacauaguggcuaugacagauuggagcggauauucugguucauucguacagcacccagaguuaaccggccuggacugcaugcgccccuguuuuuggguggaacuugucagaggguugccuagggagaacacgaccaucuggacaaguggaagcuccauuucuuucugcggcgucaauucggauacugccaacuggagcuggccagacggugcagaacugcccuucaccaucgauaaauga

SEQ ID NO: 143099 - RNA, 1413 nt, Artificial Sequence; identical to SEQ ID NO: 143016
  derived and/or modified CDS sequence (opt3) from neuraminidase__InfluenzaA__ABF47663

SEQ ID NO: 143100 - RNA, 1413 nt, Artificial Sequence
  derived and/or modified CDS sequence (opt3) from neuraminidase__InfluenzaA__ABF47674
augaaccccaaucagaagaucauuaccauaggcagcaucuccauugccaucgggauuaucucucugaugcuccaaauaggaaacaucauuucaaucugggcuagucacagcauucagacagguucccagaaucauacuggcgugugcauccagagaauaauuacguacgagaacucuaccugggugaaucacacauauguuaacaucaauaacacuaaugugauugcagggaaagacaagaccucgguaacacuugccggaaacucaagccuguguaguaucuccggcugggcgaucuacaccaaagauaauucuauuaggauagguagcaagggggacguguucgucauccgggaaccuuuuauuuccugcucacauuuggagugucgcacuuucuuuuuaacacaaggagcucugcuaaacgauaaacacaguaauggcaccgugaaggaccgaagcccauaucgugcccucaugucuugcccgcugggcgaagcacccuccccuuacaacucaaaguucgagagcguugccuggagugcuucugcaugucaugaugggaugggauggcuuacgaucgguauauccggcccagacaauggggccguggcuguccugaaauauaacggaauuaucacugaaaccaucaagagcuggaaaaagcagauuuugagaacacaggagucggagugcguguguguaaacggcucuugcuuuacuaucaugaccgauggucccuccaauggggccgcgucauacaaaauuuucaagauagaaaagggaaaaguuacaaagaguaucgagcucaacgcaccuaauuuucacuaugaagaguguagcugcuacccagacaccggcacggugaugugugucugcagggauaacuggcacggcuccaaucggcccugggugucuuucaaccagaaucuggacuaccaaauuggguauaucugcagcggaguguuuggugauaacccucgcccaaaagacggcgaggggucauguaauccggucacuguugauggagccaacggcgugaaggguuucaguuacaaauaugggaauggcguauggaucggaagaacaaaguccaacaggcugcggaaaggcuuugaaaugauuugggaccccaauggguggaccgacacugauagcgacuucucugugaagcaggaugucguggcuauaacagacuggucaggauacagugguagcuuuguucagcauccugagcucaccggcuuagauugcauccgcccauguuucuggguggaacugguccgagggcuucccaaggagaacacgaccauuuggacauccggaucuucgaucagcuucugcggcgucaauuccgacacugccaacuggucauggccugauggugcagaauugccauuuaccauugacaaauga

SEQ ID NO: 143101 - RNA, 1413 nt, Artificial Sequence; identical to SEQ ID NO: 142999
  derived and/or modified CDS sequence (opt3) from neuraminidase__InfluenzaA__ABF47696

SEQ ID NO: 143102 - RNA, 1413 nt, Artificial Sequence
  derived and/or modified CDS sequence (opt3) from neuraminidase__InfluenzaA__ABF47707
augaaccccaaucagaagaucauuaccauaggcagcaucugcauggccauugggaucauuucccugauccuccaaauaggaaacaucauuucuaucugggugucacacaguauucagacagguagccagaaucauacuggcaucuguaaccagagaauaauuacguacgaaaauuccaccugggucaaccaaacauauguuaauaucucuaacacuaaugugguagcugggaaaggaaccacaucgaugacccuugcaggcaacucaagccugugcccuauuagggguugggccaucuacaguaaggacaauuccauccggauugggucuaaaggagauguguucgucauacgcgaaccauuuaucagcuguucccacuuggagugccgaacuuucuuuuuaacacagggcgcgcugcuaaacgacaagcauucaaauggcaccgugaaagaucguaguccguauagagcucucaugagcugucccauuggggaagccccuucuccauacaacuccagguucgagucaguugcauggagcgccagugcuugccacgacggaauggguuggcugacgaucggcauaucugggcccgaugacggagcaguggccguccuuaaguauaauggcauuaucacugaaaccaucaaguccuggcggaaacagauucugcgcacacaggagagcgagugugugugcguaaacgguucguguuuuacuaucaugaccgaugggccuucugacggaccagcuuccuacagaauuuucaagauagaaaaaggcaagaucacaaaaucaauugaguuggaugcccccaacagucauuaugaagagugcagcuguuacccugacaccggcacgguuaugugcgugugcagggauaauuggcacggguccaaccggccaugggucucuuuuaaucaaaaccucgacuaccagaucggauauaucuguagcgguguguucggcgauaauccgcgccccaaggacgggaagggaucaugcgacccugugaacgucgauggcgcggacgguguuaaaggguuuaguuaccgauauggcaauggaguguggauuggcagaacuaaguccaacagcucuaggaaaggguucgagaugauaugggauccaaauggauggacagacaccgauucaaacuuucugguaaagcaggacguggucgcaaugacugauuggagugguuacagcggcuccuucgugcagcaccccgaacugacagggcucgacuguaugcggccuugcuuuuggguugaguuaauccguggacgcccaagagagaaaaccacgauuuggaccucuggcucgagcaucuccuucuguggugucaauucagauacagugaacuggaguuggcccgacggggccgagcugccguucacuauugauaaguga

SEQ ID NO: 143103 - RNA, 1413 nt, Artificial Sequence; identical to SEQ ID NO: 142999
  derived and/or modified CDS sequence (opt3) from neuraminidase__InfluenzaA__ABF47718

SEQ ID NO: 143104 - RNA, 1413 nt, Artificial Sequence; identical to SEQ ID NO: 142999
  derived and/or modified CDS sequence (opt3) from neuraminidase__InfluenzaA__ABF47729

SEQ ID NO: 143105 - RNA, 1413 nt, Artificial Sequence; identical to SEQ ID NO: 142999
  derived and/or modified CDS sequence (opt3) from neuraminidase__InfluenzaA__ABF47740

SEQ ID NO: 143106 - RNA, 1413 nt, Artificial Sequence
  derived and/or modified CDS sequence (opt3) from neuraminidase__InfluenzaA__ABF47751
augaaccccaaucagaagaucauuaccauaggcagcaucugcauggccauugggaucauuucccugauccuccaaauaggaaacaucauuucuaucugggugucacacaguauucagacagguagccagaaucauacuggcaucuguaaccagagaauaauuacguacgaaaauuccaccugggucaaccaaacauauguuaauaucaacaauacuaacgugguagcugggaaagacaccacaucugugacccuugcaggaaauucgucacugugcccuauuaggggcugggccaucuacagcaaggauaacaguauccggauugguuccaaaggggacgucuucgugauacgcgaaccauuuaucucuuguagccacuuggagugccgaacuuucuuuuuaacacagggagcgcugcuaaaugauaagcauuccaacggcaccguuaaagaccguucaccguauagagcucucaugaguugucccauuggcgaagccccuagcccauacaauucuagguucgaguccguggcauggucagccagcgcuugccacgaugggaugggauggcugacgaucgguauaaguggccccgacgauggggcagucgccgugcuuaaguauaacggaauuaucacugaaaccaucaagucuuggcggaaacgcauucugagaacacaggaguccgaguguguaugcguuaacggcagcuguuuuacuaucaugaccgacgguccuucgaaugggccagcuucuuacaggauuuucaagauagaaaaaggaaagaucacaaaauccauugaguuggaugcccccaacucacauuaugaagagugcaguuguuacccugacaccggcacggugaugugcgucugccgggauaauuggcacggcagcaaccgcccauggguguccuuuaaucagaaccucgacuaccaaaucggguauaucuguucuggaguguucggugauaauccgcgacccaaggacggcaaggggagcugcgacccugucacuguugauggagcggacggcgugaaagguuuuucauacagauaugggaacggcguauggauuggaaggacaaagaguaauuccagccggaaaggcuucgagaugauaugggauccaaacggguggaccgacacugauucuaauuuucuggugaagcaggacgucguggcaaugacagauuggucaggauacagugguagcuucguucagcaccccgaacugaccggccucgacuguaugcguccuugcuuuuggguggaguuaauccgcgggagaccaagggagaaaacgaccauuuggacauccggaucuucgaucagcuucuguggcgucaacuccgauacugccaauuggucauggcccgacggugcugagcugccguucaccauugauaaguga

SEQ ID NO: 143107 - RNA, 1413 nt, Artificial Sequence
  derived and/or modified CDS sequence (opt3) from neuraminidase__InfluenzaA__ABF47773
augaaccccaaucagaagaucauuaccauaggcagcaucugcaugacaauugggaucauuucccugauccuccaaauaggaaacaucauuucuaucugggugucacacaguauucagacugguagccagaaucauacgggcaucuguaaccagagaauaauuaccuacgaaaauuccacaugggucaaccaaacuuauguuaauaucaacaauaccaacgugguagccgggaaagacacaaccucugugacucuugcuggaaauucgucacugugcccuauuaggggcugggcaaucuacagcaaggauaacaguauccggauugguuccaaaggggacgucuucgugauacgcgaaccauuuaucucuuguagccacuuggagugccgaacauucuuuuuaacccagggagcccugcuaaaugauaagcauuccaacggcacgguuaaagaccguucaccguauagagcgcucaugaguugucccauuggcgaagcuccuagcccauacaauucuagguucgaguccguggccuggucagcaagcgccugccacgaugggaugggauggcugacuaucgguauaaguggccccgacgauggggcugucgcagugcuuaaguauaacggaauuaucaccgaaacaaucaagucuuggcggaaacgcauucugagaacucaggaguccgaguguguaugcguuaacggcagcuguuuuaccaucaugacagacgguccuucgaaugggccagccucuuacaggauuuucaagauagaaaaaggaaagaucaccaaauccauugaguuggaugcucccaacucacauuaugaagagugcaguuguuacccugacacgggcacugugaugugcgucugccgggauaauuggcacggcagcaaccgcccauggguguccuuuaaucagaaccucgacuaccaaaucggguauaucuguucuggaguguucggugauaauccgcgacccaaggacggcaaggggagcugcgacccugucacaguugauggagccgacggcgugaaagguuuuucauacagauaugggaacggcguauggauuggaaggaccaagaguaauuccagccggaaaggcuucgagaugauaugggauccaaacggguggacugacacagauucuaauuuucuggugaagcaggacgucguggcgaugaccgauuggucaggauacagugguagcuucguucagcaccccgaacugacgggccucgacuguaugcguccuugcuuuuggguggaguuaauccgcgggagaccaagggagaaaaccacaauuuggacuuccggaucuucgaucagcuucuguggcgucaacuccgauaccgcaaauuggucauggcccgacggugccgagcugccguucacaauugauaaguga

SEQ ID NO: 143108 - RNA, 1413 nt, Artificial Sequence; identical to SEQ ID NO: 143107
  derived and/or modified CDS sequence (opt3) from neuraminidase__InfluenzaA__ABF47784

SEQ ID NO: 143109 - RNA, 1413 nt, Artificial Sequence; identical to SEQ ID NO: 143107
  derived and/or modified CDS sequence (opt3) from neuraminidase__InfluenzaA__ABF47795

SEQ ID NO: 143110 - RNA, 1413 nt, Artificial Sequence; identical to SEQ ID NO: 143107
  derived and/or modified CDS sequence (opt3) from neuraminidase__InfluenzaA__ABF47806

SEQ ID NO: 143111 - RNA, 1413 nt, Artificial Sequence; identical to SEQ ID NO: 143107
  derived and/or modified CDS sequence (opt3) from neuraminidase__InfluenzaA__ABF47817

SEQ ID NO: 143112 - RNA, 1413 nt, Artificial Sequence; identical to SEQ ID NO: 143107
  derived and/or modified CDS sequence (opt3) from neuraminidase__InfluenzaA__ABF47839

SEQ ID NO: 143113 - RNA, 1413 nt, Artificial Sequence; identical to SEQ ID NO: 143107
  derived and/or modified CDS sequence (opt3) from neuraminidase__InfluenzaA__ABF47850

SEQ ID NO: 143114 - RNA, 1413 nt, Artificial Sequence; identical to SEQ ID NO: 142876
  derived and/or modified CDS sequence (opt3) from neuraminidase__InfluenzaA__ABF47872

SEQ ID NO: 143115 - RNA, 1413 nt, Artificial Sequence; identical to SEQ ID NO: 142876
  derived and/or modified CDS sequence (opt3) from neuraminidase__InfluenzaA__ABF47883

SEQ ID NO: 143116 - RNA, 1413 nt, Artificial Sequence; identical to SEQ ID NO: 142876
  derived and/or modified CDS sequence (opt3) from neuraminidase__InfluenzaA__ABF47894

SEQ ID NO: 143117 - RNA, 1410 nt, Artificial Sequence; identical to SEQ ID NO: 142892
  derived and/or modified CDS sequence (opt3) from neuraminidase__InfluenzaA__ABF47905

SEQ ID NO: 143118 - RNA, 1362 nt, Artificial Sequence
  derived and/or modified CDS sequence (opt3) from neuraminidase__InfluenzaA__ABF47958
augaaccccaaucagaagaucauuaccauaggcagcaucugcaugguggucgggauuaucucccugauucuccaaaucggaaacauaaucucuauuuggaucucacacaguauucagacagguaaucagaaccauacuggcaucuguaaucaggggagcauaacguacaaaguuguggccggacaagacuccaccucuguaauucuuacaggcaacucgucacugugcccuaucagagguugggcuauucacagcaaggauaaugggaucaggaucggaaguaaaggcgacguguucgucauucgggagccauuuauauccuguucucauuuggaaugccgcacuuucuuuuuaacccagggcgcacugcuaaacgauaagcacagccgagggacauucaaagaccguuccccguauagagcccucaugucaugucccgugggagaggcgccuaguccauacaauagcagguuugaaucuguugcuugguccgccucagcaugccaugaugguaugggcuggcugaccaucgggauuagcggacccgacgauggcgccguggcuguccuuaaguauaacgguaucauaacugagacaauuaagaguuggcggaaaaauauccugcgcacccaggaaucugaguguacgugcgugaacggguccuguuucacuaucaugaccgacggaccuagcgauggcuuggcaucguacaagauuuuuaaaaucgagaagggcaaaguaacaaagucuauugaacucaaugccccaaacucccacuaugaggaaugcucauguuaccccgacacugggaagguuaugugcgugugcagagauaauuggcacggaaguaacaggccuugggucagcuucgaccagaaccuggauuauaaaauagguuacaucuguuccggcguguuuggggacaauccacggccgaaggacggaaccggcucuugcggucccgugagcgcugauggggccaacggcgucaaaggauucucauacaaguauggcaaugggguuuggauuggacgcacaaaaagugacuccagccgacaugguuuugagaugaucugggauccuaacggcuggaccgagacggacucuagauucucaaugaggcaagaugugguagcgaugacugaccggaguggguacagcggauccuuugugcagcacccagaacugacaggccucgauuguaugcgucccugcuucugggucgaguuaauccgcggucugccugaagaggacgcaauuuggaccucugggucgauaaucagcuucuguggcguuaauuccgauacuguggacuggucauggccagauggagccgaacuucccuuuacaauugacaaguga

SEQ ID NO: 143119 - RNA, 1350 nt, Artificial Sequence
  derived and/or modified CDS sequence (opt3) from neuraminidase__InfluenzaA__ABF56651
augaaccccaaucagaagaucauuaccauaggcagcaucugcauggugacagggauugucucccugaugcuccaaguuggaaacaugaucucuauuugggugucacacaguauccauacugguagccagcaccaggccgagccuauauccaauacgaacuuccuuaccgaaaaagcuguagcaucugugaagcuggccggcaauucgucauuguguccaaucaacgggugggcggucuacagcaaagacaauaguauuagaaucggauccaagggcgauguguuuguuauuagggagccguucaucucuugcagccauuuagaaugucggacauuuuuccugacucagggugcucuacucaacgacaaacacuccaaugggaccgugaaggaucgcucaccccaucgaacacugaugaguugcccugucggagaggccccaagccccuauaacucucguuuugaauccguggcauggucagccagcgcuugucacgacggcaccaguuggcuuacuauaggcauuucugggccugauaauggagcaguagccguucugaaguacaacgguaucauuacagacaccaucaaauccuggagaaauaacaucuugaggacgcaagagagcgagugcgcuugugugaauggcucgugcuucacugucaugaccgaugggccaucuaacggacaggccucccacaagauuuuuaaaauggaaaagggcaaaguggugaagucagucgagcucgacgcgcccaacuaucauuacgaagaguguaguugcuauccugaugccggugagauaacauguguuugccgggacaauuggcacgggagcaaccgcccauggguguccuucaaucagaaccuggaauaccagaucggauauauuugcucuggcguauuuggcgauaauccgagacccaacgacgggacuggaagcugugguccugugucaaguaauggcgcauacggggucaagggauucuccuuuaaauacggcaacgguguguggaucgggaggaccaagagcacaaauucucggucaggcuucgagaugauaugggauccaaacggauggaccgaaacggacaguagcuuuuccguuaaacaagacauuguggcuaucacugauuggucuggcuauucggggagcuucguccagcaucccgagcugacaggacucgacugcauccgcccuuguuucuggguggaauuaauucgagguagaccaaaggaguccaccaucuggacuucaggcaguucuauuagcuuuugcgggguaaauuccgauacaguuggauggucauggcccgacggcgccgagcugccguucaccauagauaaauga

SEQ ID NO: 143120 - RNA, 1410 nt, Artificial Sequence; identical to SEQ ID NO: 142875
  derived and/or modified CDS sequence (opt3) from neuraminidase__InfluenzaA__ABF82654

SEQ ID NO: 143121 - RNA, 1413 nt, Artificial Sequence; identical to SEQ ID NO: 142444
  derived and/or modified CDS sequence (opt3) from neuraminidase__InfluenzaA__ABF82665

SEQ ID NO: 143122 - RNA, 1413 nt, Artificial Sequence; identical to SEQ ID NO: 142444
  derived and/or modified CDS sequence (opt3) from neuraminidase__InfluenzaA__ABF82676

SEQ ID NO: 143123 - RNA, 1413 nt, Artificial Sequence
  derived and/or modified CDS sequence (opt3) from neuraminidase__InfluenzaA__ABF82687
augaaccccaaucagaagaucauuaccauaggcagcaucuccauugccaucgggauuaucucucugaugcuccaaauaggaaacaucauuucaaucugggcuagucacagcauucagacagguucccagaaucauacuggcgugugcaaccagagaaucauaacguacgaaaauucuaccugggucaaccacacauauguuaauauuaacaauacuaacgugaucgcagggaaagacaagaccucgguaacacuugccggaaauucaagccuguguaguauuuccggcugggcgaucuacaccaaagauaacucuaucaggauugguagcaagggggacguguucgucauacgggagccuuuuaucuccugcucacauuuggagugucgcacuuucuuuuuaacacaaggagcucugcuaaaugauaaacacaguaacggcaccgugaaggaccgaagcccauaucgugcccucaugucuugcccgcugggcgaagcacccuccccuuacaauucaaaguucgagagcguugccuggagugcuucugcaugucaugaugggaugggauggcuuacgauugguaucuccggcccagacaacggggccguggcuguccugaaauauaacggaauaauuacugaaaccaucaagagcuggaaaaagcagaucuugagaacacaggagucggagugcguguguguaaauggcucuugcuuuacuauuaugaccgauggucccuccaacggggccgcgucauacaaaaucuucaagauugaaaagggaaaaacaaccaagaguauagagcucaaugcaccuaacuuucacuaugaagaguguagcugcuacccagacacgggcacuguuaugugugugugcagggauaauuggcacggcuccaaccggcccugggucucuuucaaucagaaccuggacuaccaaaucggguauauuugcagcggaguguuuggugauaauccucgcccaaaagacggcgaggggucauguaacccggugacagucgauggagccaauggcguuaaggguuucaguuacaaauaugggaacggcguguggaucggaagaaccaaguccaauaggcugcggaaaggcuuugaaaugaucugggaccccaacggguggacugacacagauagcgacuucucuguaaagcaggauguggucgcuauuaccgacuggucaggauacagugguagcuuugugcagcauccugagcucacgggcuuaaauugcauacgcccauguuucuggguugaacuggugcgagggcuucccaaggagaacaccacaaucuggacuuccggaucuucgauuagcuucugcggcgucaacuccgauaccgccaauuggucauggccugacggugcagaauugccauuuacaaucgauaaauga

SEQ ID NO: 143124 - RNA, 1410 nt, Artificial Sequence
  derived and/or modified CDS sequence (opt3) from neuraminidase__InfluenzaA__ABF82698
augaaccccaaucagaagaucauuaccauaggcagcgugucccugacaaucacuacgauuugcuuccucaugcaaaucgccauucuugucaucaccguuacacugcacuuuaaacagugugagugcaacucuccuccaaauaaccaggugauguugugugaaccgacuauaaucgagagaaauauuaccgaaaucguauacuuaacaaacaccacuauugagaaggaaaucugccccaaacuggcugaguauaggaauuggucaaagccucaguguaaaauaacaggguucgcaccauuuaguaaggacaacagcauucggcuauccgccggaggugauaucugggugacccgcgagcccuacgucucuugcgacccuggcaaguguuaucaauucgcgcucgggcagggaacgacucugaauaaccgacauucgaaugauaccgugcacgaccguacaccauacagaacucuucugaugaacgaauugggcguucccuuucaucucgguaccaaacaggugugcauugcuuggucaagcaguuccugucacgaugggaaggccuggcugcaugucugcgugacaggacacaaugagaacgcaaccgccucuuucaucuaugacggcaggcugguagauagcaucggcuccuggaguaaaaauauucuccggacgcaggaaagugaguguguuugcauaaacgggacuugcacaguggucaugaccgacggaagcgcuucuggucgcgcagauacuaagaucuuauuuauugaggaaggcaaaaucgugcacauauccccucugucagggagcgcccaacauguggaggaauguaguugcuacccaagauauccgggagucagguguguuugccgggacaacuggaagggcucuaaucgccccauuguggauaucaacguaaaggacuacuccaucgugagcucguacgucuguucuggucuugugggggauacaccucggaaaaaugacuccucaaguagcuccuauugcuuggacccaaacaaugaggaaggaggccacggcguuaaggggugggcuuucgaugacggaaacgauguguggauggguagaaccauuucugagaaacugaggagcggcuacgagacguuuaaggucaucgggggauggucaaaacccaauaguaagcuacagauuaaccgacaggugauaguagacaaaggcaaucguuccgguuauagcgggaucuucucuguugaaggcaagucauguaccaaccgcugcuuuuacguggagcucauuagaggaaggaagcaggaaacagaggucugguggacuucaaauagcaucguggucuucuguggcaccuccgggacauauggaacugguucuuggccugauggcgccgacaucaaccugaugccaauuuga

SEQ ID NO: 143125 - RNA, 1410 nt, Artificial Sequence; identical to SEQ ID NO: 142174
  derived and/or modified CDS sequence (opt3) from neuraminidase__InfluenzaA__ABF82709

SEQ ID NO: 143126 - RNA, 1413 nt, Artificial Sequence; identical to SEQ ID NO: 142463
  derived and/or modified CDS sequence (opt3) from neuraminidase__InfluenzaA__ABF82822

SEQ ID NO: 143127 - RNA, 1413 nt, Artificial Sequence; identical to SEQ ID NO: 142444
  derived and/or modified CDS sequence (opt3) from neuraminidase__InfluenzaA__ABF82833

SEQ ID NO: 143128 - RNA, 1413 nt, Artificial Sequence; identical to SEQ ID NO: 142444
  derived and/or modified CDS sequence (opt3) from neuraminidase__InfluenzaA__ABF82844

SEQ ID NO: 143129 - RNA, 1413 nt, Artificial Sequence
  derived and/or modified CDS sequence (opt3) from neuraminidase__InfluenzaA__ABF82855
augaaccccaaucagaagaucauuaccauaggcagcaucuccauugccaucgggauuaucucucugaugcuccaaauaggaaacaucauuucaaucugggcuagucacagcauucagaucgguucccagaaucauacaggcgugugcaaccagagaauaauuacuuacgaaaauucuacgugggucaaccacaccuauguuaauaucaacaauacaaacgugauugcagggaaagacaagacuucgguaacccuugccggaaauucaagccuguguaguaucuccggcugggcgaucuacacaaaagauaacucuauuaggauagguagcaagggggacguguucgucauccgggagccuuuuauuuccugcucacauuuggagugucgcaccuucuuuuuaacucaaggagcucugcuaaaugauaaacacaguaacggcacagugaaggaccgaagcccauaucgugcccucaugucuugcccgcugggcgaagcacccuccccuuacaauucaaaguucgagagcguugccuggagugcuucugcaugucaugaugggaugggauggcuuaccaucgguauauccggcccagacaacggggccguggcuguccugaaauauaacggaauuaucacggaaacuaucaagagcuggaaaaagcagauuuugagaacccaggagucggagugcguguguguaaauggcucuugcuuuacaaucaugacugauggucccuccaacggggccgcgucauacaaaauuuucaagauagaaaagggaaaaguuaccaagaguaucgagcucaaugcaccuaacuuucacuaugaagaguguagcugcuacccagacacaggcaccgugaugugugucugcagggauaauuggcacggcuccaaccggcccugggugucuuucaaucagaaccuggacuaccaaauuggguauaucugcagcggaguguuuggugauaauccucgcccaaaagacggcgaggggucauguaacccggucacgguugauggagccaauggcgugaaggguuucaguuacaaauaugggaacggcguauggaucggaagaacuaaguccaauaggcugcggaaaggcuuugaaaugauuugggaccccaacggguggacagacaccgauagcgacuucucugugaagcaggaugucguggcuauaacugacuggucaggauacagugguagcuuuguucagcauccugagcucacaggcuuagauugcauccgcccauguuucuggguggaacugguccgagggcuucccaaggagaauaccacgauuuggaccuccggaucuucgaucagcuucugcggcgugaacuccgacacagccaacuggucauggccugauggugcagaauugccauuuacuauugacaaauga

SEQ ID NO: 143130 - RNA, 1413 nt, Artificial Sequence; identical to SEQ ID NO: 142444
  derived and/or modified CDS sequence (opt3) from neuraminidase__InfluenzaA__ABF82866

SEQ ID NO: 143131 - RNA, 1413 nt, Artificial Sequence; identical to SEQ ID NO: 142978
  derived and/or modified CDS sequence (opt3) from neuraminidase__InfluenzaA__ABF82888

SEQ ID NO: 143132 - RNA, 1413 nt, Artificial Sequence; identical to SEQ ID NO: 142444
  derived and/or modified CDS sequence (opt3) from neuraminidase__InfluenzaA__ABF82910

SEQ ID NO: 143133 - RNA, 1413 nt, Artificial Sequence; identical to SEQ ID NO: 142444
  derived and/or modified CDS sequence (opt3) from neuraminidase__InfluenzaA__ABF82921

SEQ ID NO: 143134 - RNA, 1413 nt, Artificial Sequence; identical to SEQ ID NO: 142444
  derived and/or modified CDS sequence (opt3) from neuraminidase__InfluenzaA__ABF82932

SEQ ID NO: 143135 - RNA, 1413 nt, Artificial Sequence; identical to SEQ ID NO: 142444
  derived and/or modified CDS sequence (opt3) from neuraminidase__InfluenzaA__ABF82943

SEQ ID NO: 143136 - RNA, 1350 nt, Artificial Sequence
  derived and/or modified CDS sequence (opt3) from neuraminidase__InfluenzaA__ABG20474
augaaccccaaucagaagaucauuaccauaggcagcaucugcauggugauugggaucgucucccugaugcuccaaauuggaaacaugaucucuauauggguuucacacaguauccagacagguaaucagagacaggccgagccuauuagcaacacuaaauuccuuacggaaaaggcuguggcauccguaacccuggccggcaauucuucguuguguccaaucucagggugggcgguguacagcaaagacaacaguauuaggaucggaucccggggcgaugucuuugugauacgcgagccguucauuucuugcagccauuuagaaugucgaacauuuuuccugacucaaggugcucuacucaaugacaagcacuccaacgggaccguuaaagaucguucacccuauagaacacugaugaguugcccugugggagaggccccaagccccuacaauucuagguuugaauccgucgcauggucagccagcgcuugucaugacggcaccaguuggcuuacuaucggcauuucugggccugauaacggagcaguggccguacugaaguauaaugguaucaucacagacaccauuaaguccuggcggaacaauguuuugcgcacgcaggagagcgagugcgcuugugugaacggcucgugcuucacugucaugaccgaugggccaucuaauggacaggccuccuacaaaauauuuaagauggaaaaaggcaagguggugaaaucagucgagcucgacgcgcccaacuaucacuacgaagaguguaguugcuauccugaugccggugagaucacauguguuugcagagacaacuggcaugggagcaauaggccauggguguccuucaaccagaaucuggaauaccaaauuggauacaucugcucuggcguauuuggcgauaacccgcggcccaaugacgggacuggaagcugugguccugugucaccaaacggcgcauauggggucaagggauucaguuuuaaguacggcaaugguguguggauagggcgcaccaaauccacaaacagccgaucuggcuucgagaugauuugggaucccaauggauggaccggcacggacucaaacuuuaguguuaagcaggacaucguggcuaucacugauuggagcggguauuccggaucuuucguccagcacccugaacugacaggucucgacugcauuagaccauguuucuggguggaguuaaucaggggccggcccaaagaaucgaccauuuggacuagcggguccucaauauuuuucugcggaguaaauagugauacaguuucuuggagcuggccggacggcgccgagcugccuuuuaccaucgauaaguga

SEQ ID NO: 143137 - RNA, 1410 nt, Artificial Sequence; identical to SEQ ID NO: 142174
  derived and/or modified CDS sequence (opt3) from neuraminidase__InfluenzaA__ABG26761

SEQ ID NO: 143138 - RNA, 1410 nt, Artificial Sequence
  derived and/or modified CDS sequence (opt3) from neuraminidase__InfluenzaA__ABG26772
augaaccccaaucagaagaucauuaccauaggcagcgugucccugacaaucgccacuauuugcuuccucaugcaaaucgcuauucuugucacgaccguuacacugcacuuuaaacaguacgaguguaacucuccuccaaauaaccaggugauguugugcgaaccgacuaucauagagagaaauaucaccgaaauuguauauuuaacaaacaccacuaucgagaaggaaauuugucccaaacuggcagaguacaggaauuggucaaagccucagugcaaaaucacaggguucgccccauuuaguaaggacaacagcauacggcuauccgcgggaggugauauuugggugacccgcgagcccuaugucucuugugacccugauaagugcuaccaauucgcucucggccaggggacgacucugaauaaccgacauucgaaugacaccgugcacgaucguacaccauauagaacucuucugaugaacgaauugggaguucccuuucaucucggcaccaaacagguguguaucgccuggucaagcaguuccugccacgacgguaaggcauggcugcaugucugugugacagggcacgaugagaaugccaccgcuucuuucauuuacgacggaaggcugguagauagcaucggcuccuggaguaaaaagauccuccggacgcaggaaucagagugcguuuguauuaacggcacuugcacaguggucaugaccgacgggagcgcaucuggacgcgccgauacuaaaauauuauuuaucaaggaggguaagauugugcacaucuccccucugucaggcagcgcucaacauguggaagagugcaguuguuauccaagauacccgggggucaggugcguuugucgggacaauuggaaaggaucuaaccgccccauaguggauauuaacguaaaggacuacuccaucgugagcucguaugucugcucuggccuugugggugacacaccucggaaaaaugauuccucaaguagcucccacuguuugaacccaaauaacgaagaagggggacauggcguuaagggcugggccuucgacgaugggaaugacguguggaugggaagaaccaucucugagaaacugaggagcgguuacgagacguuuaaggucauugagggcuggucaaaacccaacaguaagcuacagaucaaucgacaggugauuguagaucgugggaaccgcuccggauauagcggcauauucucuguugaagguaagucaugcaucaauagauguuuuuacguggagcucauuagggggcggaaacaggaaaccgaggucugguggacaaguaacagcaucguggucuucugcggcacuuccggaaccuauggcacagggucuuggccugacggagcggauaucaaucugaugccaauuuga

SEQ ID NO: 143139 - RNA, 1413 nt, Artificial Sequence
  derived and/or modified CDS sequence (opt3) from neuraminidase__InfluenzaA__ABG26783
augaaccccaaucagaagaucauuaccauaggcagcaucuccauugccaucgggauuaucucucugauacuccaaaucggaaacauuaucucaauuugggcuagucacagcauccagacagguucccagaaucauacuggcauaugcaaccagagaauuaucacguacgaaaauucuaccugggugaaccaaacauaugugaauauuaacaauacuaacguuguggcagggaaagacaagaccucgaugacacuugccggaaauucaagccuguguccuaucaggggcugggcgaucuacaccaaagauaacaguauucggauagguuccaagggggacguauucgugauccgcgagccauuuauuucuugcagccacuuggagugucgaacuuucuuuuuaacacagggagcucugcuaaaugauaaacauuccaacggcaccgucaaggaccguucaccguauagagcccucaugaguugcccccugggcgaagcaccuagcccauacaauucuagguucgaguccguggccuggucagcuagcgcaugucacgaugggcuuggauggcugacgaucgguauaaguggccccgacaacggggccguugcuguguugaaguauaacggaauuaucacugaaaccaucaaaucuuggaagaaacggauucuccgcacacaggaguccgagugcgucuguaugaauggcagcugcuuuacuaucaugaccgaugguccuucgaacggggccgcgucuuacagaauuuucaagauagaaaaaggaagggugacaaaguccaucgagcuggacgcaccaaauuaucauuacgaagaguguucaugcuaccccaacaccggcacgguaauguguguuugccgggauaauuggcacggcaguaaccgcccuugggugagcuuuaaucagaaccuggacuaucaaauuggguacaucugcuccggagucuucggugauaauccacgaccgaaggacggcgaggggucuuguaaccccgugacuguggauggagccgacggcgucaaagguuuuagcuauagauacgggaauggcguuuggaucggaaggacaaagucaaaccggcuccguaaaggcuucgaaaugauuugggacccuaauggguggaccgauacugacagugauuuuuccaugaagcaggacauaguggcuaugacagauuggagcggauauucugguucauucguacagcacccagaguuaaccggccuggacugcauccgccccuguuuuuggguggaacuugucagaggguugccuagggagaacacgaccauuuggacaaguggaagcuccaucucuuucugcggcgucaauucggauacugccaacuggagcuggccagacggugcagaacugcccuucaccauugauaaauga

SEQ ID NO: 143140 - RNA, 1413 nt, Artificial Sequence; identical to SEQ ID NO: 143016
  derived and/or modified CDS sequence (opt3) from neuraminidase__InfluenzaA__ABG26794

SEQ ID NO: 143141 - RNA, 1410 nt, Artificial Sequence
  derived and/or modified CDS sequence (opt3) from neuraminidase__InfluenzaA__ABG26805
augaaccccaaucagaagaucauuaccauaggcagcgugucccugacaaucgccacuauuugcuuccucacgcaaaucgcuauucuugucaccacaguuacucugcacuuuaaacaguacgaguguucuucaccuccaaacaaucaggugaugccgugcgaacccaucauaaucgagagaaacauuaccgaaaucguauauuugacaaauaccacuauugagaaggaaaucuguccuaaauuaguggaguacaggaacuggaguaagccacagugcaaaauaacaggguucgcacccuuuagcaaggacaauuccauucggcugucugccggaggugauaucugggucacccgcgagccuuaugugucgugugacccaggcaagugcuaccaauucgcgcuagggcagggaacgacucucaacaauaaacauucaaacgauaccauucacgaccgaacacccuaucguacucugcuuaugaaugaacugggcguuccuuuucauuuggguaccaaacagguguguaucgcuuggagcaguuccucuugccacgaugggaaggccuggcuccaugucuguaucacaggacacgacaagaacgcaaccgccagcuucauuuacgauggcagacugguggacuccauaggcucauggaguaaaaauauccugaggacgcaggagagcgaaugcguauguauuaacgggacuugcacaguugugaugaccgauggaucugcuuccgagcgggcagacacuaagauccucuuuauagaggaagguaagauuguccacaucucaccauuaagcggcagugcccaacauguggaggaaugcucuuguuauccgcgcuaccccggggugagaugcgucuguagggauaauuggaaaggauccaaccggccuaucguugacauuaacgugaaggauuacagcaucguaucgucuuaugugugcuccggccuggucggugacacaccacgcaaaaaugaccgaucaaguagcuccuacuguagaaaccccaauaacgagaaggggaaucacggagugaaaggcugggcuuucgaugacggcaacgauguuuggauggggaggaccauuggagaggaacuucggucugguuaugagacguuuaaggugauaggcggguggagcaccccuaauucaaaauugcagaucaaccgucagauuaucgucgacaguggaaaucgcuccggcuacagcgguaucuucucuguggaagggaagucaugcauuaacagauguuuuuauguagagcugauaaggggccgggaacaggagacacgaguuugguggaccaguaauagcaucguggucuucugcggaacuuccggcacauacgggacuggaucuuggccagauggugccgacauuaaccuaaugcccaucuga

SEQ ID NO: 143142 - RNA, 1413 nt, Artificial Sequence; identical to SEQ ID NO: 142999
  derived and/or modified CDS sequence (opt3) from neuraminidase__InfluenzaA__ABG26816

SEQ ID NO: 143143 - RNA, 1413 nt, Artificial Sequence; identical to SEQ ID NO: 143107
  derived and/or modified CDS sequence (opt3) from neuraminidase__InfluenzaA__ABG26827

SEQ ID NO: 143144 - RNA, 1413 nt, Artificial Sequence; identical to SEQ ID NO: 143107
  derived and/or modified CDS sequence (opt3) from neuraminidase__InfluenzaA__ABG26838

SEQ ID NO: 143145 - RNA, 1410 nt, Artificial Sequence
  derived and/or modified CDS sequence (opt3) from neuraminidase__InfluenzaA__ABG26860
augaaccccaaucagaagaucauuaccauaggcagcgugucccugacaaucgccacuauuugcuuccucaugcaaaucgcuauucuugucacgaccguuacacugcacuuuaaacaguacgaguguaacucuccuccaaauaaccaggugauguugugcgaaccgacuaucauagagagaaauaucaccgaaauuguauauuuaacaaacaccacuaucgagaaggaaauuugucccaaacuggcagaguacaggaauuggucaaagccucagugcaaaaucacaggguucgccccauuuaguaaggacaacagcauacggcuauccgcgggaggugauauuugggugacccgcgagcccuaugucucuugugacccuggcaagugcuaccaauucgcucucgggcagggaacgacucugaauaaccgacauucgaaugauaccgugcacgaccguacaccauauagaacucuucugaugaacgaauugggcguucccuuucaucucgguaccaaacagguguguaucgccuggucaagcaguuccugccacgaugggaaggcauggcugcaugucugugugacaggacacgacgagaaugccaccgcuucuuucauuuacgauggcaggcugguagacagcaucggcuccuggaguaaaaacauccuccggacgcaggaaucagagugcguuuguauuaaugggacuugcacaguggucaugaccgauggaagcgcaucugaccgcgccgauacuaagauauuauuuaucgaggaagguaaaauugugcacaucuccccucugucaggcagcgcucaacauguggaggaaugcaguuguuauccaagauacccgggggucaggugcguuugucgggacaacuggaagggaucuaaccgccccauaauugauaucaaugugaaggacuacuccaucguaagcucguaugugugcucuggccuugucggugacacaccucgaaagaacgauuccucaaguagcuccuacuguuggaauccaaacaaugagaaagggggacacggcgugaaaggcugggccuucgacgaugggaacgacguuuggaugggaagaaccauuucugaagagagcaggucagguuaugagacguuuaaggugaucggcggguggaguaaacccaauuccaaguugcagauuaaccggcaggucauaguggaucguggaaaucgcagcggcuacucugguaucuucucaguagaagggaaaaguugcauuaacagauguuuuuauguugagcugaucaggggccggaagcaggaaaccgaggugugguggacaagcaauuccaucgucguguucugcggaacuucuggcaccuacgggacaggaucguggccugacggugcggauauuaaccuaaugccaauauga

SEQ ID NO: 143146 - RNA, 1410 nt, Artificial Sequence
  derived and/or modified CDS sequence (opt3) from neuraminidase__InfluenzaA__ABG26871
augaaccccaaucagaagaucauuaccauaggcagcgugucccugacaaucgccacuauuugcuuccucaugcaaaucgcuauucuugucacgaccguuacacugcacuuuaaacaguacgaguguaacucuccuccauauaaucagaucauguugugcgaaccgacuauaaucgagagaaacauuaccgaaaucguguacuuaacaaauaccacuauugagaaggaaaucugucccaaacuggcagaguauaggaacuggucaaagccucagugcaaaauaacaggguucgccccauuuaguaaggacaauagcauucggcuauccgcgggaggugauaucuggguaacccgcgagcccuacgugucuugugacccuggcaagugcuaucaauucgcucucgggcagggaacgacucugaacaaucgacauucgaacgauaccguccacgaccguacaccauacagaacucuucugaugaaugaauugggcgugcccuuucaucucgguaccaaacagguuuguauugccuggucaagcaguuccugccacgaugggaaggcauggcugcaugugugugucacaggacacgacgagaacgccaccgcuucuuucaucuaugauggcaggcugguggacagcaucggcuccuggaguaaaaauauucuccggacgcaggaaucagagugcguauguauaaacgggacuugcacaguugugaugaccgauggaagcgcaucugaccgcgccgauacuaagaucuuauuuauugaggaagguaaaaucguccacauauccccucugucaggcagcgcucaacauguggaggaaugcaguuguuacccaagauacccgggggugaggugcgucugucgggacaauuggaagggaucuaaccgccccauuguugauaucaacgugaaggacuauuccaucguaagcucguacgugugcucuggccuugucggugacacaccucgaaagaaugauuccucaaguagcuccuauuguuggaacccaaauaacgagaaagggggacacggcgugaaaggcugggccuucgacgaugggaaugacguuuggaugggaagaaccauuucugaagagagcaggucagguuacgagacguuuaaggugaucggcggguggaguaaacccaacuccaaguugcagauuaaucggcaggucauaguggaucguggaaaccgcagcggcuauucugguaucuucucaguagaagggaaaaguugcauuaauagauguuuuuacguugagcugaucaggggccggaagcaggaaaccgaggugugguggacaagcaacuccaucgucguguucugcggaacuucuggcaccuaugggacaggaucguggccugacggugcggauauuaaucuaaugccaauauga

SEQ ID NO: 143147 - RNA, 1410 nt, Artificial Sequence
  derived and/or modified CDS sequence (opt3) from neuraminidase__InfluenzaA__ABG26893
augaaccccaaucagaagaucauuaccauaggcagcaucucccugacaauugccacuaucugcuuccucaugcaaauugcuauccuugugacgaccgucacacugcacuuuaaacaguacgaguguaacucuccuccaaauaaccagguuauguugugcgaaccgacuauaaucgagagaaauauuaccgaaaucguguauuuaacaaacaccacuauugagaaggaaaucugucccaaacuggcagaguacaggaauuggucaaagccucagugcaaaauaacaggguucgccccauuuaguaaggacaacagcauucggcuauccgcgggaggugauaucuggguaacccgcgagcccuaugugucuugugacccuggcaagugcuaccaauucgcucucgggcagggaacgacucugaauaaccgacauucgaaugauaccguccacgaccguacaccauauagaacucuucugaugaacgaauugggcgugcccuuucaucucgguaccaaacagguuuguauugccuggucaagcaguuccugccacgaugggaaggcauggcugcaugugugugucacaggacacgacgagaaugccaccgcuucuuucaucuacgauggcaggcugguggacagcaucggcuccuggaguaaaaacauucuccggacgcaggaaucagagugcguauguauaaaugggacuugcacaguugugaugaccgauggaagcgcaucugaccgcgccgauacuaagaucuuauuuauugaggaagguaaaaucguccacauauccccucugucaggcagcgcucaacauguggaggaaugcaguuguuauccaagauacccgggggugaggugcgucugucgggacaacuggaagggaucuaaccgccccauuguugauaucaaugugaaggacuacuccaucguaagcucguaugugugcucuggccuugucggugacacaccucgaaagaacgauuccucaaguagcuccuacuguuggaauccaaacaaugagaaagggggacacggcgugaaaggcugggccuucgacgaugggaacgacguuuggaugggaagaaccauuucugaagagagcaggucagguuaugagacguuuaaggugaucggcggguggaguaaacccaauuccaaguugcagauuaaccggcaggucauaguggaucguggaaaucgcagcggcuacucugguaucuucucaguagaagggaaaaguugcauuaacagauguuuuuauguugagcugaucaggggccggaagcaggaaaccgaggugugguggacaagcaauuccaucgucguguucugcggaacuucuggcaccuacgggacaggaucguggccugacggugcggauauuaaccuaaugccaauauga

SEQ ID NO: 143148 - RNA, 1410 nt, Artificial Sequence
  derived and/or modified CDS sequence (opt3) from neuraminidase__InfluenzaA__ABG26915
augaaccccaaucagaagaucauuaccauaggcagcgugucccugacaaucgccacuauuugcuuccucaugcaaaucgcuauucuugucacgaccguuacacugcacuuuaaacaguacgaguguaacucuccuccaaauaaccaggugauguugugcgaaccgacuaucauagagagaaauaucaccgaaauuguauauuuaacaaacaccacuaucgagaaggaaauuugucccaaacuggcagaguacaggaauuggucaaagccucagugcaaaaucacaggguucgccccauuuaguaaggacaacagcauacggcuauccgcgggaggugauauuugggugacccgcgagcccuaugucucuugugacccuggcaagugcuaccaauucgcucucgggcagggaacgacucugaauaaccgacauucgaaugauaccgugcacgaccguacaccauauagaacucuucugaugaacgaauugggcguucccuuucaucucgguaccaaacagguguguaucgccuggucaagcaguuccugccacgaugggaaggcauggcugcaugucugugugacaggacacgacgagaaugccaccgcuucuuucauuuacgauggcaggcugguagacagcaucuccucauggaguaaaaacauccuccggacgcaggaaagcgagugcguuuguauuaauggcacuugcacaguggucaugaccgaugggucugcauccgagcgcgccgacacuaagauauuauuuaucgaagagggaaaaauugugcacaucucaccucugagcgguagugcucaacauguggaagagugcucuuguuauccaagauacccgggcgucaggugcguuugucgggauaacuggaagggguccaaccgccccauaguggacauuaauguaaaggauuacagcaucgugucgucuuaugucugcuccggacuugugggcgacacaccucggaaaaacgacucaaguagcuccucuuacuguuugaauccaaacaaugaagagggugggcacggaguuaagggcugggccuucgaugacggcaacgauguguggauggggagaaccaucagcgagaaacugaggucaggauaugaaacguuuaaggucauugguggcuggaguaaacccaauuccaagcuacagaucaaccgacaggugauuguagaccgugggaaucgcagcggauacucuggcauauucucaguugaggguaaaaguugcgugaacagauguuuuuaugucgaacucaucagggggcggaagcaggagaccgaagugugguggacaagcaauuccauugucguguucugcggcacuucuggaaccuacggcacagggucguggccugauggagcggacaucaaccugaugccaaucuga

SEQ ID NO: 143149 - RNA, 1410 nt, Artificial Sequence
  derived and/or modified CDS sequence (opt3) from neuraminidase__InfluenzaA__ABG26937
augaaccccaaucagaagaucauuaccauaggcagcgugucccugacaaucgccacuauuugcuuccucaugcaaaucgcuauucuugucacgaccguuacacugcacuuuaaacaguacgaguguaacucuccuccaucaaaucaggugauguugugcgaaccgacuaucauagagagaaacaucaccgaaauuguauauuuaacaaauaccacuaucgagaaggaaauuugucccaaacuggcagaguacaggaacuggaguaagccucagugcaaaaucacaggguucgccccauuuagcaaggacaauuccauacggcuaucugcgggaggugauauuugggugacccgcgagcccuaugucucgugugacccuggcaagugcuaccaauucgcucucgggcagggaacgacucugaacaaucgacauucaaacgauaccgugcacgaccguacaccauauagaacucuucugaugaaugaauugggcguucccuuucaucucgguaccaaacagguguguaucgccuggagcaguuccucuugccacgaugggaaggcauggcugcaugucugugugacaggacacgacgagaacgccaccgcuagcuucauuuacgauggcaggcugguagacuccaucggcucauggaguaaaaauauccuccggacgcaggaaagcgagugcguuuguauuaacgggacuugcacaguggucaugaccgauggaucugcauccgagcgcgccgacacuaagauauuauuuaucgaagaggguaaaauugugcacaucucaccucugagcggcagugcucaacauguggaagagugcucuuguuauccaagauacccgggggucaggugcguuugucgggauaauuggaagggauccaaccgccccauaguggacauuaacguaaaggauuacagcaucgugucgucuuaugucugcuccggccuugugggugacacaccucgaaagaaugacucaaguagcuccucuuacuguagaaacccaaauaacgaaaaagggagccacggaguuaaaggcugggccuucgaugacggcaaugauguguggauggggaggaccaucucagaggaguugcggaguggauaugaaacguuuaaggucauugguggcugguccaaacccaacagcaagcugcagaucaaucgucaggugauuguagaccgcgggaacagaucuggauacucaggcauauucaguguugaggguaaaagcugcaucaauagguguuuuuauguggaacuaauucgggggcgaaagcaggagaccgaagucugguggacauccaacucuaucguggucuucugcggcacuucgggaaccuacggcacagggagcuggccugauggagcggacaucaaucucaugccaauuuga

SEQ ID NO: 143150 - RNA, 1413 nt, Artificial Sequence; identical to SEQ ID NO: 142444
  derived and/or modified CDS sequence (opt3) from neuraminidase__InfluenzaA__ABG26948

SEQ ID NO: 143151 - RNA, 1410 nt, Artificial Sequence; identical to SEQ ID NO: 142214
  derived and/or modified CDS sequence (opt3) from neuraminidase__InfluenzaA__ABG26959

SEQ ID NO: 143152 - RNA, 1413 nt, Artificial Sequence
  derived and/or modified CDS sequence (opt3) from neuraminidase__InfluenzaA__ABG37123
augaaccccaaucagaagaucauuaccauaggcagcaucuccauuacaaucgggauuaucucucugaugcuccaaauaggaaacaucauuucaaucugggccagucacagcauucagacugguucccagaaucauacgggcgugugcaaccagagaaucauaaccuacgaaaauucuacaugggucaaccacacuuauguuaauauuaacaauaccaacgugaucgcugggaaagacaagacaucgguaacccuugcaggaaauucaagccuguguaguauuuccggcugggccaucuacacuaaagauaacucuaucaggauugguagcaagggggacguguucgucauacgggagccuuuuaucuccugcucacauuuggagugucgcacauucuuuuuaacccaaggagcgcugcuaaaugauaaacacaguaacggcacggugaaggaccgaagcccauaucgugcucucaugucuugcccgcugggcgaagcccccuccccuuacaauucaaaguucgagagcguugcauggagugccucugcuugucaugaugggaugggauggcuuacuauugguaucuccggcccagacaacggggcaguggccguccugaaauauaacggaauaauuaccgaaacaaucaagagcuggaaaaagcagaucuugagaacucaggagucggagugcguguguguaaauggcucuugcuuuaccauuaugacagauggucccuccaacggggcugccucauacaaaaucuucaagauugaaaagggaaaaguuaccaagaguauagagcucaaugcgccuaacuuucacuaugaagaguguagcugcuacccagacacgggcacugugaugugugucugcagggauaauuggcacggcuccaaccggcccugggugucuuucaaucagaaccuggacuaccaaaucggguauauuugcagcggaguguuuggugauaauccucgcccaaaagacggcgaggggucauguaacccggucacaguugauggagcaaauggcgugaaggguuucaguuacaaauaugggaacggcguauggaucggaagaaccaaguccaauaggcugcggaaaggcuuugaaaugaucugggaccccaacggguggacugacacagauagcgacuucucugugaagcaggaugucguggccauuaccgacuggucaggauacagugguagcuuuguucagcauccugagcucacgggcuuagauugcauacgcccauguuucuggguggaacugguccgagggcuucccaaggagaauaccacaaucuggacuuccggaucuucgauuagcuucugcggcgugaacuccgacaccgcuaacuggucauggccugauggugccgaauugccauuuacaaucgacaaauga

SEQ ID NO: 143153 - RNA, 1410 nt, Artificial Sequence
  derived and/or modified CDS sequence (opt3) from neuraminidase__InfluenzaA__ABG37134
augaaccccaaucagaagaucauuaccauaggcagcgugucccugacaaucgccacuauuugcuuccucaugcaaaucgcuauucuugucacgaccguuacacugcacuuuaaacaguacgaguguaacucuccuccaaauaaccaggugauguugugcgaaccgacuaucauagagagaaauaucaccgaaauuguauauuuaacaaacaccacuaucgagaaggaaauuugucccaaacuggcagaguacaggaauuggucaaagccucagugcaaaaucacaggguucgccccauuuaguaaggacaacagcauacggcuauccgcgggaggugauauuugggugacccgcgagcccuaugucucuugugacccugauaagugcuaccaauucgcucucggccaggggacgacucugaauaaccgacauucgaaugacaccgugcacgaucguacaccauauagaacucuucugaugaacgaauugggaguucccuuucaucucggcaccaaacagguguguaucgccuggucaagcaguuccugccacgacgguaaggcauggcugcaugucugugugacagggcacgaugagaaugccaccgcuucuuucauuuacgacggaaggcugguagauagcaucggcuccuggaguaaaaagauccuccggacgcaggaaucagagugcguuuguauuaacggcacuugcacaguggucaugaccgacgggagcgcaucuggacgcgccgauacuaaaauauuauuuaucgaggaagguaagauugugcacaucucccaacugcuuggcucagcucagcauguggaggaaugcagcuguuauccuagauacccaggggucaggugcguuugucgggacaauuggaagggaaguaaccgcccgauaguggauauuaacguaaaagacuacucuaucguguccagcuaugucugcucgggcuuggugggugacacaccccgaaagaaugauucuuccucaaguagccacugucugaacccuaauaacgaggaagggggacauggcguuaaaggcugggccuucgacgaugggaaugacguguggaugggaagaaccaucuccgagaagcuaaggucugguuacgagacguuuaaagucauugaaggcuggagcaagccaaacucaaaacuccagaucaaucgucaggugauuguagaucgggggaaccgcaguggauauuccggcauauucagcguugaggguaagucuugcaucaauagauguuuuuacguggaacugauuagggggcggaagcaagagaccgaagucugguggacaucaaacaguaucguggucuucugcggcacuagcggaaccuauggcacaggguccuggcccgacggagcggauaucaaucuuaugccuauuuga

SEQ ID NO: 143154 - RNA, 1410 nt, Artificial Sequence; identical to SEQ ID NO: 142174
  derived and/or modified CDS sequence (opt3) from neuraminidase__InfluenzaA__ABG37145

SEQ ID NO: 143155 - RNA, 1410 nt, Artificial Sequence
  derived and/or modified CDS sequence (opt3) from neuraminidase__InfluenzaA__ABG37156
augaaccccaaucagaagaucauuaccauaggcagcgugucccugacaaucgccacuauuugcuuccucaugcaaaucgcuauucuugucacgaccguuacacugcacuuuaaacaguacgaguguaacucuccuccaaauaaccaggugauguugugcgaaccgacuaucauagagagaaauaucaccgaaauuguauauuuaacaaacaccacuaucgagaaggaaauuugucccaaacuggcagaguacaggaauuggucaaagccucagugcaaaaucacaggguucgccccauuuaguaaggacaacagcauacggcuauccgcgggaggugauauuugggugacccgcgagcccuaugucucuugugacccuggcaagugcuaccaauucgcucucgggcagggaacgacucugaauaaccgacauucgaaugauaccgugcacgaccguacaccauauagaacucuucugaugaacgaauugggcguucccuuucaucucgguaccaaacagguguguaucgccuggucaagcaguuccugccacgaugggaaggcauggcugcaugucugugugacaggacacgacgagaaugccaccgcuucuuucauuuacgauggcaggcugguagacagcaucggcuccuggaguaaaaacauccuccggacgcaggaaucagagugcguuuguauuaaugggacuugcacaguggucaugaccgauggaagcgcaucuggucgcgccgacacuaagauauuauuuaucgaggaaggcaaaauugugcacaucuccccucugucagggagcgcucaacauguggaggaaugcaguuguuauccaagauacccgggagucaggugcguuugucgggauaacuggaagggcucuaaccgccccauaguggacauuaauguaaaggauuacuccaucgugagcaacuaugucugcucgggucuugugggggacacaccucggaaaaaugacucuuccucaaguagccacuguuugaacccaaauaacgaggaaggaggccauggcguuaaggggugggccuucgaugacggaaaugauguguggauggguagaaccaucuccgagaaacugaggucuggcuacgagacguuuaaggucauugggggauggagcaaacccaacucaaagcuacagaucaaucgacaggugauuguagaccguggcaaccgcagugguuauuccgggauauucagcguugaaggcaaaucuugcaucaauagauguuuuuacguggagcucauuaggggacggaagcaggaaaccgaggucugguggacaucaaacaguaucguggucuucugcggcacuagcgggaccuauggaacagguuccuggccugauggcgcggacaucaaucugaugccaauuuga

SEQ ID NO: 143156 - RNA, 1410 nt, Artificial Sequence
  derived and/or modified CDS sequence (opt3) from neuraminidase__InfluenzaA__ABG37167
augaaccccaaucagaagaucauuaccauaggcagcgugucccugacaaucgccacuauuugcuuccucaugcaaaucgcuauucuugucacgaccguuacacugcacuuuaaacaguacgaguguaacucuccuccaaauaaccaggugauguugugcgaaccgacuaucauagagagaaauaucaccgaaauuguauauuuaacaaacaccacuaucgagaaggaaauuugucccaaacuggcagaguacaggaauuggucaaagccucagugcaaaaucacaggguucgccccauuuaguaaggacaacagcauacggcuauccgcgggaggugauauuugggugacccgcgagcccuaugucucuugugacccugauaagugcuaccaauucgcucucggccaggggacgacucugaauaaccgacauucgaaugacaccgugcacgaucguacaccauauagaacucuucugaugaacgaauugggaguucccuuucaucucggcaccaaacagguguguaucgccuggucaagcaguuccugccacgacgguaaggcauggcugcaugucugugugacagggcacgaugagaaugccaccgcuucuuucauuuacgacggaaggcugguagauagcaucuccucauggaguaaaaacauccuccggacgcaggaaagcgagugcguuuguauuaauggcacuugcacaguggucaugaccgacggcucugcauccgggcgcgccgauacuaagauauuauuuaucgaggaaggaaaaauugugcacaucucaccucugagcgguagugcucaacauguggaggaaugcucuuguuauccaagauacccgggcgucaggugcguuugucgggacaacuggaagggguccaaccgccccauaguggauauuaauguaaaggacuacagcaucgugucgucuuaugucugcuccggacuugugggcgacacaccucggaaaaacgauucaaguagcuccucuuacuguuugaauccaaacaaugaggaaggugggcacggaguuaagggcugggccuucgacgauggcaacgacguguggauggggagaaccaucagcgagaaacugaggucaggauaugagacguuuaaggucauugguggcuggaguaaacccaauuccaagcuacagaucaaccgacaggugauuguagaucgugggaaucgcagcggauacucuggcauauucucaguugaagguaaaaguugcgugaacagauguuuuuaugucgagcucaucagggggcggaagcaggaaaccgaggugugguggacaagcaauuccauugucguguucugcggcacuucuggaaccuacggcacagggucguggccugacggagcggauaucaaccugaugccaaucuga

SEQ ID NO: 143157 - RNA, 1410 nt, Artificial Sequence
  derived and/or modified CDS sequence (opt3) from neuraminidase__InfluenzaA__ABG37189
augaaccccaaucagaagaucauuaccauaggcagcgugucccugacaaucgccacuauuugcuuccucaugcaaaucgcuauucuugucacgaccguuacacugcacuuuaaacaguacgaguguaacucuccuccaaauaaccagguguuguuaugcgaaccgacuaucauagagagaaauaucaccgaaauuguauaucugacaaacaccacuaucgagaaggaaauuugucccaaacuagcagaguacaggaauuggucaaagccucagugcaaaaucacaggguucgccccauuuaguaaggacaacagcauacggcucuccgcgggaggugauauuugggugacccgcgagcccuaugucucuugugacccuggcaagugcuaccaauucgcucuggggcagggaacgacucuuaauaaccgacauucgaaugauaccgugcacgaccguacaccauauagaacucuguugaugaacgaacucggcguucccuuucaucuggguaccaaacagguguguaucgccuggucaagcaguuccugccacgaugggaaggcauggcugcaugucugugugacaggacacgacgagaaugccaccgcuucuuucauuuacgauggcaggcucguagacagcaucggcuccuggaguaaaaacaucuuacggacgcaggaaucagagugcguuuguauuaaugggacuugcacaguggucaugaccgauggaagcgcaucuggucgcgccgacacuaagauacuguuuaucgaggaaggcaaaauugugcacaucuccucacuuagcgggagugcucaacauguggaggaaugcucuuguuauccuagauacccaggagucaggugcguuugucgggauaacuggaagggcuccaaccgcccgauaguggacauuaauguaaaggauuacagcaucgugucgucuuaugucugcuccgguuuggugggggacacaccccggaaaaacgacucaaguagcuccucucacugucugaauccuaacaaugaggaaggaggccauggcguuaaggggugggccuucgaugacggaaacgauguguggauggguagaaccaucagcgagaaacuaaggucaggcuacgagacguuuaaggucauugggggauggaguaaaccaaauuccaagcuccagaucaaccgacaggugauuguagaccguggcaaucgcagcgguuauucugggauauucucaguugaaggcaaaaguugcaucaacagauguuuuuacguggagcugauuaggggacggaagcaggaaaccgaggucugguggacaagcaauuccaucguggucuucugcggcacuucugggaccuauggaacagguucguggcccgauggcgcggacaucaaccuuaugccuauuuga

SEQ ID NO: 143158 - RNA, 1410 nt, Artificial Sequence
  derived and/or modified CDS sequence (opt3) from neuraminidase__InfluenzaA__ABG37200
augaaccccaaucagaagaucauuaccauaggcagcgugucccugacaaucgccacuauuugcuuccucaugcaaaucgcuauucuugucacgaccguuacacugcacuuuaaacaguacgaguguaacucuccuccaaauaaccaggugauguugugcgaaccgacuaucauagagagaaauaucaccgaaauuguauauuuaacaaacaccacuaucgagaaggaaauuugucccaaacuggcagaguacaggaauuggucaaagccucagugcaaaaucacaggguucgccccauuuaguaaggacaacagcauacggcuauccgcgggaggugauauuugggugacccgcgagcccuaugucucuugugacucgggcaagugcuaccaauucgcucucgggcagggaacgacucugaauaaccgacauucaaaugauaccgugcacgaccguacaccuuauagaacucuucugaugaacgaauugggcguuccauuucaucucgguaccaaacagguguguaucgccuggagcaguuccucuugccacgaugggaaggcauggcugcaugucugugugacaggacacgacgagaaugccaccgcuagcuucauuuacgauggcaggcugguagacuccaucggcucauggaguaaaaacauccuccggacgcaggaaagcgagugcguuuguauuaaugggacuugcacaguggucaugaccgauggaucugcauccggucgcgccgacacuaagauauuauuuaucgaggaaggcaaaauugugcacaucucaacacugagcgggagugcucaacauguggaggaaugcucuuguuaucccagauacccuggagucaggugcguuugucgggauaacuggaagggcuccaaccgcccaauaguggacauuaauguaaaggauuacagcaucgugucgucuuaugucugcuccggucuugugggggacaccccgcggaaaaacgacucaaguagcuccucucacuguuugaaucccaacaaugaggaaggaggccauggcguuaaggggugggccuucgaugacggaaacgauguguggauggguagaacgaucagcgagaaacugaggucaggcuacgagaccuuuaaggucauugggggauggaguaaaccuaauuccaagcuacagaucaaccgacaggugauuguagaccguggcaaucgcagcgguuauucugggauauucucaguugaaggcaaaaguugcaucaacagauguuuuuacguggagcucauuaggggacggaagcaggaaacagaggucugguggacuagcaauuccaucguggucuucugcggcaccucugggacauauggaacugguucguggccagauggcgcggacaucaaccugaugcccauuuga

SEQ ID NO: 143159 - RNA, 1410 nt, Artificial Sequence
  derived and/or modified CDS sequence (opt3) from neuraminidase__InfluenzaA__ABG37211
augaaccccaaucagaagaucauuaccauaggcagcgugucccugacaaucgccacuauuugcuuccucacgcaaaucgcuauucuugucaccacaguuacucugcacuuuaaacaguacgaguguucuucaccuccaaacaaucaggugaugccgugcgaacccaucauaaucgagagaaacauuaccgaaaucguauauuugacaaauaccacuauugagaaggaaaucuguccuaaauuaguggaguacaggaacuggaguaagccacagugcaaaauaacaggguucgcacccuuuagcaaggacaauuccauucggcugucugccggaggugauaucugggucacccgcgagccuuaugugucgugugacccaggcaagugcuaccaauucgcgcuagggcagggaacgacucucaacaauaaacauucaaacgauaccauucacgaccgaacacccuaucguacucugcuuaugaaugaacugggcguuccuuuucauuuggguaccaaacagguguguaucgcuuggagcaguuccucuugccacgaugggaaggccuggcuccaugucuguaucacaggacacgacaagaacgcaaccgccagcuucauuuacgauggcagacugguggacuccauaggcucauggaguaaaaauauccugaggacgcaggagagcgaaugcguauguauuaacgggacuugcacaguugugaugaccgauggaucugcuuccgagcgggcagacacuaagauccucuuuauagaggaagguaagauuguccacaucucaccauuaagcggcagugcccaacauguggaggaaugcucuuguuauccgcgcuaccccggggugagaugcgucuguagggauaauuggaaaggauccaaccggccuaucguugacauuaacgugaaggauuacagcaucguaucgucuuaugugugcuccggccuggucggugacacaccacgcaaaaaugaccgaucaaguagcuccuacuguagaaaccccaauaacgagaaggggaaucacggagugaaaggcugggcuuucgaugacggcaacgauguuuggauggggaggaccauuggagaggaacuucggucugguuaugagacguuuaaggugauaggcggguggagcaccccuaauucaaaauugcagaucaaccgucaggucauuguggacaguggaaaucgcuccggcuacagcgguaucuucucuguagaagggaagucaugcaucaacagauguuuuuauguugagcugauuaggggccgggaacaggagacacgagugugguggaccaguaauagcauagucguguucugcggaacuuccggcacauacgggacuggaucuuggccagauggugccgacaucaaccuaaugcccauuuga

SEQ ID NO: 143160 - RNA, 1410 nt, Artificial Sequence
  derived and/or modified CDS sequence (opt3) from neuraminidase__InfluenzaA__ABG37233
augaaccccaaucagaagaucauuaccauaggcagcgugucccugacaaucgccacuauuugcuuccucaugcaaaucgcuauucuugucacgaccguuacacugcacuuuaaacaguacgaguguaacucuccuccaucaaaucaggcaauguugugcgaaccgacuaucauagagagaaacaucaccgaaauuguguauuuaacaaauaccacuaucgagaaggaaauuugucccaaacuggccgaguacaggaacuggaguaagccucagugcaaaaucacaggguucgcgccauuuagcaaggacaauuccauacggcuaucugcuggaggugauauuuggguaacccgcgagcccuaugugucgugugacccuggcaagugcuaccaauucgcccucgggcagggaacgacuaucaacaaucgacauucaaacgauaccguccacgaccguacaccauauagaacucugcuuaugaaugaacugggcgugcccuuucauuuggguaccaaacagguuuguauugcauggagcaguuccucuugccacgaugggaaggccuggcuccaugugugugucacaggacacgacgagaacgcuaccgccagcuucaucuacgauggcaggcugguggacuccaucggcucauggaguaaaaauauucugcggacgcaggaaagcgagugcguauguauaaacgggacuugcacaguugugaugaccgauggaucugcauccggucgcgcugacacuaagauccucuuuauugaggaaggcaaaaucguccacauaucaccuuuaagcgggagugcccaacauguggaggaaugcucuuguuauccaagauacccgggagugaggugcgucugucgggauaauuggaagggcuccaaccgccccauuguugacaucaacgugaaggauuacagcaucguaucgucuuaugugugcuccggucuggucggggacacaccucgaaagaaugacucaaguagcaacuccuacuguagaaauccaaacaaugagaagggaucucacggcgugaaaggcugggcguucgaugacgggaacgauguuuggaugggaaggaccauuagcgcagaaucacggagugguuaugagacguuuaaggugaucggcgggugguccaaacccaauagcaaacuucagauuaaccgucaggucauaguggaccgcggaaauagaucuggcuacucagguaucuucaguguagaggggaaaagcugcauuaacagguguuuuuauguugaauugauccggggccgaaagcaggagaccgaagugugguggacauccaauucuaucgucguguucugcggaacuucgggcaccuacgggacaggaagcuggccugauggugccgacauuaaccugaugccaauauga

SEQ ID NO: 143161 - RNA, 1410 nt, Artificial Sequence
  derived and/or modified CDS sequence (opt3) from neuraminidase__InfluenzaA__ABG37244
augaaccccaaucagaagaucauuaccauaggcagcgugucccugacaaucgccacuauuugcuuccucaugcaaaucgcuauucuugucacgaccguuacacugcacuuuaaacaguacgaguguaacucuccuccaaauaaccaggugauguugugcgaaccgacuaucauagagagaaauaucaccgaaauuguauauuuaacaaacaccacuaucgagaaggaaauuugucccaaacuggcagaguacaggaauuggucaaagccucagugcaaaaucacaggguucgccccauuuaguaaggacaacagcauacggcuauccgcgggaggugauauuugggugacccgcgagcccuaugucucuugugacccuggcaagugcuaccaauucgcucucgggcagggaacgacucugaauaaccgacauucgaaugauaccgugcacgaccguacaccauauagaacucuucugaugaacgaauugggcguucccuuucaucucgguaccaaacagguguguaucgccuggucaagcaguuccugccacgaugggaaggcauggcugcaugucugugugacaggacacgacgagaaugccaccgcuucuuucauuuacgauggcaggcugguagacagcaucggcuccuggucaaagaacauccuccggacgcaggaaagugagugcguuuguauuaaugggacuugcacaguggucaugaccgauggaagcgcaucugaccgcgccgauacuaagauauuauuuaucgaggaagguaaaauugugcacaucuccccucugucaggcagcgcucaacauguggaggaaugcaguuguuauccaagauacccgggggucaggugcguuugucgggacaacuggaagggaucuaaccgccccauaguggauauuaauguaaaggacuacuccaucgugagcucguaugucugcucuggccuugugggugacacaccucggaaaaacgauuccucaaguagcuccuacuguuggaauccaaacaaugagaaagggggacacggcguuaaaggcugggccuucgacgaugggaacgacguguggaugggaagaaccaucucugaagagagcaggucagguuaugagacguuuaaggucauuggcggguggaguaaacccaauuccaaguugcagaucaaccgacaggugauuguagaucguggaaaucgcagcggcuacucugguauauucucaguugaagggaaaaguugcaucaacagauguuuuuauguggagcugauuaggggccggaagcaggaaaccgaggucugguggacaagcaauuccaucguggucuucugcggaacuucuggcaccuacgggacaggaucguggccugacggugcggauaucaaccuaaugccaauuuga

SEQ ID NO: 143162 - RNA, 1410 nt, Artificial Sequence; identical to SEQ ID NO: 143161
  derived and/or modified CDS sequence (opt3) from neuraminidase__InfluenzaA__ABG37255

SEQ ID NO: 143163 - RNA, 1410 nt, Artificial Sequence; identical to SEQ ID NO: 143148
  derived and/or modified CDS sequence (opt3) from neuraminidase__InfluenzaA__ABG37266

SEQ ID NO: 143164 - RNA, 1410 nt, Artificial Sequence; identical to SEQ ID NO: 143161
  derived and/or modified CDS sequence (opt3) from neuraminidase__InfluenzaA__ABG37277

SEQ ID NO: 143165 - RNA, 1410 nt, Artificial Sequence; identical to SEQ ID NO: 143161
  derived and/or modified CDS sequence (opt3) from neuraminidase__InfluenzaA__ABG37288

SEQ ID NO: 143166 - RNA, 1410 nt, Artificial Sequence; identical to SEQ ID NO: 143161
  derived and/or modified CDS sequence (opt3) from neuraminidase__InfluenzaA__ABG37310

SEQ ID NO: 143167 - RNA, 1410 nt, Artificial Sequence; identical to SEQ ID NO: 143148
  derived and/or modified CDS sequence (opt3) from neuraminidase__InfluenzaA__ABG37321

SEQ ID NO: 143168 - RNA, 1410 nt, Artificial Sequence
  derived and/or modified CDS sequence (opt3) from neuraminidase__InfluenzaA__ABG37332
augaaccccaaucagaagaucauuaccauaggcagcgugucccugacaaucgccacuauuugcuuccucaugcaaaucgcuauucuugucacgaccguuacacugcacuuuaaacagcaugaguguaacucuccuccaaauaaccaggugauguugugcgaaccgacuaucauagagagaaauaucaccgaaauuguacacuuaacaaacaccacuaucgagaaggaaauuugucccaaacuggcagaguacaggaauuggucaaagccucagugcaaaaucacaggguucgccccauuuaguaaggacaacagcauacggcuauccgcgggaggugauauuugggugacccgcgagcccuaugucucuugugacccuggcaagugcuaccaauucgcucucgggcagggaacgacucugaauaaccgacauucgaaugauaccgugcacgaccguacaccauauagaacucuucugaugaacgaauugggcguucccuuucaucucgguaccaaacagguguguaucgccuggucaagcaguuccugccacgaugggaaggcauggcugcacgucugugugacaggacaugacgagaaugccaccgcuucuuucauuuacgauggcaggcugguagacagcaucggcuccuggaguaaaaacauccuccggacgcaggaaucagagugcguuuguauuaaugggacuugcacaguggucaugaccgauggaagcgcaucugaccgcgccgauacuaagauauuauuuaucgaggaagguaaaauugugcacaucuccccucugucaggcggggcucaacauguggaggaaugcagcuguuauccaagauacccgggagucaggugcguuugucgggacaacuggaagggcaguaaccgccccauaguggauauuaauguaaaggacuauucuaucguguccagcuacgucugcucgggucuugugggggacacaccucggaaaaacgauucuuccucaaguagcuacuguuggaauccaaacaaugagaagggaggccacggcguuaaagggugggccuucgacgauggaaacgacguguggauggguagaaccaucuccgaagagucuaggagcggcuaugagacguuuaaggucauugggggauggucaaaacccaauaguaaguugcagaucaaccgacaggugauuguagaucguggcaaucgcuccgguuacagcgggauauucucuguugaaggcaaaucaugcaucaacagauguuuuuauguggagcugauuaggggacggaagcaggaaaccgaggucugguggacaaguaauagcaucguggucuucugcggcacuuccgggaccuacggaacagguucuuggccugacggcgcggauaucaaccuaaugccaauuuga

SEQ ID NO: 143169 - RNA, 1410 nt, Artificial Sequence
  derived and/or modified CDS sequence (opt3) from neuraminidase__InfluenzaA__ABG37343
augaaccccaaucagaagaucauuaccauaggcagcgugucccugacaaucgccacuauuugcuuccucaugcaaaucgcuauucuugucacgaccguuacacugcacuuuaaacaguacgaguguaacucuccuccaaauaaccaggugauguugugcgaaccgacuaucauagagagaaauaucaccgaaauuguauauuuaacaaacaccacuaucgagaaggaaauuugucccaaacuggcagaguacaggaauuggucaaagccucagugcaaaaucacaggguucgccccauuuaguaaggacaacagcauacggcuauccgcgggaggugauauuugggugacccgcgagcccuaugucucuugugacccuggcaagugcuaccaauucgcucucgggcagggaacgacucugaauaaccgacauucgaaugauaccgugcacgaccguacaccauauagaacucuucugaugaacgaauugggcguucccuuucaucucgguaccaaacagguguguaucgccuggucaagcaguuccugccacgaugggaaggcauggcugcaugucugugugacaggacacgacgagaaugccaccgcuucuuucauuuacgauggcaggcugguagacagcaucggcuccuggucaaagaacauccuccggacgcaggaaagugagugcguuuguauuaaugggacuugcacaguggucaugaccgauggaagcgcaucugaccgcgccgauacuaagauauuauuuaucgaggaagguaaaauugugcacaucuccccucugucaggcagcgcucaacauguggaggaaugcaguuguuauccaagauacccgggggucaggugcguuugucgggacaacuggaagggaucuaaccgccccauaguggauauuaauguaaagaacuacuccaucgugagcucguaugucugcucuggccuugugggugacacaccucggaaaaaugacuccucaaguagcuccuacuguuggaacccaaauaacgagaaagggggacacggcguuaaaggcugggccuucgaugacgggaaugauguguggaugggaagaaccaucucugaagagagcaggucagguuaugagacguuuaaggucauuggcggguggaguaaacccaacuccaaguugcagaucaaucgacaggugauuguagaccguggaaaccgcagcggcuacucugguauauucucaguugaagggaaaaguugcaucaauagauguuuuuauguggagcugauuaggggccggaagcaggaaaccgaggucugguggacaagcaacuccaucguggucuucugcggaacuucuggcaccuacgggacaggaucguggccugauggugcggacaucaaucuaaugccaauuuga

SEQ ID NO: 143170 - RNA, 1410 nt, Artificial Sequence; identical to SEQ ID NO: 143149
  derived and/or modified CDS sequence (opt3) from neuraminidase__InfluenzaA__ABG37354

SEQ ID NO: 143171 - RNA, 1413 nt, Artificial Sequence; identical to SEQ ID NO: 142876
  derived and/or modified CDS sequence (opt3) from neuraminidase__InfluenzaA__ABG37365

SEQ ID NO: 143172 - RNA, 1413 nt, Artificial Sequence; identical to SEQ ID NO: 142978
  derived and/or modified CDS sequence (opt3) from neuraminidase__InfluenzaA__ABG37387

SEQ ID NO: 143173 - RNA, 1413 nt, Artificial Sequence
  derived and/or modified CDS sequence (opt3) from neuraminidase__InfluenzaA__ABG37398
augaaccccaaucagaagaucauuaccauaggcagcaucuccauugccaucgggauuaucucucugaugcuccaaauaggaaacaucauuucaaucugggcuagucacagcauucagacagguucccagaaucauacuggcgugugcaaccagagaaucauaacguacgagaauaacaccugggucaaucacacauauguuaacauuaauaacacuaaugugaucgcagggaaagacaagaccucuguaacacuugccggaaacucgucacuguguagcauuaguggcugggcgaucuacaccaaagauaauuccaucaggauugguucuaagggggacguguucgucauacgggaaccuuuuaucagcugcucccauuuggagugucgcacuuucuuuuuaacacaaggagcucugcuaaacgauaaacacucaaauggcaccgugaaggaccgaaguccauaucgugcccucaugagcugcccgcugggcgaagcacccucuccuuacaacuccaaguucgagucaguugccuggagcgcuagugcaugucaugaugggaugggauggcuuacgauugguaucucuggcccagacaacggggccguggcuguccugaaauauaauggaauaauuacugaaaccaucaaguccuggaaaaagcagaucuugagaacacaggagagcgagugcguguguguaaacggcucgugcuuuacuauuaugaccgauggucccucuaauggggccgcguccuacaaaaucuucaagauugaaaagggaaaaguuacaaagucaauagagcucaacgcaccuaauuuucacuaugaagaguguaguugcuacccagacaccggcacggugaugugugucugcagggauaacuggcacggcagcaaucggcccuggguguccuucaaccagaaucuggacuaccaaaucggguauauuugcucuggaguguuuggugauaacccucgcccaaaagacggcgaggggagcuguaauccggucacuguugauggagccaacggcgugaaggguuucucauacaaauaugggaauggcguauggaucggaagaacaaagaguaacaggcugcggaaaggcuuugaaaugaucugggaccccaauggguggaccgacacugauuccgacuucagcgugaagcaggaugucguggcuauuacagacuggucuggauacucagguaguuuuguucagcauccugagcucaccggcuuagauugcauacgcccauguuucuggguggaacugguccgagggcuucccaaggagaacacgaccaucuggacaagcggauccucuauuucguucugcggcgugaacagcgacacugccaauugguccuggccugauggugcagaauugccauuuaccaucgacaaauga

SEQ ID NO: 143174 - RNA, 1410 nt, Artificial Sequence
  derived and/or modified CDS sequence (opt3) from neuraminidase__InfluenzaA__ABG37409
augaaccccaaucagaagaucauuaccauaggcagcgugucccugacaaucgccacuauuugcuuccucaugcaaaucgucauucuuguuacgaccgugacacugcacuuuaaacaguacgaguguaacucuccuccaaauaaccagguaaugccgugcgaacccacuaucauagagagaaauaucaccgaaauuguguauuugacaaacaccacuaucgagaaggaaauuuguccuaaauuagcugaguacaggaauuggucaaagccacagugcaacaucacaggguucgcacccuuuaguaaagacaauagcauacggcuguccgccggaggugauauuugggucacccgcgagccuuaugugucuugugacccagauaagugcuaccaauucgcgcuaggccaggggacgacucucaacaauggacauucgaacgacaccguucacgaucgaacacccuaucguacucugcuuaugaaugaacugggcgugccuuuucauuuggguaccaagcaggucuguaucgcuuggucaagcaguuccugccacgacgggaaagccuggcuccauguguguguaacaggagaugacgagaacgcaaccgccucuuucauuuacaauggcagacugguugauagcaucggcuccuggucaaagaaaauccugaggacgcaggaaagugagugcguguguauuaacgggacuugcacagucgugaugaccgacggaagcgcuucugguaaggcagauacuaaaauacucuuuaucgaggaaggcaagauugugcacacauccuuacugucagggagcgcccaacacgucgaggaaugcaguuguuauccacgguacccgggaguucgcugcguguguagagacaacuggaagggcucuaauaggcccaucguagauauaaacgugaaagacuacuccauugucagcucguaugugugcucuggucuuguuggggacaccccucggaagaaugauuccucaaguagcucccauuguuuggacccaaacaaugaggaaggaggccacggcgugaaagggugggcuuucgaugaccgcaacgaugucuggaugggacgaacgaucucugagaagcugagaagcgguuacgagaccuuuaaagugaucgaaggcuggucaaagcccaauaguaaacuacagauuaacaggcagguaaucguugaccgggggaaucguuccggauauagcggcauuuucucuguggaggguaagucaugcauaaaccgcuguuuuuacgucgaacucaucagagggaggaagcaggagacagaagugcuguggaccaguaauagcauugucguguucugcggcacuuccggaacauauggcacugggucuuggccugauggagccgacaucaaccuuaugccaaucuga

SEQ ID NO: 143175 - RNA, 1410 nt, Artificial Sequence
  derived and/or modified CDS sequence (opt3) from neuraminidase__InfluenzaA__ABG37442
augaaccccaaucagaagaucauuaccauaggcagcgugucccugacaaucgccacuauuugcuuccucaugcaaaucgcuauucuugucacgaccguuacacugcacuuuaaacaguucgaguguaacucuccuccaaauaaccaggugauguugugcgaaccgacuaucauagaggggaauaucaccgaaauuguauacuuaacaaacaccacuaucgagaaggaaauuugucccaaacuggcagaguauagaaauuggucaaagccucagugcaacaucacaggauuugccccauucaguaaagacaauagcauaaggcuauccgcggguggcgauauuugggugacccgggagcccuacgucucuugugacccugauaagugcuaucaauuugcucucgggcagggaacgacucugaacaauggccauucgaacgacaccgugcacgaucgcacaccauaccgaacucuucugaugaaugaauuggguguucccuuccaucucgggacccgucagguguguaucgccuggucaagcaguuccugccacgacggaaaggcauggcugcaugucugugugacaggcgaugacgagaacgccaccgcuucuuuuauuuauaauggcagacugguagauagcaucggguccuggaguaaaaagauccucaggacgcaggaaucagagugcguuuguauuaacggaacuugcacaguggucaugaccgacgguagcgcaucuggcaaagccgauacuaagauauuauucaucgaggaagggaaaauugugcacaucuccacacugucaggaagcgcucaacacguggaggaaugcaguuguuacccucgguauccaggcguccgcugcguuuguagagacaacuggaaggguucuaauaggccgauaguggauauuaacguaaaggacuacuccaucgugagcucguacgucugcucugggcuugugggagacacgccccggaaaaaugauuccuuuucaaguagccauuguuuggacccuaacaaugaggaaggcggccacgggguuaagggaugggccuucgaugacgguaacgauguguggaugggccgcaccaucuccgagaaacugcgaucuggguaugagaccuuuaaggucauugaaggauggagcaaaccaaauucaaagcuacagacaaacagacaggugaucguagagaggggcaaucggagugguuacuccgggauuuucagcguugaaggcaaaucuugcauaaaccguuguuuuuauguggagcucauccgcggaagaaaggaagagacugaggucugguggaccucaaauaguauuguggucuucugcggcacaagcgggacuuacggaaccgguuccuggcccgacggcgcggauaucaaccugaugccuaucuga

SEQ ID NO: 143176 - RNA, 1410 nt, Artificial Sequence; identical to SEQ ID NO: 142202
  derived and/or modified CDS sequence (opt3) from neuraminidase__InfluenzaA__ABG37453

SEQ ID NO: 143177 - RNA, 1410 nt, Artificial Sequence; identical to SEQ ID NO: 142214
  derived and/or modified CDS sequence (opt3) from neuraminidase__InfluenzaA__ABG37464

SEQ ID NO: 143178 - RNA, 1410 nt, Artificial Sequence
  derived and/or modified CDS sequence (opt3) from neuraminidase__InfluenzaA__ABG37475
augaaccccaaucagaagaucauuaccauaggcagcgugucccugacaaucgccacuauuugcuuccucaugcaaaucgcuauucuugucacgaccguuacacugcacuuuaaacaguacgaguguaacucuccuccaaauaaccaggugauguugugcgaaccgacuaucauagagagaaauaucaccgaaauuguauauuuaacaaacaccacuaucgagaaggaaauuugucccaaacuggcagaguacaggaauuggucaaagccucagugcaacaucacaggguucgccccauuuaguaaagacaauagcauacggcuauccgcgggaggugauauuugggugacccgcgagcccuaugucucuugugacccugauaagugcuaccaauucgcucucggccaggggacgacucugaacaauggacauucgaacgacaccgugcacgaucgaacaccauaucguacucuucugaugaaugaauugggcguucccuuucaucucgguaccagacagguguguaucgccuggucaagcaguuccugccacgacgggaaggcauggcugcaugucugugugacaggagaugacgagaacgccaccgcuucuuucauuuacaauggcaggcugguagauagcaucggcuccuggaguaaaaagauccuccggacgcaggaaucagagugcguuuguauuaacgggacuugcacaguggucaugaccgacggaagcgcaucugguaaagccgauacuaagauauuauuuaucgaggaaggcaaaauugugcacaucuccacacugucagggagcgcucaacacguggaggaaugcaguuguuauccucgcuacccaggagucagaugcguuuguagggacaacuggaagggcucuaaucggccgauaguggauauuaacguaaaggacuacuccaucgugagcucguaugucugcucuggucuugugggggacacccccaggaaaaaugauuccuucucaaguagccauuguuuggacccuaacaaugaggaaggaggccacggcguuaaggggugggccuuugaugacggaaacgauguguggaugggucgaacgaucuccgagaaacugagaucuggcuacgagaccuucaaggucauugaaggguggagcaaaccaaauucaaagcuacagaucaaccgccaggugauuguagagcggggagaccguaguggcuauuccgguauauuuagcguugaagggaaaucuugcaucaaucgcuguuucuacguggagcucauuagaggcaggaaggaagagacagagguccuguggacuucaaacaguaucguggucuuuugcggaaccagcggcacauaugggacuggauccuggcccgauggugcggacaucaaucuuaugccuauuuga

SEQ ID NO: 143179 - RNA, 1410 nt, Artificial Sequence
  derived and/or modified CDS sequence (opt3) from neuraminidase__InfluenzaA__ABG37486
augaaccccaaucagaagaucauuaccauaggcagcgugucccugacaaucgccacuauuugcuuccucaugcaaaucgcuauucuugucacgaccguuacacugcacuuuaaacaguacgaguguaacucuccuccaaauaaccaggugauguugugcgaaccgacuaucauagagagaaauaucaccgaaauuguauauuuaacaaacaccacuaucgagaaggaaauuugucccaaacuggcagaguacaggaauuggucaaagccucagugcaaccuaacaggguucgccccauuuaguaaagacaauagcauccggcucuccgcgggaggugauauaugggugacccgcgagcccuaugucucuugugacccugauaagugcuaccaauucgcucugggccaggggacgacucuuaacaauggacauucgaacgacaccgugcacgaucgaacaccauaucguacucuguugaugaaugaacucggcguucccuuucaucuggguaccagacagguguguauugccuggucaagcaguuccugccacgacgggaaggcauggcugcaugucugugugacaggagaugacgagaacgccaccgcuucuuucaucuacaauggcaggcucguagauagcauuggcuccuggaguaaaaagaucuuacggacgcaggaaucagagugcguuuguaucaacgggacuugcacaguggucaugaccgacggaagcgcaucugguaaagccgauacuaagauucuguuuauagaggaaggcaaaaucgugcacauuuccacacuuucagggagcgcucaacacguggaggaaugcaguuguuauccucgcuacccaggagucagaugcguuuguagggacaacuggaagggcucuaaucggccgaucguggauauaaacguaaaggacuacuccauugugagcucguaugucugcucugguuuggugggggacacccccaggaaaaaugauuccuucucaaguagccauugucuggacccuaacaaugaggaaggaggccacggcguuaaggggugggccuuugaugacggaaacgauguguggaugggucgaacgaucuccgagaaacuaagaucuggcuacgagaccuucaaggucaucgaaggguggagcaaaccaaauucaaagcuccagacaaaccgccaggugauuguagagcggggaaaucguaguggcuauuccgguaucuuuagcguugaagggaaaucuugcauuaaccgcuguuucuacguggagcugauaagaggcaggaaggaagagacugaggucugguggaccucaaauaguaucguggucuuuugcggaacaagcggcacuuaugggaccggauccuggcccgacggugcggauauuaaccuuaugccuaucuga

SEQ ID NO: 143180 - RNA, 1410 nt, Artificial Sequence
  derived and/or modified CDS sequence (opt3) from neuraminidase__InfluenzaA__ABG37497
augaaccccaaucagaagaucauuaccauaggcagcgugucccugacaaucgccacuauuugcuuccucaugcaaaucgcuauucuugucacgaccguuacacugcacuuuaaacaguacgaguguaacucuccuccaaauaaccaggugauguugugcgaaccgacuaucauagagagaaauaucaccgaaauuguauauuuaacaaacaccacuaucgagaaggaaauuugucccaaacuggcagaguacaggaauuggucaaagccucagugcaacaucacaggguucgccccauuuaguaaagacaauagcauacggcuauccgcgggaggugauauuugggugacccgcgagcccuaugucucuugugacccugauaagugcuaccaauucgcucucggccaggggacgacucugaacaauggacauucgaacgacaccgugcacgaucgaacaccauaucguacucuucugaugaaugaauugggcguucccuuucaucucgguaccagacagguguguaucgccuggucaagcaguuccugccacgacgggaaggcauggcugcaugucugugugacaggagaugacgagaacgccaccgcuucuuucauuuacaauggcaggcugguagauagcaucggcuccuggaguaaaaagauccuccggacgcaggaaucagagugcguuuguauuaacgggacuugcacaguggucaugaccgacggaagcgcaucugguaaagccgauacuaagauaaucuuuauugaggaaggcaaaaucgugcacauauccacauuaucagggagcgcucaacacguggaggaaugcaguuguuauccucgcuacccaggagucagaugcguuuguagggacaacuggaagggcucuaaucggccgauuguggauaucaacguaaaggacuacuccaucgugagcucguaugucugcucuggucuggugggggacacccccaggaaaaaugauuccuucucaaguagccauugucuugacccuaacaaugaggaaggaggccacggcguuaaggggugggccuuugaugacggaaacgauguguggaugggucgaacgauuuccgagaaauugagaucuggcuacgagaccuucaaggucaucgaaggguggagcaaaccaaauucaaagcugcagacaaaccgccaggugauuguagagcggggaaaucguaguggcuauuccgguauauuuagcguugaagggaaaucuugcaucaaccgcuguuucuacguggagcuaauuagaggcaggaaggaagagacugaggucugguggaccucaaauaguaucguggucuuuugcggaacaagcggcacuuaugggaccggauccuggcccgacggugcggauaucaaccucaugccuauuuga

SEQ ID NO: 143181 - RNA, 1410 nt, Artificial Sequence; identical to SEQ ID NO: 142228
  derived and/or modified CDS sequence (opt3) from neuraminidase__InfluenzaA__ABG37508

SEQ ID NO: 143182 - RNA, 1410 nt, Artificial Sequence; identical to SEQ ID NO: 142639
  derived and/or modified CDS sequence (opt3) from neuraminidase__InfluenzaA__ABG37519

SEQ ID NO: 143183 - RNA, 1410 nt, Artificial Sequence; identical to SEQ ID NO: 142639
  derived and/or modified CDS sequence (opt3) from neuraminidase__InfluenzaA__ABG37530

SEQ ID NO: 143184 - RNA, 1410 nt, Artificial Sequence; identical to SEQ ID NO: 142639
  derived and/or modified CDS sequence (opt3) from neuraminidase__InfluenzaA__ABG37541

SEQ ID NO: 143185 - RNA, 1410 nt, Artificial Sequence; identical to SEQ ID NO: 142639
  derived and/or modified CDS sequence (opt3) from neuraminidase__InfluenzaA__ABG37552

SEQ ID NO: 143186 - RNA, 1410 nt, Artificial Sequence; identical to SEQ ID NO: 142639
  derived and/or modified CDS sequence (opt3) from neuraminidase__InfluenzaA__ABG37563

SEQ ID NO: 143187 - RNA, 1410 nt, Artificial Sequence; identical to SEQ ID NO: 142639
  derived and/or modified CDS sequence (opt3) from neuraminidase__InfluenzaA__ABG37585

SEQ ID NO: 143188 - RNA, 1410 nt, Artificial Sequence; identical to SEQ ID NO: 142639
  derived and/or modified CDS sequence (opt3) from neuraminidase__InfluenzaA__ABG37596

SEQ ID NO: 143189 - RNA, 1410 nt, Artificial Sequence; identical to SEQ ID NO: 142639
  derived and/or modified CDS sequence (opt3) from neuraminidase__InfluenzaA__ABG37607

SEQ ID NO: 143190 - RNA, 1410 nt, Artificial Sequence; identical to SEQ ID NO: 142639
  derived and/or modified CDS sequence (opt3) from neuraminidase__InfluenzaA__ABG37618

SEQ ID NO: 143191 - RNA, 1413 nt, Artificial Sequence; identical to SEQ ID NO: 142876
  derived and/or modified CDS sequence (opt3) from neuraminidase__InfluenzaA__ABG47810

SEQ ID NO: 143192 - RNA, 1413 nt, Artificial Sequence
  derived and/or modified CDS sequence (opt3) from neuraminidase__InfluenzaA__ABG47832
augaaccccaaucagaagaucauuaccauaggcagcaucuccauugccaucgggauuaucucucugauacuccaagugggaaacaucauuucaaucugggcuagucacagcauucagacagguucccagaaucauacuggcaucugcaaccagagaauaauuacguacgaaaauucuaccugggucaaccaaacauauguuaauaucaacaauacuaacgugguagcagggaaagacaagaccucgaugacacuugccggaaauucaagccuguguccuauuaggggcugggcgaucuacaccaaagauaacaguauccggauugguuccaagggggacguguucgucauacgcgagccauuuaucucuugcagccacuuggagugucgaacuuucuuuuuaacacagggagcucugcuaaaugauaaacauuccaacggcaccgugaaggaccguucaccguauagagcccucaugaguugcccccugggcgaagcaccuagcccauacaauucuagguucgaguccguugccuggucagcuagcgcaugucacgaugggcuuggauggcugacgauugguaucaguggccccgacaacggggccguggcugucuugaaguauaacggaauaauuacugaaaccaucaaaucuuggaagaaacggauccuccgcacacaggaguccgagugcguguguaugaauggcagcugcuuuacuauuaugaccgaugguccuucgaacggggccgcgucuuacagaaucuucaagauugaaaaaggaaggguaacaaaguccauagagcuggacgcaccaaauuaucauuacgaagaguguucaugcuaccccaacaccggcacgguuaugugugugugccgggauaauuggcacggcaguaaccgcccuugggucagcuuuaaucagaaccuggacuaucaaaucggguacauuugcuccggaguguucggugauaauccacgaccgaaggacggcgaggggucuuguaaccccgugacugucgauggagccgacggcguuaaagguuuuagcuauagauacgggaauggcguguggaucggaaggacaaagucaaaccggcuccguaaaggcuucgaaaugaucugggacccuaauggguggaccgauacugacagugauuuuuccaugaagcaggacauuguagcuaugacagauuggagcggauauucugguucauucgugcagcacccagaguuaaccggccuggacugcaugcgccccuguuuuugggucgaacuugugagaggguugccuagggagaacacgaccauauggacaaguggaagcuccaucucuuucugcggcguuaauucggauacugccaacuggagcuggccagacggugcagaacugcccuucaccauugauaaauga

SEQ ID NO: 143193 - RNA, 1413 nt, Artificial Sequence; identical to SEQ ID NO: 143016
  derived and/or modified CDS sequence (opt3) from neuraminidase__InfluenzaA__ABG47843

SEQ ID NO: 143194 - RNA, 1410 nt, Artificial Sequence
  derived and/or modified CDS sequence (opt3) from neuraminidase__InfluenzaA__ABG47865
augaaccccaaucagaagaucauuaccauaggcagcgugucccugacaaucgccacuauuugcuuccucaugcaaaucgcuauucuugucaucacgguuacccugcacuuuaaacaguacgaguguaacucuccuccaaauaaccaggugauguugugcgaaccgacaauaaucgagagaaauauuacugaaaucguauauuuaaccaacacaaccauugagaaggaaaucugucccaaacuggcagaguacaggaauuggucaaagccucagugcaaaauaacuggguucgccccauuuaguaaggacaacagcauucggcuauccgcgggaggugauaucugggugacacgcgagcccuaugucucuugugacccugauaagugcuaccaauucgcucucggccaggggaccacgcugaauaaccgacauucgaaugacacugugcacgaucguaccccauauagaacacuucugaugaacgaauugggaguucccuuucaucucggcacuaaacagguguguauugccuggucaagcaguuccugccacgacgguaaggcauggcugcaugucugugugaccgggcacgaugagaaugccacagcuucuuucaucuacgacggaaggcugguagauagcaucggcuccuggaguaaaaagauucuccggacccaggaaucagagugcguuuguauaaacggcacgugcacuguggucaugacagacgggagcgcaucuggacgcgccgauaccaaaaucuuauuuauugaggaagguaagaucgugcacauauccccucugucaggcagcgcucaacauguggaggaaugcaguuguuauccaagauacucuggggucaggugcguuugucgggacaauuggaagggauccaaccgcccgauuguggauaucaacguaaaagacuacagcaucgugucgucuuaugucugcuccggccuugugggugacacuccccgaaagaaugauucaaguagcuccucucacuguuugaacccuaauaacgaggaagggggacauggcguuaaaggcugggccuucgacgaugggaaugacguguggaugggaagaacaauuagcgagaagcugaggucagguuacgagaccuuuaaagucaucggcggguggaguaagccaaacuccaaacuacagauuaaucgucaggugauaguagaucggggaaaccgcagcggcuauucugguaucuucucaguugaagggaagaguugcauuaauagauguuuuuacguggagcucaucaggggccggaagcaggaaacggaggucugguggaccagcaacuccaucguggucuucugcggaacaucuggcacuuaugggaccggaucguggcccgacggugcggauauuaaucugaugccuauauga

SEQ ID NO: 143195 - RNA, 1410 nt, Artificial Sequence; identical to SEQ ID NO: 143161
  derived and/or modified CDS sequence (opt3) from neuraminidase__InfluenzaA__ABG47876

SEQ ID NO: 143196 - RNA, 1410 nt, Artificial Sequence; identical to SEQ ID NO: 143161
  derived and/or modified CDS sequence (opt3) from neuraminidase__InfluenzaA__ABG47887

SEQ ID NO: 143197 - RNA, 1410 nt, Artificial Sequence; identical to SEQ ID NO: 143148
  derived and/or modified CDS sequence (opt3) from neuraminidase__InfluenzaA__ABG47898

SEQ ID NO: 143198 - RNA, 1410 nt, Artificial Sequence; identical to SEQ ID NO: 143161
  derived and/or modified CDS sequence (opt3) from neuraminidase__InfluenzaA__ABG47909

SEQ ID NO: 143199 - RNA, 1410 nt, Artificial Sequence; identical to SEQ ID NO: 143149
  derived and/or modified CDS sequence (opt3) from neuraminidase__InfluenzaA__ABG47920

SEQ ID NO: 143200 - RNA, 1410 nt, Artificial Sequence; identical to SEQ ID NO: 143149
  derived and/or modified CDS sequence (opt3) from neuraminidase__InfluenzaA__ABG47931

SEQ ID NO: 143201 - RNA, 1410 nt, Artificial Sequence; identical to SEQ ID NO: 143149
  derived and/or modified CDS sequence (opt3) from neuraminidase__InfluenzaA__ABG47942

SEQ ID NO: 143202 - RNA, 1410 nt, Artificial Sequence
  derived and/or modified CDS sequence (opt3) from neuraminidase__InfluenzaA__ABG47953
augaaccccaaucagaagaucauuaccauaggcagcgugucccugacaaucgccacuauuugcuuccucaugcaaaucgcuauucuugucacgaccguuacacugcacuuuaaacaguacgaguguaacucuccuccaucaaaucaggugauguugugcgaaccgacuaucauagagagaaacaucaccgaaauuguauauuuaacaaauaccacuaucgagaaggaaauuugucccaaacuggcagaguacaggaacuggaguaagccucagugcaaaaucacaggguucgccccauuuagcaaggacaauuccauacggcuaucugcgggaggugauauuugggugacccgcgagcccuaugucucgugugacccuggcaagugcuaccaauucgcucucgggcagggaacgacucugaacaaucgacauucaaacgauaccgugcacgaccguacaccauauagaacucuucugaugaaugaauugggcguucccuuucaucucgguaccaaacagguguguaucgccuggagcaguuccucuugccacgaugggaaggcauggcugcaugucugugugacaggacacgacgagaacgccaccgcuagcuucauuuacgauggcaggcugguagacuccaucggcucauggaguaaaaauauccuccggacgcaggaaagcgagugcguuuguauuaacgggacuugcacaguggucaugaccgauggaucugcauccgagcgcgccgacacuaagauauuauuuaucgaagaggguaaaauugugcacaucucaccucugagcggcagugcucaacauguggaagagugcucuuguuauccaagauacccgggggucaggugcguuugucgggauaauuggaagggauccaaccgccccauaguggacauuaacguaaaggauuacagcaucgugucgucuuaugucugcuccggccuugugggugacacaccucgaaagaaugacucaaguagcuccucuuacuguagaaacccaaauaacgaaaaagggagccacggaguuaaaggcugggccuucgaugacggcaaugauguguggauggggaggaccaucucagaggaguugcggaguggauaugaaacguuuaaggucauugguggcugguccaaacccaacagcaagcugcagaucaaucgucaggugauuguagaccgcgggaacagaucuggauacucaggcauauucaguguugaggguaaaagcugcaucaauagguguuuuuauguggaacuaauucgggggcgaaagcaggagaccgaagucugguggacauccaacucuaucguggucuucugcggcacuucgggaaccuacggcacagggagcuggccugauggagcgaauaucaaccucaugccaauuuga

SEQ ID NO: 143203 - RNA, 1410 nt, Artificial Sequence
  derived and/or modified CDS sequence (opt3) from neuraminidase__InfluenzaA__ABG47964
augaaccccaaucagaagaucauuaccauaggcagcgugucccugacaaucgccacuauuugcuuccucaugcaaaucgcuauucuugucacgaccguuacacugcacuuuaaacaguacgaguguaacucuccuccaaauaaccaggugauguugugcgaaccgacuaucauagagagaaauaucaccgaaauuguauauuuaacaaacaccacuaucgagaaggaaauuugucccaaacuggcagaguacaggaauuggucaaagccucagugcaaaaucacaggguucgccccauuuaguaaggacaacagcauacggcuauccgcgggaggugauauuugggugacccgcgagcccuaugucucuugugacccuggcaagugcuaccaauucgcucucgggcagggaacgacucugaauaaccgacauucgaaugauaccgugcacgaccguacaccauauagaacucuucugaugaacgaauugggcguucccuuucaucucgguaccaaacagguguguaucgccuggucaagcaguuccugccacgaugggaaggcauggcugcaugucugugugacaggacacgacgagaaugccaccgcuucuuucauuuacgauggcaggcugguagacagcaucggcuccuggaguaaaaacauccuccggacgcaggaaucagagugcguuuguauuaaugggacuugcacaguggucaugaccgauggaagcgcaucugagcgcgccgacacuaagauauuauuuaucgaagaggguaaaauugugcacaucuccccucugucaggcagcgcucaacauguggaagagugcaguuguuauccaagauacccgggggucaggugcguuugucgggauaacuggaagggaucuaaccgccccauaguggacauuaauguaaaggauuacuccaucgugagcucguaugucugcucuggccuugugggugacacaccucggaaaaacgacuccucaaguagcuccuacugucagaauccaaacaaugaaaaggggucucacggaguuaaaggcugggccuucgaugacggcaacgauguguggauggggagaaccaucagcgaggaguugaggucaggauaugaaacguuuaaggucauugguggcuggaguaaacccaauuccaagcugcagaucaaccgacaggugauuguagaccgugggaaucgcagcggauacucuggcauauucucaguugaggguaaaaguugcaucaacagauguuuuuauguggaacuaauuagggggcggaagcaagagaccgaagucugguggacaagcaauuccaucguggucuucugcggcacuucuggaaccuacggcacagggucguggccugauggagcggacaucaaccucaugccaauuuga

SEQ ID NO: 143204 - RNA, 1410 nt, Artificial Sequence
  derived and/or modified CDS sequence (opt3) from neuraminidase__InfluenzaA__ABG47975
augaaccccaaucagaagaucauuaccauaggcagcgugucccugacaaucgccacuauuugcuuccucaugcaaaucgcuauucuugucacgaccguuacacugcacuuuaaacaguacgaguguaacucuccuccaucaaaucaggugauguugugcgaaccgacuaucauagagagaaacaucaccgaaauuguauauuuaacaaauaccacuaucgagaaggaaauuugucccaaacuggcagaguacaggaacuggaguaagccucagugcaaaaucacaggguucgccccauuuagcaaggacaauuccauacggcuaucugcgggaggugauauuugggugacccgcgagcccuaugucucgugugacccuggcaagugcuaccaauucgcucucgggcagggaacgacucugaacaaucgacauucaaacgauaccgugcacgaccguacaccauauagaacucuucugaugaaugaauugggcguucccuuucaucucgguaccaaacagguguguaucgccuggagcaguuccucuugccacgaugggaaggcauggcugcaugucugugugacaggacacgacgagaacgccaccgcuagcuucauuuacgauggcaggcugguagacuccaucggcucauggaguaaaaauauccuccggacgcaggaaagcgagugcguuuguauuaacgggacuugcacaguggucaugaccgauggaucugcauccgagcgcgccgacacuaagauauuauuuaucgaagaggguaaaauugugcacaucucaccucugagcggcagugcucaacauguggaagagugcucuuguuauccaagauacccgggggucaggugcguuugucgggauaauuggaagggauccaaccgccccauaguggacauuaacguaaaggauuacagcaucgugucgucuuaugucugcuccggccuugugggugacacaccucgaaagaaugacucaaguagcuccucuuacuguagagauccaaacaaugaaagggggagccacggaguuaaaggcugggccuucgacgauggcaacgacguguggauggggcggaccaucucagaggaguugcguaguggauaugaaacguuuaaagucauugguggcugguccaagcccaauagcaaacugcagaucaaccgccaggugauuguagauagagggaauaggucuggauacucaggcauauucaguguugaggguaagagcugcaucaaccgguguuuuuauguggaacuaauucgagggcgcaaacaggagaccgaagucugguggacauccaauucuaucguggucuucugcggcacuucgggaaccuacggcacagggagcuggccugacggagcggauaucaaccucaugccaauuuga

SEQ ID NO: 143205 - RNA, 1410 nt, Artificial Sequence
  derived and/or modified CDS sequence (opt3) from neuraminidase__InfluenzaA__ABG47986
augaaccccaaucagaagaucauuaccauaggcagcgugucccugacaaucgccacuauuugcuuccucaugcaaaucgcuauucuugucacgaccguuacacugcacuuuaaacaguacgaguguaacucuccuccaucaaaucaggugauguugugcgaaccgacuaucauagagagaaacaucaccgaaauuguauauuuaacaaauaccacuaucgagaaggaaauuugucccaaacuggcagaguacaggaacuggaguaagccucagugcaaaaucacaggguucgccccauuuagcaaggacaauuccauacggcuaucugcgggaggugauauuugggugacccgcgagcccuaugucucgugugacccuggcaagugcuaccaauucgcucucgggcagggaacgacucugaacaaucgacauucaaacgauaccgugcacgaccguacaccauauagaacucuucugaugaaugaauugggcguucccuuucaucucgguaccaaacagguguguaucgccuggagcaguuccucuugccacgaugggaaggcauggcugcaugucugugugacaggacacgacgagaacgccaccgcuagcuucauuuacgauggcaggcugguagacuccaucggcucauggaguaaaaauauccuccggacgcaggaaagcgagugcguuuguauuaacgggacuugcacaguggucaugaccgauggaucugcauccgagcgcgccgacacuaagauauuauuuaucgaagaggguaaaauugugcacaucucaccucugagcggcagugcucaacauguggaagagugcucuuguuauccaagauacccgggggucaggugcguuugucgggauaauuggaagggauccaaccgccccauaguggacauuaacguaaaggauuacagcaucgugucgucuuaugucugcuccggccuugugggugacacaccucgaaagaaugacucaaguagcuccucuuacuguagaaaaccaaacaaugaaaaagggagccacggaguuaagggcugggccuucgaugacggcaacgauguguggauggggaggaccaucucagaggaguugcggaguggauaugaaacguuuaaagucauugguggcugguccaagcccaauagcaaacugcagaucaaccgucaggugauuguagaccgcgggaauagaucuggauacucaggcauauucaguguugaggguaagagcugcaucaacagguguuuuuauguggaacuaauucgggggcgaaagcaggagaccgaagucugguggacauccaauucuaucguggucuucugcggcacuucgggaaccuacggcacagggagcuggccugauggagcggacaucaaccucaugccaauuuga

SEQ ID NO: 143206 - RNA, 1410 nt, Artificial Sequence; identical to SEQ ID NO: 143149
  derived and/or modified CDS sequence (opt3) from neuraminidase__InfluenzaA__ABG47997

SEQ ID NO: 143207 - RNA, 1410 nt, Artificial Sequence
  derived and/or modified CDS sequence (opt3) from neuraminidase__InfluenzaA__ABG48008
augaaccccaaucagaagaucauuaccauaggcagcgugucccugacaaucgccacuauuugcuuccucaugcaaaucgcuauucuugucacgaccguuacacugcacuuuaaacaguacgaguguaacucuccuccaucaaaucaggugauguugugcgaaccgacuaucauagagagaaacaucaccgaaauuguauauuuaacaaauaccacuaucgagaaggaaauuugucccaaacuggcagaguacaggaacuggaguaagccucagugcaaaaucacaggguucgccccauuuagcaaggacaauuccauacggcuaucugcgggaggugauauuugggugacccgcgagcccuaugucucgugugacccuggcaagugcuaccaauucgcucucgggcagggaacgacucugaacaaucgacauucaaacgauaccgugcacgaccguacaccauauagaacucuucugaugaaugaauugggcguucccuuucaucucgguaccaaacagguguguaucgccuggagcaguuccucuugccacgaugggaaggcauggcugcaugucugugugacaggacacgacgagaacgccaccgcuagcuucauuuacgauggcaggcugguagacuccaucggcucauggaguaaaaauauccuccggacgcaggaaagcgagugcguuuguauuaacgggacuugcacaguggucaugaccgauggaucugcauccgagcgcgccgacacuaagauauuauuuaucgaagaggguaaaauugugcacaucucaccucugagcggcagugcucaacauguggaagagugcucuuguuauccaagauacccgggggucaggugcguuugucgggauaauuggaagggauccaaccgccccauaguggacauuaacguaaaggauuacagcaucgugucgucuuaugucugcuccggccuugugggugacacaccucgaagaaaugacucaaguagcuccucuuacuguaggaaaccaaacaaugaaaaggggagccacggaguuaaaggcugggccuucgaugacggcaacgauguguggauggggcggaccaucucagaggaguugcguaguggauaugaaacguuuaaggucauugguggcugguccaaacccaauagcaagcugcagaucaaccgccaggugauuguagacagagggaauaggucuggauacucaggcauauucaguguugaggguaaaagcugcaucaaccgguguuuuuauguggaacuaauucgagggcgcaagcaggagaccgaagucugguggacauccaauucuaucguggucuucugcggcacuucgggaaccuacggcacagggagcuggccugauggagcggacaucaaccucaugccaauuuga

SEQ ID NO: 143208 - RNA, 1410 nt, Artificial Sequence
  derived and/or modified CDS sequence (opt3) from neuraminidase__InfluenzaA__ABG48019
augaaccccaaucagaagaucauuaccauaggcagcgugucccugacaaucgccacuauuugcuuccucaugcaaaucgcuauucuugucacgaccguuacacugcacuuuaaacaguacgaguguaacucuccuccaucaaaucaggugauguugugcgaaccgacuaucauagagagaaacaucaccgaaauuguauauuuaacaaauaccacuaucgagaaggaaauuugucccaaacuggcagaguacaggaacuggaguaagccucagugcaaaaucacaggguucgccccauuuagcaaggacaauuccauacggcuaucugcgggaggugauauuugggugacccgcgagcccuaugucucgugugacccuggcaagugcuaccaauucgcucucgggcagggaacgacucugaacaaucgacauucaaacgauaccgugcacgaccguacaccauauagaacucuucugaugaaugaauugggcguucccuuucaucucgguaccaaacagguguguaucgccuggagcaguuccucuugccacgaugggaaggcauggcugcaugucugugugacaggacacgacgagaacgccaccgcuagcuucauuuacgauggcaggcugguagacuccaucggcucauggaguaaaaauauccuccggacgcaggaaagcgagugcguuuguauuaacgggacuugcacaguggucaugaccgauggaucugcauccgagcgcgccgacacuaagauauuauuuaucgaagaggguaaaauugugcacaucucaccucugagcggcagugcucaacauguggaagagugcucuuguuauccaagauacccgggggucaggugcgccugucgggauaauuggaagggauccaaccgccccauaguugacauuaacgugaaggauuacagcaucguaucgucuuaugugugcuccggccuugucggugacacaccucgaaagaaugacucaaguagcuccucuuacuguagaaacccaaauaacgaaaaagggagccacggagugaaaggcugggcguucgaugacggcaaugauguuuggauggggaggaccaucucagaggaguugcggaguggauaugaaacguuuaaggugauugguggcugguccaaacccaacagcaagcugcagaucaaucgucaggucauuguggaccgcgauaacagaucuggguacucaggaauauucaguguagagggcaaaagcugcaucaauagguguuuuuauguugaacuaauucggggucgaaagcaggagaccgaagugugguggacauccaacucuaucgucguguucugcgggacuucgggcaccuacggaacaggcagcuggccugacggggcagauaucaaucucaugccaauuuga

SEQ ID NO: 143209 - RNA, 1410 nt, Artificial Sequence; identical to SEQ ID NO: 143149
  derived and/or modified CDS sequence (opt3) from neuraminidase__InfluenzaA__ABG48030

SEQ ID NO: 143210 - RNA, 1410 nt, Artificial Sequence; identical to SEQ ID NO: 143149
  derived and/or modified CDS sequence (opt3) from neuraminidase__InfluenzaA__ABG48041

SEQ ID NO: 143211 - RNA, 1413 nt, Artificial Sequence; identical to SEQ ID NO: 142876
  derived and/or modified CDS sequence (opt3) from neuraminidase__InfluenzaA__ABG48052

SEQ ID NO: 143212 - RNA, 1410 nt, Artificial Sequence; identical to SEQ ID NO: 142778
  derived and/or modified CDS sequence (opt3) from neuraminidase__InfluenzaA__ABG48063

SEQ ID NO: 143213 - RNA, 1410 nt, Artificial Sequence; identical to SEQ ID NO: 142901
  derived and/or modified CDS sequence (opt3) from neuraminidase__InfluenzaA__ABG48074

SEQ ID NO: 143214 - RNA, 1410 nt, Artificial Sequence; identical to SEQ ID NO: 142202
  derived and/or modified CDS sequence (opt3) from neuraminidase__InfluenzaA__ABG48085

SEQ ID NO: 143215 - RNA, 1410 nt, Artificial Sequence
  derived and/or modified CDS sequence (opt3) from neuraminidase__InfluenzaA__ABG48107
augaaccccaaucagaagaucauuaccauaggcagcgugucccugacaaucgccacuauuugcuuccucaugcagaucgcuauucuugucacgaccguuacacugcacuuuaaacaguacgaguguaacucuccuccaaauaaccaggugauguugugcgaaccgacuaucauagagagaaauaucaccgaaauuguauauuuaacaaacaccacuaucgagaaggaaauuugucccaaacuggcagaguacaggaauuggucaaagccucagugcaacaucacaggguucgccccauuuaguaaagacaauagcauacggcuauccgcgggaggugauauuugggugacccgcgagcccuaugucucuugugacccugauaagugcuaccaauucgcucucggccaggggacgacucugaacaauggacauucgaacgacaccgugcacgaucgaacaccauaucguacucuucugaugaaugaauugggcguucccuuucaucucgguaccagacagguguguaucgccuggucaagcaguuccugccacgacgggaaggcauggcugcaugucugugugacaggagaugacgagaacgccaccgcuucuuucauuuacaauggcaggcugguagauagcaucggcuccuggaguaaaaagacgcuccggacucaggaaucagagugcguuuguaucaacgggacaugcaccguggucaugacugacggaagcgcaucugguaaagccgauacaaagauuuuauuuauagaggaaggcaaaaucgugcacauuuccacccugucagggagcgcucaacacguggaggaaugcaguuguuauccucgcuacccaggagucagaugcguuuguagggacaacuggaagggcucuaaucggccgaucguggauauaaacguaaaggacuacuccauugugagcucguaugucugcucuggucuugugggggacacgccccgcaaaaaugauuccuucucaaguagccauuguuuggacccuaacaaugaggaaggaggccacggcguuaaggggugggccuuugaugacggaaacgauguguggaugggucgaaccaucuccgagaaacugagaucuggcuacgagacauucaaggucaucgaaggguggagcaaaccaaauucaaagcuacagauuaacaggcaagugaucguagagcggggaaaucguaguggcuauuccgguauuuuuagcguugaagggaaaucuugcauaaaccgcuguuucuacguggagcucaucagaggcaggaaggaagagacugaggucugguggaccucaaauaguauuguggucuuuugcggaacaagcggcacuuaugggaccggauccuggcccgacggugcggauaucaaccugaugccuaucuga

SEQ ID NO: 143216 - RNA, 1410 nt, Artificial Sequence; identical to SEQ ID NO: 142214
  derived and/or modified CDS sequence (opt3) from neuraminidase__InfluenzaA__ABG48118

SEQ ID NO: 143217 - RNA, 1410 nt, Artificial Sequence; identical to SEQ ID NO: 142214
  derived and/or modified CDS sequence (opt3) from neuraminidase__InfluenzaA__ABG48129

SEQ ID NO: 143218 - RNA, 1410 nt, Artificial Sequence; identical to SEQ ID NO: 142202
  derived and/or modified CDS sequence (opt3) from neuraminidase__InfluenzaA__ABG48140

SEQ ID NO: 143219 - RNA, 1410 nt, Artificial Sequence; identical to SEQ ID NO: 142214
  derived and/or modified CDS sequence (opt3) from neuraminidase__InfluenzaA__ABG48151

SEQ ID NO: 143220 - RNA, 1410 nt, Artificial Sequence; identical to SEQ ID NO: 142202
  derived and/or modified CDS sequence (opt3) from neuraminidase__InfluenzaA__ABG48173

SEQ ID NO: 143221 - RNA, 1410 nt, Artificial Sequence; identical to SEQ ID NO: 142214
  derived and/or modified CDS sequence (opt3) from neuraminidase__InfluenzaA__ABG48184

SEQ ID NO: 143222 - RNA, 1410 nt, Artificial Sequence
  derived and/or modified CDS sequence (opt3) from neuraminidase__InfluenzaA__ABG48195
augaaccccaaucagaagaucauuaccauaggcagcgugucccugacaaucgccacuauuugcuuccucaugcaaaucgcuauucuugucacgaccguuacacugcacuuuaaacaguacgaguguaacucuccuccaaauaaccaggugauguugugcgaaccgacuaucauagagagaaauaucaccgaaauuguauauuuaacaaacaccacuaucgagaaggaaauuugucccaaacuggcagaguacaggaauuggucaaagccucagugcaacaucacaggguucgccccauuuaguaaagacaauagcauacggcuauccgcgggaggugauauuugggugacccgcgagcccuaugucucuugugacccugauaagugcuaccaauucgcucucggccaggggacgacucugaacaauggacauucgaacgacaccgugcacgaucgaacaccauaucguacucuucugaugaaugaauugggcguucccuuucaucucgguaccagacagguguguaucgccuggucaagcaguuccugccacgacgggaaggcauggcugcaugucugugugacaggagaugacgagaacgccaccgcuucuuucauuuacaauggcaggcugguagauagcaucggcuccuggaguaaaaagauccuccggacgcaggaaucagagugcguuuguauuaacgggacuugcacaguggucaugaccgacggaagcgcaucugguaaagccgauacuaagauauuauuuaucgaggaaggcaaaauugugcacaucuccacacugucagggagcgcucaacacguggaggaaugcaguuguuauccucgcuacccaggagucagaugcguuuguagggacaacuggaagggcucuaaucggccgauaguggauauuaacguaaaggacuacuccaucgugagcucguaugucugcucuggucuugugggggacacccccaggaaaaaugauuccuucucaaguagccauuguaucgacccuaacaaugaggaaggaggccacggcguuaaggggugggccuuugaugacggaaacgauguguggaugggucgaacgauuuccgagaaauugagaucuggcuacgagaccuucaaggucaucgaaggguggagcaaaccaaauucaaagcugcagacaaaccgccaggugauuguagagcggggaaaucguaguggcuauuccgguauauuuagcguugaagggaaaucuugcaucaaccgcuguuucuacguggagcuaauuagaggcaggaaggaagagacugaggucugguggaccucaaauaguaucguggucuuuugcggaacaagcggcacuuaugggaccggauccuggcccgacggugcggauaucaaccucaugccuauuuga

SEQ ID NO: 143223 - RNA, 1410 nt, Artificial Sequence
  derived and/or modified CDS sequence (opt3) from neuraminidase__InfluenzaA__ABG48206
augaaccccaaucagaagaucauuaccauaggcagcgugucccugacaaucgccacuauuugcuuccucaugcaaaucgcuauucuugucacgaccguuacacugcacuuuaaacagcaugaguguaacucuccuccaaauaaccaggugauguugugcgaaccgacuaucauagagagaaauaucaccgaaauuguauacuuaacaaacaccacuaucgagaaggaaauuugucccaaacugguggaguauaggaauuggucaaagccucagugcaacaucacaggguucgcaccauuuaguaaagacaauagcauacggcuauccgccggaggugauauuugggucacccgcgagcccuacgugucuugugacccugauaagugcuaucaauucgcgcucggccaggggacgacucugaacaauggacacucgaacgacaccguucaugaucgaacaccauaccguacucuucugaugaaugaauugggcgugcccuuucaccucgguaccagacaggucuguaucgcuuggucaagcaguuccugccaugacgggaaggccuggcugcacguguguguaacaggagaugacaaaaacgcaaccgccucuuucauuuauaauggcaggcugguugauagcaucggcuccuggucaaagaaaauccuccggacgcaggagagugaaugcguguguauuaacgggacuugcacagucgugaugaccgacggaagcgcuucugguaaggcagauacuaaaauauuauuuaucgaggagggcaagauugugcacaucuccacacugucagggagcgcccaacaugucgaagagugcaguuguuacccucgcuauccaggaguuagaugcguguguagggacaacuggaagggcucuaaucggccgauaguagauauuaacgugaaagacuacuccaucgucagcucguacgugugcucuggucuuguuggggacacgccccgcaagaaugauuccuucucaaguagccacuguuuggacccuaacaaugaagagggaggccauggcgugaaagggugggcuuuugaugacggaaacgaugucuggaugggucgaaccaucaaugaaaagcugagauccggcuaugagaccuucaaagugauugagggguggucuaagccaaacagcaaacuacagaucaauaggcagguaauuguugaacggggaaaccguucaggcuacagugguauauuuuccguggagggcaagagcugcaucaaucgcuguuucuaugucgaacucauuagagggaggaaggaggaaacagaggugugguggacuucuaacucaaucgucguguuuugcggaaccaguggcacauacgggacuggaagcuggcccgacggugccgauaucaaucugaugccuauuuga

SEQ ID NO: 143224 - RNA, 1410 nt, Artificial Sequence; identical to SEQ ID NO: 142639
  derived and/or modified CDS sequence (opt3) from neuraminidase__InfluenzaA__ABG48217

SEQ ID NO: 143225 - RNA, 1410 nt, Artificial Sequence; identical to SEQ ID NO: 142639
  derived and/or modified CDS sequence (opt3) from neuraminidase__InfluenzaA__ABG48228

SEQ ID NO: 143226 - RNA, 1410 nt, Artificial Sequence; identical to SEQ ID NO: 143223
  derived and/or modified CDS sequence (opt3) from neuraminidase__InfluenzaA__ABG48239

SEQ ID NO: 143227 - RNA, 1410 nt, Artificial Sequence; identical to SEQ ID NO: 142639
  derived and/or modified CDS sequence (opt3) from neuraminidase__InfluenzaA__ABG48250

SEQ ID NO: 143228 - RNA, 1410 nt, Artificial Sequence
  derived and/or modified CDS sequence (opt3) from neuraminidase__InfluenzaA__ABG48272
augaaccccaaucagaagaucauuaccauaggcagcgugucccugacaaucucuacuauuugcuucuuuaugcaaaucgccauucucaucacgaccgucacacuucacuucaaacaguacgaguuuaacucaccuccaaauaaccagguuaugcugugugaaccgacuauaaucgagagaaauauuaccgaaaucguguauuugacaaacaccacuauugagaaggaaaucugccccaaauuagcugaguacaggaauuggaguaagccucagugugacauaacaggguucgcaccauuuagcaaagauaacuccauucggcugucugccggaggugacaucuggguaacccgcgagcccuaugugucgugcgauccugacaaguguuaccaauucgcgcuaggccaggggacgacucucaauaacguccauucaaaugauaccgugcacgaccgaacaccauaucguacucugcuuaugaacgaacugggaguucccuuucauuugggcaccaaacaggugugcauugcuuggagcaguuccucuugucacgaugguaaggccuggcuccaugucugcgugacaggggacgauaagaaugcaaccgccagcuucaucuacaacggaagacugguagacuccaucguuucauggaguaaaaagauucugaggacgcaggagagcgaaugugugugcauaaauggcacuuguacagucgugaugaccgauggcucugcuuccgggaaagcagacacuaagauccucuuuauugaggagggaaagaucgugcacacaucaaccuuaagcgguagugcccaacacgucgaagagugcucuugcuauccucgguacccaggcguucgcugugugugcagagauaacuggaaaggguccaacaggccgauaguagacauuaauaucaaggacuacagcaucgugucgucuuaugucuguuccggacuggugggcgauacgccccggaaaaacgacucaaguagcuccucucauugccuugauccuaauaacgaagagggugggcacggaguuaagggcugggcuuucgacgauggcaaugacguguggauggggcgcaccauuagcgaaaaaucacgaaguggauacgagacauuuaaggucaucgaggguugguccaacccaaauagcaaauugcagauuaacagacaggugauaguagauaggggcaaucggucuggguauucaggaaucuucaguguugaaggcaagagcuguauuaaccguugcuuuuacguggagcugauccgcgguagaaaggaagagacugaaguccuauggaccuccaauucuaucguggucuucugugggacaucgggcacuuauggaaccggcagcuggcccgacggggccgauauuaaccucaugccuauauga

SEQ ID NO: 143229 - RNA, 1410 nt, Artificial Sequence
  derived and/or modified CDS sequence (opt3) from neuraminidase__InfluenzaA__ABG48294
augaaccccaaucagaagaucauuaccauaggcagcgugucccugacaaucgccacuauuugcuuccucaugcaaaucgcuauucuugucacgaccguuacacugcacuuuaaacaguacgaguguucuucaccuccaaacaaucaggugaucccgugccagcccacuauaaucgaaagaaacauuaccgagaucguauauuugacaaauaccacuauugaaaaggagaucuguccuaaauuaguggaauacaggaacuggaguaagccacaaugcaaaauaacaggguucgcacccuuuagcaaggacaauuccauucggcugucugccggaggugauaucugggucacccgcgagccuuaugugucgugugacccaggcaagugcuaccaguucgcgcuagggcagggaacgacucucaacaaucgacauucaaacgauaccguucacgaccguacacccuauagaacucugcuuaugaaugagcugggcgugccuuuucauuuggguaccaaacaggucuguauugcuuggagcaguuccucuugccacgaugggaaggccuggcuccauguguguguaacaggacacgacgaaaacgcaaccgccagcuucaucuacgauggcaggcugguugacuccaucggcucauggagucggaauauucugcgcacgcaagagagcgaaugcguguguauaaacgggacuugcacagucgugaugaccgauggaucugcuuccgagagagcagacacuaaaauccucuuuauugaggaagguaaggugguccacaucucaccauuaagcggcagugcccagcauguugaggaaugcucuuguuauccgagguaccccggggugcggugcguaugucgcgauaauuggaaaggauccaaccgaccuauaguggacauuaacgucaaggauuacagcaucaucucgucuuaugugugcuccggccugguuggugacacaccaagaaggaaugacucaaguagcuccucuuacugucagaaccccaauaacgagaaggggagccacggagugaaaggcugggcuuucgaugacggcaaugaugucuggauggggcggaccauuucagaggaacuucguaguggauaugagacguuuaaggugaucgguggcugguccaccccuaacagcaaauugcagauuaaucgccaaguaauaguugacucugggaacagaucaggauacaguggcaucuucagcguggaagguaaguccugcauuaauagguguuuuuaugucgagcugauccgggggcgaaaacaggaaacaaaggugugguggacuucuaacucgaucgucguguucugcggcaccagcggaacauacggcacuggguccuggccagauggagccgacauugaucuaaugcccauauga

SEQ ID NO: 143230 - RNA, 1410 nt, Artificial Sequence
  derived and/or modified CDS sequence (opt3) from neuraminidase__InfluenzaA__ABG48305
augaaccccaaucagaagaucauuauaaucggcagcgugucccugaccauugccacaaucugcuuccucaugcaaauugcuauccuugucacuacgguuacccugcacuuuaaacaguacgaguguaacucuccuccaaauaaccaggugauguugugcgaaccgacaauaaucgagagaaauauuacugaaaucguauauuuaaccaacacaaccauugagaaggaaaucugucccaaacuggcagaguacaggaauuggucaaagccucagugcaaaauaacuggguucgccccauuuaguaaggacaacagcauucggcuauccgcgggaggugauaucugggugacacgcgagcccuaugucucuugugacccuggcaagugcuaccaauucgcucucgggcagggaaccacgcugaauaaccgacauucgaaugauacugugcacgaccguaccccauauagaacacuucugaugaacgaauugggcguucccuuucaucucgguacuaaacagguguguauugccuggucaagcaguuccugccacgaugggaaggcauggcugcaugucugugugaccggacacgacgagaaugccacagcuucuuucaucuacgauggcaggcugguagacagcaucggcuccuggaguaaaaacauucuccggacccaggaaucagagugcguuuguauaaaugggacgugcacuguggucaugacagauggaagcgcaucugagcgcgccgacaccaagaucuuauuuauugaagaggguaaaaucgugcacauauccccucugucaggcagcgcucaacauguggaagagugcaguuguuauccaagauacccgggggucaggugcguuugucgggauaacuggaagggaucuaaccgccccauuguggacaucaauguaaaggauuacuccaucgugagcucguaugucugcucuggccuugugggugacacuccucgaaagaacgacuccucaaguagcuccuacuguagaaauccaaacaaugaaaaagggucucacggaguuaaaggcugggccuucgaugacggcaacgauguguggauggggaggacaauuagcgaggaguugcggucaggauaugaaaccuuuaaggucaucgguggcuggaguaaacccaauuccaagcugcagauuaaccgucaggugauaguagaccgcgggaauagaagcggauacucuggcaucuucucaguugaggguaaaaguugcauuaacagguguuuuuauguggaacuaauccgggggcgaaagcaggagacggaagucugguggaccagcaauuccaucguggucuucugcggcacaucuggaacuuacggcaccgggucguggccugauggagcggacauuaaccucaugccaauauga

SEQ ID NO: 143231 - RNA, 1410 nt, Artificial Sequence
  derived and/or modified CDS sequence (opt3) from neuraminidase__InfluenzaA__ABG48316
augaaccccaaucagaagaucauuaccauaggcagcgugucccugacagucgccacuaucugcuuccucaugcaaauugcuauccuuguuacgaccgugacacugcacuuuaaacaguacgaguguaacucuccuccaaauaaccagguaauguugugcgaaccgacuauuaucgagagaaauauaaccgaaaucguguauuuaacaaacaccacuauugagaaggaaaucugucccaaacuggcagaguacaggaauuggucaaagccucagugcaaaauuacaggguucgccccauuuaguaaggacaacagcauccggcuauccgcgggaggugauauaugggucacccgcgagcccuaugugucuugugacccuggcaagugcuaccaauucgcucucgggcagggaacgacucugaauaaccgacauucgaaugauaccguucacgaccguacaccauauagaacucuucugaugaacgaauugggcgugcccuuucaucucgguaccaaacaggucuguauugccuggucaagcaguuccugccacgaugggaaggcauggcugcauguguguguaacaggacacgacgagaaugccaccgcuucuuucaucuacgauggcaggcugguugacagcauuggcuccuggaguaaaaacauccuccggacgcaggaaucagagugcguguguaucaaugggacuugcacagucgugaugaccgauggaagcgcaucugagcgcgccgacacuaagauuuuauuuauagaagaggguaaaaucgugcacauuuccccucugucaggcagcgcucaacaugucgaagagugcaguuguuauccaagauacccggggguuaggugcgugugucgggauaacuggaagggaucuaaccgccccaucguagacauaaaugugaaggauuacuccauugucagcucguaugugugcucuggccuuguuggugacacaccucgaaagaacgacuccucaaguagcuccuacuguagaaauccaaacaaugaaaaagggucucacggagugaaaggcugggccuucgaugacggcaacgaugucuggauggggaggaccaucagcgaggaguugcggucaggauaugaaacguuuaaggugaucgguggcuggaguaaacccaauuccaagcugcagauuaaccgucagguaaucguugagcgcgggaauagaagcggauacucuggcauuuucucaguggaagguaaaaguugcauaaacagguguuuuuaugucgagcuaauccgggggcgaaagcaggaaaccgaggugugguggacaagcaauuccauugucguguucugcggcacuucuggaaccuacggcacagggucguggccugacggagcggauaucaaccucaugccaaucuga

SEQ ID NO: 143232 - RNA, 1410 nt, Artificial Sequence
  derived and/or modified CDS sequence (opt3) from neuraminidase__InfluenzaA__ABG48327
augaaccccaaucagaagaucauuaccauaggcagcgugucccugacaaucgccacuauuugcuuccucaugcaaaucgcuauucuugucacgaccguuacacugcacuuuaaacaguacgaguguaacucuccuccaaauaaccaggugauguugugcgaaccgacuaucauagagagaaauaucaccgaaauuguauauuuaacaaacaccacuaucgagaaggaaauuugucccaaacuggcagaguacaggaauuggucaaagccucagugcaaaaucacaggguucgccccauuuaguaaggacaacagcauacggcuauccgcgggaggugauauuugggugacccgcgagcccuaugucucuugugacccuggcaagugcuaccaauucgcucucgggcagggaacgacucugaauaaccgacauucgaaugauaccgugcacgaccguacaccauauagaacucuucugaugaacgaauugggcguucccuuucaucucgguaccaaacagguguguaucgccuggucaagcaguuccugccacgaugggaaggcauggcugcaugucugugugacaggacacgacgagaaugccaccgcuucuuucauuuacgauggcaggcugguagacagcaucggcuccuggaguaaaaacauccuccggacgcaggaaucagagugcguuuguauuaaugggacuugcacaguggucaugaccgauggaagcgcaucugagcgcgccgacacuaagauauuauuuaucgaagaggguaaaauugugcacaucuccccucugucaggcagcgcucaacauguggaagagugcaguuguuauccaagauacccgggggucaggugcguuugucgggauaacuggaagggaucuaaccgccccauaguggacauuaauguaaaggauuacuccaucgugagcucguaugucugcucuggccuugugggugacacaccucgaaagaacgacuccucaaguagcuccuacuguagaaauccaaacaaugaaaaagggucuaggggaguuaaaggcugggccuucgaugacggcaacgauguguggauggggcggaccaucagcgaggaguugcguucaggauaugaaacguuuaaggucauugguggcuggaguaaacccaauuccaagcugcagaucaaccgccaggugauuguagacagagggaauaggagcggauacucuggcauauucucaguugaggguaaaaguugcaucaaccgguguuuuuauguggaacuaauucgagggcgcaagcaggagaccgaagucugguggacaagcaauuccaucguggucuucugcggcacuucuggaaccuacggcacagggucguggccugauggagcggacaucaaccucaugccaauuuga

SEQ ID NO: 143233 - RNA, 1410 nt, Artificial Sequence
  derived and/or modified CDS sequence (opt3) from neuraminidase__InfluenzaA__ABG48338
augaaccccaaucagaagaucauuaccauaggcagcgugucccugacaaucgccacuauuugcuuccucaugcaaaucgcuauucuugucacgaccguuacacugcacuuuaaacaguacgaguguaacucuccuccaaauaaccaggugauguugugcgaaccgacuaucauagagagaaauaucaccgaaauuguauauuuaacaaacaccacuaucgagaaggaaauuugucccaaacuggcagaguacaggaauuggucaaagccucagugcaaaaucacaggguucgccccauuuaguaaggacaacagcauacggcuauccgcgggaggugauauuugggugacccgcgagcccuaugucucuugugacccuggcaagugcuaccaauucgcucucgggcagggaacgacucugaauaaccgacauucgaaugauaccgugcacgaccguacaccauauagaacucuucugaugaacgaauugggcguucccuuucaucucgguaccaaacagguguguaucgccuggucaagcaguuccugccacgaugggaaggcauggcugcaugucugugugacaggacacgacgagaaugccaccgcuucuuucauuuacgauggcaggcugguagacagcaucggcuccuggaguaaaaacauccuccggacgcaggaaucagagugcguuuguauuaaugggacuugcacaguggucaugaccgauggaagcgcaucugagcgcgccgacacuaagauauuauuuaucgaagaggguaaaauugugcacaucuccccucugucaggcagcgcucaacauguggaagagugcaguuguuauccaagauacccgggggucaggugcguuugucgggauaacuggaagggaucuaaccgccccauaguggacauuaauguaaaggauuacuccaucgugagcucguaugucugcucuggccuugugggugacacaccucgaaagaacgacuccucaaguagcuccuacuguagaaauccaaacaaugaaaaagggucucacggaguuaaaggcugggccuucgaugacggcaacgauguguggauggggaggaccaucagcgaggaguugcggucaggauaugaaacguuuaaggucauugguggcuggaguaaacccaauuccaagcugcagaucaaccgucaggugauuguagaccgcgggaauagaagcggauacucuggcauauucucaguugaggguaaaaguugcaucaacagguguuuuuauguggaacuaauucgggggcgaaagcaggagaccgaagucugguggacaagcaauuccaucguggucuucugcggcacuucuggaaccuacggcacagggucguggccugauggagcggacaucaaccucaugccaauuuga

SEQ ID NO: 143234 - RNA, 1410 nt, Artificial Sequence; identical to SEQ ID NO: 143233
  derived and/or modified CDS sequence (opt3) from neuraminidase__InfluenzaA__ABG48349

SEQ ID NO: 143235 - RNA, 1410 nt, Artificial Sequence
  derived and/or modified CDS sequence (opt3) from neuraminidase__InfluenzaA__ABG48360
augaaccccaaucagaagaucauuaccauaggcagcgugucccugacaaucgccacuauuugcuuccucaugcaaaucgcuauucuugucacgaccguuacacugcacuuuaaacaguacgaguguaacucuccuccaaauaaccaggugauguugugcgaaccgacuaucauagagagaaauaucaccgaaauuguauauuuaacaaacaccacuaucgagaaggaaauuugucccaaacuggcagaguacaggaauuggucaaagccucagugcaaaaucacaggguucgccccauuuaguaaggacaacagcauacggcuauccgcgggaggugauauuugggugacccgcgagcccuaugucucuugugacccuggcaagugcuaccaauucgcucucgggcagggaacgacucugaauaaccgacauucgaaugauaccgugcacgaccguacaccauauagaacucuucugaugucagaauugggcguucccuuucaucucgguaccaaacagguguguaucgccuggagcaguuccucuugccacgaugggaaggcauggcugcaugucugugugacaggacacgacgagaacgccaccgcuagcuucauuuacgauggcaaacugguagacuccaucggcucauggaguaagaauauccucaggacgcaggaaagcgagugcguuuguauuaacgggacuugcacaguggucaugaccgauggaucugcauccgagcgggccgacacuaaaauauuauuuaucgaagaggguaagauugugcacaucucaccucugagcggcagugcucaacauguggaagagugcucuuguuauccacgcuacccgggggucagaugcguuuguagggauaauuggaagggauccaaccggcccauaguggacauuaacguaaaagaucacagcaucgugucgucuuacgucugcuccggccuugugggugacacaccucgcaagaaugacucaaguagcuccucuuauugucgaaacccaaauaacgaaaaagggagccauggaguuaagggcugggccuucgaugacggcaaugauguguggauggggagaaccaucucagaggaguugaggaguggauacgaaacguuuaaagucauugguggcugguccaagcccaacagcaaacugcagaucaaucgucaggugauuguagaccgggggaaccgcucuggauauucaggcauauucaguguugaggguaagagcugcaucaauagauguuuuuacguggaacuaauuagggggcggaagcaggagaccgaagucugguggacauccaacucuaucguggucuucugcggcacuucgggaaccuauggcacagggagcuggccugauggagcggacaucaaucucaugccaauuuga

SEQ ID NO: 143236 - RNA, 1410 nt, Artificial Sequence; identical to SEQ ID NO: 143233
  derived and/or modified CDS sequence (opt3) from neuraminidase__InfluenzaA__ABG48371

SEQ ID NO: 143237 - RNA, 1410 nt, Artificial Sequence
  derived and/or modified CDS sequence (opt3) from neuraminidase__InfluenzaA__ABG67138
augaaccccaaucagaagaucauuaccauaggcagcgugucccugacaaucgccacuauuugcuuccucacgcaaaucgcuauucuugucaccacaguuacucugcacuuuaaacaguacgaguguaacucuccuccaucaaaucaggugauguugugcgaaccgaccacaaucgagagaaacauaaccgaaaucguauauuuaacuaauacaaccauugagaaggaaaucugucccaaacuggcagaguacaggaacuggaguaagccucagugcaaaauuacgggguucgccccauuuagcaaggacaauuccauccggcuaucugcgggaggugauauaugggugacucgcgagcccuaugucucgugugacccugauaagugcuaccaauucgcucucggccaggggaccacacugaacaaucgacauucaaacgacacugugcacgaucguaccccauauagaacacuucugaugaaugaauugggaguucccuuucaucucggcaccaaacagguguguauugccuggagcaguuccucuugccacgacgguaaggcauggcugcaugucugugugacggggcacgaugagaacgccacugcuagcuucaucuacgacggaaggcugguagauuccauuggcucauggaguaaaaagauccuccggacacaggaaagcgagugcguuuguaucaaugggaccugcacuguggucaugacagacggcucugcauccggacgcgccgauaccaaaauuuuauuuauagaggaagguaagaucgugcacauuucaccucugagcggcagugcucaacauguggaggaaugcucuuguuauccaagauacccgggggucaggugcguuugucgggacaacuggaagggauccaaucgccccaucguggauauaaacguaaaagacuacagcauugugucgucuuaugucugcuccggccuugugggugacacgccucgaaagaacgauucaaguagcuccucucacuguuugaauccaaacaaugaggaagggggacauggcguuaaaggcugggccuucgacgaugggaacgacguguggaugggaagaaccaucagcgagaagcugaggucagguuacgagacauuuaaagucaucgaaggcuggaguaagcccaauuccaaacuacagauuaaccgucaggugaucguagaucgggggaaucgcagcggauauucuggcauuuucucaguugaggguaagaguugcauaaacagauguuuuuacguggaacucaucagggggcggaagcaggagacugaagucugguggaccagcaauuccauuguggucuucugcggcacaucuggaacuuauggcaccgggucguggccugacggagcggauaucaaccugaugccaaucuga

SEQ ID NO: 143238 - RNA, 1410 nt, Artificial Sequence; identical to SEQ ID NO: 142174
  derived and/or modified CDS sequence (opt3) from neuraminidase__InfluenzaA__ABG67149

SEQ ID NO: 143239 - RNA, 1410 nt, Artificial Sequence
  derived and/or modified CDS sequence (opt3) from neuraminidase__InfluenzaA__ABG67160
augaaccccaaucagaagaucauuaccauaggcagcgugucccugacaaucgccacuauuugcuuccucaugcaaaucgcuauucuugucacgaccguuacacugcacuuuaaacaguacgaguguaacucuccuccaaauaaccaggugauguugugcgaaccgacuaucauagagagaaauaucaccgaaauuguauauuuaacaaacaccacuaucgagaaggaaauuugucccaaacuggcagaguacaggucauggaguaagccucagugcaaaaucacaggguucgccccauuuagcaaggacaauuccauacggcuaucugcgggaggugauauuugggugacccgcgagcccuaugucucgugugacccuggcaagugcuaccaauucgcucucgggcagggaacgacucugaacaaucgacauucaaacgauaccgugcacgaccguacaccauauagaacucuucugaugaaugaauugggcguucccuuucaucucgguaccaaacagguguguaucgccuggagcaguuccucuugccacgaugggaaggcauggcugcaugucugugugacaggacacgacgagaacgccaccgcuagcuucauuuacgauggcaggcugguagacuccaucggcucauggaguaaaaauauccuccggacgcaggaaagcgagugcguuugugugaacgggacuugcacagucgugaugaccgauggaucugcauccgagcgcgccgacacuaagauuuuauuuauagaagaggguaaaaucgugcacauuucaccucugagcggcagugcucaacaugucgaagagugcucuuguuauccaagauacccggggguuaggugcgugugucgggauaauuggaagggauccaaccgccccaucguagacauaaacgugaaggauuacagcauugucucgucuuaugugugcuccggccuuguuggugacacaccucgaaagaaugacucaaguagcuccucuuacuguuggaacccaaauaacgaaaaagggggacacggcgugaaaggcugggccuucgaugacgggaaugaugucuggaugggaagaaccaucagcgaggaguugaggucagguuaugaaacguuuaaggugaucggcggguggaguaaacccaacuccaagcugcagauuaaucggcagguaaucguugaccguggaaaccgcagcggcuacucugguauuuucucaguggaggggaaaaguugcauaaauagauguuuuuaugucgaacuaaucaggggccggaagcaggagaccgaagugugguggacaagcaacuccauugucguguucugcggaacuucuggcaccuacgggacaggaucguggccugauggugcggacaucaaucucaugccaaucuga

SEQ ID NO: 143240 - RNA, 1410 nt, Artificial Sequence
  derived and/or modified CDS sequence (opt3) from neuraminidase__InfluenzaA__ABG67171
augaaccccaaucagaagaucauuaccauaggcagcgugucccugacaaucgccacuauuugcuuccucaugcaaaucgcuauucuugucacgaccguuacacugcacuuuaaacaguacgaguguaacucuccuccaaauaaccaggugauguugugcgaaccgacuaucauagagagaaauaucaccgaaauuguauauuuaacaaacaccacuaucgagaaggaaauuugucccaaacuggcagaguacaggaauuggucaaagccucagugcaaaaucacaggguucgccccauuuaguaaggacaacagcauacggcuauccgcgggaggugauauuugggugacccgcgagcccuaugucucuugugacccuggcaagugcuaccaauucgcucucgggcagggaacgacucugaauaaccgacauucgaaugauaccgugcacgaccguacaccauauagaacucuucugaugaacgaauugggcguucccuuucaucucgguaccaaacagguguguaucgccuggucaagcaguuccugccacgaugggaaggcauggcugcaugucugugugacaggacacgacaaaaaugccaccgcuucuuucauuuacgauggcaggcugguagacagcaucggcuccuggucaaagaacauccuccggacgcaggagagugaaugcguuuguauuaaugggacuugcacaguggucaugaccgauggaagcgcaucugaccgcgccgauacuaaaauauuauuuaucgaggaggguaagauugugcacaucuccccucugucaggcagcgcucaacauguggaagagugcaguuguuauccaagauacccgggggucaggugcguuugucgggacaacuggaagggaucuaaccgccccauaguggauauuaauguaaaagacuacuccaucgugagcucguaugucugcucuggccuugugggugacacaccucgaaagaacgauuccucaaguagcuccuacuguuggaauccaaacaaugaaaaagggggacacggcguuaagggcugggccuucgacgaugggaacgacguguggaugggaagaaccaucucugaggaaagcaggucagguuaugagacguuuaaagucauuggcggguggaguaagcccaauuccaaauugcagaucaaccgucaggugauuguagaucggggaaaucgcagcggcuacucugguauauucucaguugaggggaagaguugcaucaacagauguuuuuauguggaacugauuaggggccggaagcaggagaccgaagucugguggacaagcaauuccaucguggucuucugcggaacuucuggcaccuacgggacaggaucguggccugacggugcggauaucaaccuaaugccaauuuga

SEQ ID NO: 143241 - RNA, 1410 nt, Artificial Sequence; identical to SEQ ID NO: 143161
  derived and/or modified CDS sequence (opt3) from neuraminidase__InfluenzaA__ABG67182

SEQ ID NO: 143242 - RNA, 1410 nt, Artificial Sequence
  derived and/or modified CDS sequence (opt3) from neuraminidase__InfluenzaA__ABG67193
augaaccccaaucagaagaucauuaccauaggcagcgugucccugacaaucgccacuauuugcuuccucaugcaaaucgcuauucuugucacgaccguuacacugcacuuuaaacaguacgaguguaacucuccuccaaauaaccaggugauguugugcgaaccgacuaccaucgagagaaauauaacagaaaucguauauuuaaccaacacuacaauugagaaggaaaucugucccaaacuggcagaguacaggaauuggucaaagccucagugcaaaauuaccggguucgccccauuuaguaaggacaacagcauccggcuauccgcgggaggugauauaugggugacgcgcgagcccuaugucucuugugacccuggcaagugcuaccaauucgcucucgggcagggaacuacccugaauaaccgacauucgaaugauacagugcacgaccguacuccauauagaacccuucugaugaacgaauugggcguucccuuucaucucgguacaaaacagguguguauugccuggucaagcaguuccugccacgaugggaaggcauggcugcaugucugugugaccggacacgacgagaaugccacggcuucuuucaucuacgauggcaggcugguagacagcauuggcuccuggucaaagaacauccuccggacucaggaaagugagugcguuuguaucaaugggacaugcaccguggucaugacugauggaagcgcaucugaccgcgccgauacaaagauuuuauuuauagaggaagguaaaaucgugcacauuuccccucugucaggcagcgcucaacauguggaggaaugcaguuguuauccaagauacccgggggucaggugcguuugucgggacaacuggaagggaucuaaccgccccaucguggauauaaauguaaagaacuacuccauugugagcucguaugucugcucuggccuugugggugacaccccucggaaaaaugacuccucaaguagcuccuacuguuggaacccaaauaacgagaaagggggacacggcguuaaaggcugggccuucgaugacgggaaugauguguggaugggaagaacgaucucugaagagagcaggucagguuaugagaccuuuaaggucaucggcggguggaguaaacccaacuccaaguugcagauuaaucgacaggugaucguagaccguggaaaccgcagcggcuacucugguauuuucucaguugaagggaaaaguugcauaaauagauguuuuuauguggagcugaucaggggccggaagcaggaaacagaggucugguggacuagcaacuccauuguggucuucugcggaaccucuggcacauacgggacuggaucguggccugauggugcggacaucaaucuaaugccaaucuga

SEQ ID NO: 143243 - RNA, 1410 nt, Artificial Sequence; identical to SEQ ID NO: 143161
  derived and/or modified CDS sequence (opt3) from neuraminidase__InfluenzaA__ABG67204

SEQ ID NO: 143244 - RNA, 1410 nt, Artificial Sequence
  derived and/or modified CDS sequence (opt3) from neuraminidase__InfluenzaA__ABG67215
augaaccccaaucagaagaucauuaccauaggcagcgugucccugacaaucgccacuauuugcuuccucaugcaaaucgcuauucuugucacgaccguuacacugcacuuuaaacaguacgaguguaacucuccuccaucaaaucaggugauguugugcgaaccgacuaucauagagagaaacaucaccgaaauuguauauuuaacaaauaccacuaucgagaaggaaauuugucccaaacuggcagaguacaggaacuggaguaagccucagugcaaaaucacaggguucgccccauuuagcaaggacaauuccauacggcuaucugcgggaggugauauuugggugacccgcgagcccuaugucucguguggcccugggaagugcuaccaauucgcucucggacagggcacgacucugaacaaucgacauucaaacgacaccgugcacgaucguacaccauauagaacucuucugaugaaugaauuggguguucccuuucaucucgggaccaaacagguguguaucgccuggagcaguuccucuugccacgacggaaaggcauggcugcaugucugugugacaggccacgaugagaacgccaccgcuagcuucauuuacgacggcaggcugguagauuccaucgggucauggaguaaaaauauccuccggacgcaggaaagcgagugcguuuguauuaacggaacuugcacaguggucaugaccgacgguucugcauccgagcgcgccgauacuaagauauuauuuaucgaagagggcaaaauugugcacaucucaccucugagcgggagugcucaacauguggaagagugcucuuguuauccaagauacccgggagucaggugcguuugucgggacaauuggaagggcuccaaccgccccauaguggauauuaacguaaaggacuacagcaucgugucgucuuaugucugcuccggucuugugggggauacaccucgaaagaaugacucaaguagcuccucuuacuguagaaacccaaauaacgaaaaaggaagccacggcguuaaaggcugggccuucgacgaugggaaugacguguggaugggaaggaccaucucagaggaguugcggagugguuaugaaacguuuaaggucauuggcgggugguccaaacccaacagcaagcugcagaucaaucgucaggugauuguagaucgcggaaacagaucuggcuacucagguauauucaguguugaggggaaaagcugcaucaauagguguuuuuauguggaacuaauucggggccgaaagcaggagaccgaagucugguggacauccaacucuaucguggucuucugcggaacuucgggcaccuacgggacaggaagcuggccugacggugcggauaucaaucucaugccaauuuga

SEQ ID NO: 143245 - RNA, 1410 nt, Artificial Sequence; identical to SEQ ID NO: 143149
  derived and/or modified CDS sequence (opt3) from neuraminidase__InfluenzaA__ABG67226

SEQ ID NO: 143246 - RNA, 1410 nt, Artificial Sequence; identical to SEQ ID NO: 143149
  derived and/or modified CDS sequence (opt3) from neuraminidase__InfluenzaA__ABG67248

SEQ ID NO: 143247 - RNA, 1413 nt, Artificial Sequence; identical to SEQ ID NO: 142876
  derived and/or modified CDS sequence (opt3) from neuraminidase__InfluenzaA__ABG67480

SEQ ID NO: 143248 - RNA, 1413 nt, Artificial Sequence; identical to SEQ ID NO: 142444
  derived and/or modified CDS sequence (opt3) from neuraminidase__InfluenzaA__ABG67494

SEQ ID NO: 143249 - RNA, 1410 nt, Artificial Sequence; identical to SEQ ID NO: 142202
  derived and/or modified CDS sequence (opt3) from neuraminidase__InfluenzaA__ABG67505

SEQ ID NO: 143250 - RNA, 1410 nt, Artificial Sequence; identical to SEQ ID NO: 142202
  derived and/or modified CDS sequence (opt3) from neuraminidase__InfluenzaA__ABG67516

SEQ ID NO: 143251 - RNA, 1410 nt, Artificial Sequence; identical to SEQ ID NO: 143215
  derived and/or modified CDS sequence (opt3) from neuraminidase__InfluenzaA__ABG67527

SEQ ID NO: 143252 - RNA, 1410 nt, Artificial Sequence
  derived and/or modified CDS sequence (opt3) from neuraminidase__InfluenzaA__ABG67538
augaaccccaaucagaagaucauuaccauaggcagcgugucccugacaaucgccacuauuugcuuccucaugcaaaucgcuauucuugucacgaccguuacacugcacuuuaaacaguacgaguguaacucuccuccaaauaaccaggugauguugugcgaaccgacuaccaucgagagaaauacaaccgaaauaguauauuuaacuaacacaaccaucgagaaggaaauuugucccaaacuggcagaguacaggaauuggucaaagccucagugcaacaucacgggguucgccccauuuaguaaagacaauagcauucggcuauccgcgggaggugauaucugggugacucgcgagcccuaugucucuugugacccugauaagugcuaccaauucgcucucggccaggggaccacacugaacaauggacauucgaacgacacugugcacgaucgaaccccauaucguacacuucugaugaaugaauugggcguucccuuucaucucgguaccagacagguguguauagccuggucaagcaguuccugccacgacgggaaggcauggcugcaugucugugugacgggagaugacgagaacgccacugcuucuuucauuuacaauggcaggcugguagauagcaucggcuccuggaguaaaaagauucuccggacacaggaaucagagugcguuuguaucaacgggaccugcacuguggucaugacagacggaagcgcaucugguaaagccgauaccaagaucuuauuuauugaggaaggcaaaauagugcacaucuccacgcugucagggagcgcucaacacguggaggaaugcaguuguuauccucgcuacccaggagucagaugcguuuguagggacaacuggaagggcucuaaucggccgauuaucgauauaaacgugaaggacuacuccauuguaagcucguaugugugcucuggucuugucggggacacaccccgcaaaaaugauuccuucucaaguagccauuguuuggacccuaacaaugaggaaggaggccacggcgugaaggggugggccuuugaugacggaaacgauguuuggaugggucgaaccaucuccgagaaacugagaucuggcuacgagacuuucaaggugaucgaaggguggagcaaaccaaauucaaagcuacagaccaacaggcaggucauuguggagcggggaaaucguaguggcuauuccgguaucuuuagcguagaagggaaaucuugcauuaaccgcuguuucuacguugagcucauaagaggcaggaaggaagagacagaggugugguggacuucaaauaguaucgucguguuuugcggaaccagcggcacauaugggaccggauccuggcccgacggugcggauauuaaccugaugccuaucuga

SEQ ID NO: 143253 - RNA, 1410 nt, Artificial Sequence
  derived and/or modified CDS sequence (opt3) from neuraminidase__InfluenzaA__ABG67549
augaaccccaaucagaagaucauuaccauaggcagcgugucccugacaaucgccacuauuugcuuccucaugcaaaucgcuauucuugucacgaccguuacacugcacuuuaaacagcaugaguguaacucuccuccaaauaaccaggugauguugugcgaaccgacuaucauagagagaaauaucaccgaaauuguauacuuaacaaacaccacuaucgagaaggaaauuugucccaaacugguggaguauaggaauuggucaaagccucagugcaacaucacaggguucgcaccauuuaguaaagacaauagcauacggcuauccgccggaggugauauuugggucacccgcgagcccuacgugucuugugacccugauaagugcuaucaauucgcgcucggccaggggacgacucugaacaauggacacucgaacgacaccguucaugaucgaacaccauaccguacucuucugaugaaugaauugggcgugcccuuucaccucgguaccagacaggucuguaucgcuuggucaagcaguuccugccaugacgggaaggccuggcugcacguguguguaacaggagaugacaaaaacgcaaccgccucuuucauuuauaauggcaggcugguugauagcaucggcuccuggucaaagaaaauccuccggacgcaggagagugaaugcguguguauuaacgggacuugcacagucgugaugaccgacggaagcgcuucugguaaggcagauacuaaaauauuauuuaucgaggagggcaagauugugcacaucuccacacugucagggagcgcccaacaugucgaagagugcaguuguuacccucgcuauccaggaguuagaugcguguguagggacaacuggaagggcucuaaucggccgauaguagauauuaacgugaaagacuacuccaucgucagcucguacgugugcucuggucuuguuggggacacgccccgcaagaaugauuccuucucaaguagccacuguuuggacccuaacaaugaagagggaggccauggcgugaaagggugggcuuuugaugacggaaacgaugucuggaugggucgaaccaucuccgaaaagcugagaucuggcuaugagaccuucaaagugauugagggguggagcaagccaaauucaaaacuacagaucaacaggcagguaauuguugaacggggaaaucguaguggcuacuccgguauauuuagcguggaggggaagucuugcaucaaccgcuguuucuaugucgaacucauuagaggcaggaaggaggaaaaugaggugugguggacaucaaacaguaucgucguguuuugcggaacuagcggcaccuacgggacaggauccuggcccgacggugccgauaucaaucugaugccuauuuga

SEQ ID NO: 143254 - RNA, 1410 nt, Artificial Sequence; identical to SEQ ID NO: 142639
  derived and/or modified CDS sequence (opt3) from neuraminidase__InfluenzaA__ABG67560

SEQ ID NO: 143255 - RNA, 1410 nt, Artificial Sequence; identical to SEQ ID NO: 142639
  derived and/or modified CDS sequence (opt3) from neuraminidase__InfluenzaA__ABG67571

SEQ ID NO: 143256 - RNA, 1410 nt, Artificial Sequence
  derived and/or modified CDS sequence (opt3) from neuraminidase__InfluenzaA__ABG67582
augaaccccaaucagaagaucauuaccauaggcagcgugucccugacaaucgccacuauuugcuuccucaugcaaaucgcuauucuugucacgaccguuacacugcacuuuaaacagcaugaguguaacucuccuccaaauaaccaggugauguugugcgaaccgacuaucauagagagaaauaucaccgaaauuguauacuuaacaaacaccacuaucgagaaggaaauuugucccaaacugguggaguauaggaauuggucaaagccucagugcaacaucacaggguucgcaccauuuaguaaagacaauagcauacggcuauccgccggaggugauauuugggucacccgcgagcccuacgugucuugugacccugauaagugcuaucaauucgcgcucggccaggggacgacucugaacaauggacacucgaacgacaccguucaugaucgaacaccauaccguacucuucugaugaaugaauugggcgugcccuuucaccucgguaccagacaggucuguaucgcuuggucaagcaguuccugccaugacgggaaggccuggcugcacguguguguaacaggagaugacaaaaacgcaaccgccucuuucauuuauaauggcaggcugguugauagcaucggcuccuggucaaagaaaauccuccggacgcaggagagugaaugcguguguauuaacgggacuugcacagucgugaugaccgacggaagcgcuucugguaaggcagauacuaaaauauuauuuaucgaggagggcaagauugugcacaucuccacacugucagggagcgccaagcaugucgaagagugcaguuguuacccucgcuauccaggaguuagaugcguguguagggacaacuggaaaggcucuaaucggccgauaguagauauuaacgugaaggacuacuccaucgucagcucguacgugugcucuggucuuguuggggacacgccccgcaaaaaugauuccuucucaaguagccacuguuuggacccuaacaaugaagagggaggccauggcgugaaggggugggcuuuugaugacggaaacgaugucuggaugggucgaaccaucuccgaaaaacugagaucuggcuaugagaccuucaaggugauugagggguggagcaaaccaaauucaaagcuacaaaucaacaggcagguaauuguugaacggggaaaucguaguggcuacuccgguauauuuagcguggaggggaagucuugcaucaaccgcuguuucuaugucgaacucauuagaggcaggaaagaggaaacagaggugugguggacuucaaauaguaucgucguguuuugcggaaccagcggcacauacgggacuggauccuggcccgacggugccgauaucaaccugaugccuauuuga

SEQ ID NO: 143257 - RNA, 1410 nt, Artificial Sequence; identical to SEQ ID NO: 143223
  derived and/or modified CDS sequence (opt3) from neuraminidase__InfluenzaA__ABG67593

SEQ ID NO: 143258 - RNA, 1410 nt, Artificial Sequence; identical to SEQ ID NO: 142639
  derived and/or modified CDS sequence (opt3) from neuraminidase__InfluenzaA__ABG67604

SEQ ID NO: 143259 - RNA, 1410 nt, Artificial Sequence; identical to SEQ ID NO: 142639
  derived and/or modified CDS sequence (opt3) from neuraminidase__InfluenzaA__ABG67615

SEQ ID NO: 143260 - RNA, 1410 nt, Artificial Sequence; identical to SEQ ID NO: 142639
  derived and/or modified CDS sequence (opt3) from neuraminidase__InfluenzaA__ABG67626

SEQ ID NO: 143261 - RNA, 1410 nt, Artificial Sequence; identical to SEQ ID NO: 142639
  derived and/or modified CDS sequence (opt3) from neuraminidase__InfluenzaA__ABG67637

SEQ ID NO: 143262 - RNA, 1410 nt, Artificial Sequence; identical to SEQ ID NO: 142639
  derived and/or modified CDS sequence (opt3) from neuraminidase__InfluenzaA__ABG67648

SEQ ID NO: 143263 - RNA, 1410 nt, Artificial Sequence
  derived and/or modified CDS sequence (opt3) from neuraminidase__InfluenzaA__ABG67659
augaaccccaaucagaagaucauuaccauaggcagcgugucccugacaaucgccacuauuugcuuccucaugcaaaucgcuauucuugucacgaccguuacacugcacuuuaaacagcaugaguguaacucuccuccaaauaaccaggugauguugugcgaaccgacuaucauagagagaaauaucaccgaaauuguauacuuaacaaacaccacuaucgagaaggaaauuugucccaaacugguggaguauaggaauuggucaaagccucagugcaacaucacaggguucgcaccauuuagucgggacaauagcauacgccuauccgccggaggugauauuugggucacccgagagcccuacgugucuugugacccugauaaaugcuaucaauucgcgcucggccaggggacgacucugaacaauggacacucgaacgacaccguucaugaucguacaccauacagaacucuucugaugaaugaauugggcgugcccuuucaccucgguaccaggcaggucuguaucgcuuggucaagcaguuccugccaugacgggaaggccuggcugcacguguguguaacaggagaugacaagaacgcaaccgccucuuucauuuauaauggccggcugguugauagcaucggcuccuggaguaaaaagauccuccgcacgcaggagucagaaugcguguguauuaacgggacuugcacagucgugaugaccgacggaagcgcuucugguaaagcagauacuaagauauuauuuaucgaggagggcaaaauugugcacaucuccacacugucagggagcgcccaacaugucgaagagugcaguuguuacccuagauauccaggaguuaggugcgugugucgggacaacuggaagggcucuaaucgcccgauaguagauauuaacgugaaggacuacuccaucgucagcucguacgugugcucuggucuuguuggggacacccccagaaagaaugauuccuucucaaguagccacuguuuggacccuaacaaugaagagggaggccauggcgugaaagggugggcuuuugaugacggaaacgaugucuggaugggucgaacgaucuccgaaaaacugaggucuggcuaugagaccuucaaggugauugagggguggagcaaaccaaauucaaagcuacagaucaaccggcagguaauuguugaacguggaaaucgcaguggcuacuccgguauauuuagcguggaggggaaaucuugcaucaacagauguuucuaugucgaacucauuaggggccggaaggaggaaacagaggugugguggacuucaaauaguaucgucguguuuugcggaaccagcggcacauacgggacuggauccuggcccgacggugccgauaucaaccugaugccuauuuga

SEQ ID NO: 143264 - RNA, 1410 nt, Artificial Sequence
  derived and/or modified CDS sequence (opt3) from neuraminidase__InfluenzaA__ABG67670
augaaccccaaucagaagaucauuaccauaggcagcgugucccugacaaucgccacuauuugcuuccucaugcaaaucgcuauucuuaucacgaccgucacacugcacuuuaaacaguacgaguguaacucuccuccaaauaaccagguuauguugugcgaaccgacuauaaucgagagaaauauuaccgaaaucguguauuuaacaaacaccacuauugagaaggaaaucugucccaaacuggcagaguacaggaauuggucaaagccucagugcaaaauaacaggguucgccccauuuaguaaggacaacagcauucggcuauccgcgggaggugauaucuggguaacccgcgagcccuaugugucuugugacccuggcaagugcuaccaauucgcucucgggcagggaacgacucugaauaaccgacauucgaaugauaccguccacgaccguacaccauauagaacucuucugaugaacgaauugggcgugcccuuucaucucgguaccaaacagguuuguauugccuggucaagcaguuccugccacgaugggaaggcauggcugcaugugugugucacaggacacgacgagaaugccaccgcuucuuucaucuacgauggcaggcugguggacagcaucggcuccuggaguaaaaacauucuccggacgcaggaaucagagugcguauguauaaaugggacuugcacaguugugaugaccgauggaagcgcaucuggucgcgccgacacuaagaucuuauuuauugaggaaggcaaaaucguccacauauccccucugucagggagcgcucaacauguggaggaaugcaguuguuauccaagauacccgggagugaggugcgucugucgggauaacuggaagggcucuaaccgccccauuguugacaucaaugugaaggauuacuccaucguaagcucguaugugugcucuggucuugucggggacacaccucgaaagaacgacuccucaaguagcucccacuguuugaauccaaacaaugaggaaggaggccauggcgugaaagggugggccuucgaugacggaaacgauguuuggauggguagaaccauuucugagaaacugaggagcggcuacgagacguuuaaggugaucgggggauggucaaaacccaauaguaagcuacagauuaaccggcaggucauaguggaccguggcaaucgcuccgguuauagcgggaucuucucuguagaaggcaaaucaugcauuaacagauguuuuuacguugagcucaucaggggacggaagcaggaaaccgaggugugguggacaaguaauagcaucgucguguucugcggcacuuccgggaccuauggaacagguucuuggccugauggcgcggacauuaaccugaugccaauauga

SEQ ID NO: 143265 - RNA, 1410 nt, Artificial Sequence; identical to SEQ ID NO: 142778
  derived and/or modified CDS sequence (opt3) from neuraminidase__InfluenzaA__ABG79944

SEQ ID NO: 143266 - RNA, 1413 nt, Artificial Sequence; identical to SEQ ID NO: 143107
  derived and/or modified CDS sequence (opt3) from neuraminidase__InfluenzaA__ABG79955

SEQ ID NO: 143267 - RNA, 1410 nt, Artificial Sequence
  derived and/or modified CDS sequence (opt3) from neuraminidase__InfluenzaA__ABG79966
augaaccccaaucagaagaucauuaccauaggcagcgugucccugacaaucgccacuauuugcuuccucaugcaaaucgcuauucuugucacgaccguuacacugcacuuuaaacaguacgaguguaacucuccuccaucaaaucaggugauguugugcgaaccgacuaucauagagagaaacaucaccgaaauuguauauuuaacaaauaccacuaucgagaaggaaauuugucccaaacuggcagaguacaggaacuggaguaagccucagugcaaaaucacaggguucgccccauuuagcaaggacaauuccauacggcuaucugcgggaggugauauuugggugacccgcgagcccuaugucucgugugacccuggcaagugcuaccaauucgcucucgggcagggaacgacucugaacaaucgacauucaaacgauaccgugcacgaccguacaccauauagaacucuucugaugaaugaauugggcguucccuuucaucucgguaccaaacagguguguaucgccuggagcaguuccucuugccacgaugggaaggcauggcugcaugucugugugacaggacacgacgagaacgccaccgcuagcuucauuuacgauggcaggcugguagacuccaucggcucauggaguaaaaauauccuccggacgcaggaaagcgagugcguuuguauuaacgggacuugcacaguggucaugaccgauggaucugcauccgagcgcgccgacacuaagauauuauuuaucgaagaggguaaaauugugcacaucucaccucugagcggcagugcucaacauguggaagagugcucuuguuauccaagauacccgggggucaggugcguuugucgggauaauuggaagggauccaaccgccccauaguggacauuaacguaaaggauuacagcaucgugucgucuuaugucugcuccggccuugugggugacacaccucggaaaaaugacucaaguagcuccucuuacugucagaacccaaauaacgaaaaggggagccacggaguuaaaggcugggccuucgaugacggcaaugauguguggauggggagaaccaucucagaggaguugaggaguggauaugaaacguuuaaggucauugguggcugguccaaacccaacagcaagcugcagaucaaucgacaggugauuguagaccgugggaaccgcucuggauacucaggcauauucaguguugaggguaaaagcugcaucaauagauguuuuuauguggaacuaauuagggggcggaagcaagagaccgaagucugguggacauccaacucuaucguggucuucugcggcacuucgggaaccuacggcacagggagcuggccugauggagcggacaucaaucucaugccaauuuga

SEQ ID NO: 143268 - RNA, 1410 nt, Artificial Sequence
  derived and/or modified CDS sequence (opt3) from neuraminidase__InfluenzaA__ABG79977
augaaccccaaucagaagaucauuaccauaggcagcgugucccugacaaucgccacuauuugcuuccucaugcaaaucgcuauucuugucacgaccguuacacugcacuuuaaacaguacgaguguaacucuccuccaaauaaccaggcaauguugugcgaaccgacuaucauagagagaaauaucaccgaaauuguguauuuaacaaacaccacuaucgagaaggaaauuugucccaaacuggccgaguacaggaauuggucaaagccucagugcaaaaucacaggguucgcgccauuuaguaaggacaacagcauacggcuauccgcuggaggugauauuuggguaacccgcgagcccuaugugucuugugacccuggcaagugcuaccaauucgcccucgggcagggaacgacucugaauaaccgacauucgaaugauaccguccacgaccguacaccauauagaacucuucugaugaacgaauugggcgugcccuuucaucucgguaccaaacagguuuguaucgcauggucaagcaguuccugccacgaugggaaggccuggcugcaugugugugucacaggacacgacgagaaugcuaccgcaucuuucauuuacgauggcaggcugguggacagcaucggcuccuggaguaaaaacauccuccggacgcaggaaucagagugcguauguauuaaugggacuugcacaguugugaugaccgauggaagcgccucugaccgcgcugauacuaagauauuauuuaucgaggaagguaaaauuguccacaucuccccucugucaggcagcgcccaacauguggaggaaugcaguuguuauccaagauacccgggggugaggugcgucugucgggacaacuggaagggaucuaaccgccccauaguugauauuaaugugaaggacuacuccaucguaagcucguaugugugcucuggccuugucggugacacaccucgaaagaacgauuccucaaguagcuccuacuguuggaauccaaacaaugagaaagggggacacggcgugaaaggcugggcguucgacgaugggaacgacguuuggaugggaagaaccaucucugaagagagcaggucagguuaugagacguuuaaggugauuggcggguggaguaaacccaauuccaaguugcagaucaaccggcaggucauuguggaucguggaaaucgcagcggcuacucugguauauucucaguagaagggaaaaguugcaucaacagauguuuuuauguugagcugauuaggggccggaagcaggaaaccgaggugugguggacaagcaauuccaucgucguguucugcggaacuucuggcaccuacgggacaggaucguggccugacggugcagauaucaaccuaaugccaauuuga

SEQ ID NO: 143269 - RNA, 1410 nt, Artificial Sequence; identical to SEQ ID NO: 143161
  derived and/or modified CDS sequence (opt3) from neuraminidase__InfluenzaA__ABG79988

SEQ ID NO: 143270 - RNA, 1410 nt, Artificial Sequence; identical to SEQ ID NO: 143161
  derived and/or modified CDS sequence (opt3) from neuraminidase__InfluenzaA__ABG79999

SEQ ID NO: 143271 - RNA, 1410 nt, Artificial Sequence
  derived and/or modified CDS sequence (opt3) from neuraminidase__InfluenzaA__ABG80010
augaaccccaaucagaagaucauuaccauaggcagcgugucccugacaaucgccacuauuugcuuccucaugcaaaucgcuauucuugucacgaccguuacacugcacuuuaaacaguacgaguguaacucuccuccaaauaaccaggugauguugugcgaaccgacuaucauagagagaaauaucaccgaaauuguauauuuaacaaacaccacuaucgagaaggaaauuugucccaaacuggcagaguacaggaauuggucaaagccucagugcaaaaucacaggguucgccccauuuaguaaggacaacagcauacggcuauccgcgggaggugauauuugggugacccgcgagcccuaugucucuugugacccuggcaagugcuaccaauucgcucucgggaaaggaacgacucugaauaaccgacauucgaaugauaccgugcacgaccguacaccauauagaacucuucugaugaacgaauugggcguucccuuucaucucgguaccaaacagguguguaucgccuggucaagcaguuccugccacgaugggaaggcauggcugcaugucugugugacaggacacgacgagaaugccaccgcuucuuucauuuacgauggcaggcugguagacagcaucggcuccuggucaaagaacauccuccggacgcaggaaagugagugcguuuguauuaaugggacuugcacaguggucaugaccgauggaagcgcaucugaccgcgccgauacuaaaauauuauuuaucgaggaagguaagauugugcacaucuccccucugucaggcagcgcucagcauguggaggaaugcaguuguuauccaagauacccgggggucaggugcguuugucgggacaacuggaagggaucuaaccgccccauaguggauauuaauguaaaagacuacuccaucgugagcucguaugucugcucuggccuugugggugacacaccucgaaagaacgauuccucaaguagcuccuacuguuggaauccaaacaaugagaaagggggacacggcguuaagggcugggccuucgacgaugggaacgacguguggaugggaagaaccaucucugaagagagcaggucagguuaugagacguuuaaagucauuggcggguggaguaagcccaauuccaaauugcaaaucaaccgucaggugauuguagaucggggaaaucgcagcggcuacucugguauauucucaguugaagggaagaguugcaucaacagauguuuuuauguggagcugauuaggggccggaagcaggaaaccgaggucugguggacaagcaauuccaucguggucuucugcggaacuucuggcaccuacgggacaggaucguggccugacggugcggauaucaaccuaaugccaauuuga

SEQ ID NO: 143272 - RNA, 1410 nt, Artificial Sequence; identical to SEQ ID NO: 143161
  derived and/or modified CDS sequence (opt3) from neuraminidase__InfluenzaA__ABG80021

SEQ ID NO: 143273 - RNA, 1410 nt, Artificial Sequence
  derived and/or modified CDS sequence (opt3) from neuraminidase__InfluenzaA__ABG80032
augaaccccaaucagaagaucauuaccauaggcagcgugucccugacaaucgccacuauuugcuuccucaugcaaaucgcuauucuugucacgaccguuacacugcacuuuaaacaguacgaguguaacucuccuccaaauaaccaggugauguugugcgaaccgacuaucauagagagaaauaucaccgaaauuguauauuuaacaaacaccacuaucgagaaggaaauuugucccaaacuggcagaguacaggaauuggucaaagccucagugcaaaaucacaggguucgccccauuuaguaaggacaacagcauacggcuauccgcgggaggugauauuugggugacccgcgagcccuaugucucuugugacccuggcaagugcuaccaauucgcucucgggcagggaacgacucugaauaaccgacauucgaaugauaccgugcacgaccguacaccauauagaacucuucugaugaacgaauugggcguucccuuucaucucgguaccaaacagguguguaucgccuggucaagcaguuccugccacgaugggaaggcauggcugcaugucugugugacaggacacgacgagaaugccaccgcuucuauuaucuacgauggcaggcugguagacagcaucuccucauggaguaaaaacauucuccggacgcaggaaagcgagugcguuuguauaaauggcacuugcacaguggucaugaccgaugggucugcauccgagcgcgccgacacuaagaucuuauucauugaagagggaaaaaucgugcacauaucaccucugagcgguagugcucaacauguggaagagugcucuuguuauccaagauacccgggcgucaggugcguuugucgggauaacuggaagggguccaaccgccccauuguggacaucaauguaaaggauuacagcaucgugucgucuuaugucugcuccggacuugugggcgacacaccucggaaaaacgacucaaguagcuccucuuacuguuugaauccaaacaaugaagagggugggcacggaguuaagggcugggccuuugaugacggcaacgauguguggauggggagaaccauuagcgagaaacugaggucaggauaugaaacguucaaggucaucgguggcuggaguaaacccaauuccaagcuacagauuaaccgacaggugauaguagaccgugggaaucgcagcggauacucuggcaucuuuucaguugaggguaaaaguugcgugaacagauguuucuaugucgaacucauuagggggcggaagcaggagaccgaagugugguggacaagcaauuccaucgucguguuuugcggcacuucuggaaccuacggcacagggucguggccugauggagcggacaucaaccugaugccaauuuga

SEQ ID NO: 143274 - RNA, 1410 nt, Artificial Sequence; identical to SEQ ID NO: 143148
  derived and/or modified CDS sequence (opt3) from neuraminidase__InfluenzaA__ABG80043

SEQ ID NO: 143275 - RNA, 1410 nt, Artificial Sequence; identical to SEQ ID NO: 143161
  derived and/or modified CDS sequence (opt3) from neuraminidase__InfluenzaA__ABG80054

SEQ ID NO: 143276 - RNA, 1410 nt, Artificial Sequence; identical to SEQ ID NO: 143148
  derived and/or modified CDS sequence (opt3) from neuraminidase__InfluenzaA__ABG80065

SEQ ID NO: 143277 - RNA, 1410 nt, Artificial Sequence
  derived and/or modified CDS sequence (opt3) from neuraminidase__InfluenzaA__ABG80076
augaaccccaaucagaagaucauuaccauaggcagcgugucccugacaaucgccacuauuugcuuccucaugcaaaucgcuauucuugucacgaccguuacacugcacuuuaaacaguacgaguguaacucuccuccaaauaaccaggugauguugugcgaaccgacuaucauagagagaaauaucaccgaaauuguauauuuaacaaacaccacuaucgagaaggaaauuugucccaaacuggcagaguacaggaauuggucaaagccucagugcaaaaucacaggguucgccccauuuaguaaggacaacagcauacggcuauccgcgggaggugauauuugggugacccgcgagcccuaugucucuugugacccuggcaagugcuaccaauucgcucucgggcagggaacgacucugaauaaccgacauucgaaugauaccgugcacgaccguacaccauauagaacucuucugaugaacgaauugggcguucccuuucaucucgguaccaaacagguguguaucgccuggucaagcaguuccugccacgaugggaaggcauggcugcaugucugugugacaggacacgacgagaaugccaccgcuucuuucauuuacgauggcaggcugguagacagcaucggcuccuggaguaaaaacauccuccggacgcaggaaucagagugcguuuguauuaaugggacuugcacaguggucaugaccgauggaagcgcaucugagcgcgccgacacuaagauauuauuuaucgaagaggguaaaauugugcacaucuccccucugucaggcagcgcucaacauguggaagagugcaguuguuauccaagauacccgggggucaggugcguuugucgggauaacuggaagggaucuaaccgccccauaguggacauuaauguaaaggauuacuccaucgugagcucguaugucugcucuggccuugugggugacacaccucgaaagaacgacuccucaaguagcuccuacuguagaaauccaaacaaugaaaaagggucucacggaguuaaaggcugggccuucgaugacggcaacgauguguggauggggaggaccaucagcgaggaguugcggucaggauaugaaacguuuaaggucauugguggcuggaguaaacccaauuccaagcugcagaucaaccgucaggugauuguagaccgcgggaauagaagcggauacucuggcauauucucaguugaggguaaaaacugcaucaauagguguuuuuauguggaacuaauucgggggcgaaagcaggagaccgaagucugguggacaaguaacagcaucguggucuucugcggcacuuccggaaccuacggcacagggucuuggccugauggagcggacaucaaucucaugccaauuuga

SEQ ID NO: 143278 - RNA, 1410 nt, Artificial Sequence
  derived and/or modified CDS sequence (opt3) from neuraminidase__InfluenzaA__ABG80087
augaaccccaaucagaagaucauuaccauaggcagcgugucccugacaaucgccacuauuugcuuccucaugcaaaucgcuguccuuguuacgaccgugacacugcacuuuaaacaguacgaguguaacucuccuccaucaaaucagguaauguugugcgaaccgacuauuaucgagagaaacauaaccgaaaucguguauuuaacaaauaccacuauugagaaggaaaucugucccaaacuggcagaguacaggaacuggaguaagccucagugcaaaauuacaggguucgccccauuuagcaaggacaauuccauccggcuaucugcgggaggugauauaugggucacccgcgagcccuaugugucgugugacccuggcaagugcuaccaauucgcucucgggcagggaacgacucugaacaaucgacauucaaacgauaccguucacgaccguacaccauauagaacucuucugaugaaugaauugggcgugcccuuucaucucgguaccaaacaggucuguauggccuggagcaguuccucuugccacgaugggaaggcauggcugcauguguguguaacaggacacgacgagaacgccaccgcuagcuucauuuacgauggcaggcugguugacuccaucggcucauggaguaaaaauauucuccggacgcaggaaagcgagugcguguguaucaacgggacuugcacagucgugaugaccgauggaucugcauccgagcgcgccgacacuaagaucuuauuuauugaagaggguaaaauagugcacaucucaccucugagcggcagugcucaacaugucgaagagugcucuuguuauccaagauacccggggguuaggugcgugugucgggauaauuggaagggauccaaccgccccauuguagacaucaacgugaaggauuacagcauagucucgucuuaugugugcuccggccuuguuggugacacaccucgaaagaaugacucaaguagcuccucuuacuguagaaacccaaauaacgaaaaagggagccacggagugaaaggcugggccuucgaugacggcaaugaugucuggauggggaggaccauuucagaggaguugcggaguggauaugaaacguuuaaggugaucgguggcugguccaaacccaacagcaagcugcagaucaaucgucagguaauuguugaccgcgggaacagaucuggauacucaggcaucuucaguguggaggguaaaagcugcauuaauagguguuuuuaugucgaacuaauacgggggcgaaagcaggagaccgaagugugguggacauccaacucuaucgucguguucugcggcacuucgggaaccuacggcacagggagcuggccugauggagcggacauuaaucucaugccaaucuga

SEQ ID NO: 143279 - RNA, 1410 nt, Artificial Sequence; identical to SEQ ID NO: 143205
  derived and/or modified CDS sequence (opt3) from neuraminidase__InfluenzaA__ABG80098

SEQ ID NO: 143280 - RNA, 1410 nt, Artificial Sequence; identical to SEQ ID NO: 143149
  derived and/or modified CDS sequence (opt3) from neuraminidase__InfluenzaA__ABG80109

SEQ ID NO: 143281 - RNA, 1410 nt, Artificial Sequence
  derived and/or modified CDS sequence (opt3) from neuraminidase__InfluenzaA__ABG80120
augaaccccaaucagaagaucauuaccauaggcagcgugucccugacaaucgccacuauuugcuuccucaugcaaaucgcuauucuugucacgaccguuacacugcacuuuaaacaguacgaguguaacucuccuccaucaaaucaggugauguugugcgaaccgacuaucauagagagaaacaucaccgaaauuguauauuuaacaaauaccacuaucgagaaggaaauuugucccaaacuggcagaguacaggaacuggaguaagccucagugcaaaaucacaggguucgccccauuuagcaaggacaauuccauacggcuaucugcgggaggugauauuugggugacccgcgagcccuaugucucgugugacccuggcaagugcuaccaauucgcucucgggcagggaacgacucugaacaaucgacauucaaacgauaccgugcacgaccguacaccauauagaacucuucugaugaaugaauugggcguucccuuucaucucgguaccaaacagguguguaucgccuggagcaguuccucuugccacgaugggaaggcauggcugcaugucugugugacaggacacgacgagaacgccaccgcuagcuucauuuacgauggcaggcugguagacuccaucggcucauggaguaaaaauauccuccggacgcaggaaagcgagugcauuuguauaaacgggacuugcacaguugugaugaccgauggaucugcauccgagcgcgccgacacuaagaucuuauuuauugaagaggguaaaaucguccacauaucaccucugagcggcagugcucaacauguggaagagugcucuuguuauccaagauacccgggggugaggugcgucugucgggauaauuggaagggauccaaccgccccauuguugacaucaacgugaaggauuacagcaucguaucgucuuaugugugcuccggccuugucggugacacaccucgaaagaaugacucaaguagcuccucuuacuguagaaacccaaauaacgaaaaagggagccacggagugaaaggcugggccuucgaugacggcaaugauguuuggauggggaggaccauuucagaggaguugcggaguggauaugaaacguuuaaggugaucgguggcugguccaaacccaacagcaagcugcagauuaaucgucaggucauaguggaccgcgggaacagaucuggauacucaggcaucuucaguguagaggguaaaagcugcauuaauagguguuuuuauguugaacuaauccgggggcgaaagcaggagaccgaagugugguggacauccaacucuaucgucguguucugcggcacuucgggaaccuacggcacagggagcuggccugauggagcggacauuaaucucaugccaauauga

SEQ ID NO: 143282 - RNA, 1410 nt, Artificial Sequence
  derived and/or modified CDS sequence (opt3) from neuraminidase__InfluenzaA__ABG80131
augaaccccaaucagaagaucauuaccauaggcagcgugucccugacaaucgccacuauuugcuuccucaugcaaaucgcuauuauggucacgaccguuacacuucacuuuaaacaguacgaguguaacucuccuccaucaaaucaggugaugcugugcgaaccgacuaucauagagagaaacaucaccgaaauuguauauuugacaaauaccacuaucgagaaggaaauuugucccaaauuagcagaguacaggaacuggaguaagccucagugcaaaaucacaggguucgccccauuuagcaaggacaauuccauacggcugucugcgggaggugauauuugggugacccgcgagcccuaugucucgugugacccuggcaagugcuaccaauucgcucuagggcagggaacgacucucaacaaucgacauucaaacgauaccgugcacgaccguacaccauauagaacucugcuuaugaaugaacugggcguucccuuucauuuggguaccaaacagguguguaucgccuggagcaguuccucuugccacgaugggaaggcauggcuccaugucugugugacaggacacgacgagaacgccaccgcuagcuucauuuacgauggcaggcugguagacuccaucggcucauggaguaaaaauauccugcggacgcaggaaagcgagugcguuuguauuaacgggacuugcacaguggucaugaccgauggaucugcauccgagcgcgccgacacuaagauacucuuuaucgaagaggguaaaauugugcacaucucaccuuuaagcggcagugcucaacauguggaagagugcucuuguuauccaagauacccgggggucaggugcguuugucgggauaauuggaagggauccaaccgccccauaguggacauuaacguaaaggauuacagcaucgugucgucuuaugucugcuccggccuggugggugacacaccucgaaagaaugacucaaguagcuccucuuacuguagaaacccaaauaacgaaaaagggagccacggaguuaaaggcugggccuucgaugacggcaaugauguguggauggggaggaccaucucagaggagcuucggaguggauaugaaacguuuaaggucauugguggcugguccaaacccaacagcaaguugcagaucaaucgucaggugauuguagaccgcgggaacagaucuggauacucaggcauauucaguguugaggguaaaagcugcaucaauagguguuuuuauguggaacugauucgggggcgaaagcaggagaccgaagucugguggacauccaacucuaucguggucuucugcggcacuucgggaaccuacggcacagggagcuggccugauggagcggacaucaaucuaaugccaauuuga

SEQ ID NO: 143283 - RNA, 1410 nt, Artificial Sequence; identical to SEQ ID NO: 143149
  derived and/or modified CDS sequence (opt3) from neuraminidase__InfluenzaA__ABG80142

SEQ ID NO: 143284 - RNA, 1410 nt, Artificial Sequence; identical to SEQ ID NO: 143205
  derived and/or modified CDS sequence (opt3) from neuraminidase__InfluenzaA__ABG80153

SEQ ID NO: 143285 - RNA, 1410 nt, Artificial Sequence; identical to SEQ ID NO: 143149
  derived and/or modified CDS sequence (opt3) from neuraminidase__InfluenzaA__ABG80164

SEQ ID NO: 143286 - RNA, 1413 nt, Artificial Sequence; identical to SEQ ID NO: 142876
  derived and/or modified CDS sequence (opt3) from neuraminidase__InfluenzaA__ABG80186

SEQ ID NO: 143287 - RNA, 1410 nt, Artificial Sequence; identical to SEQ ID NO: 142109
  derived and/or modified CDS sequence (opt3) from neuraminidase__InfluenzaA__ABG80197

SEQ ID NO: 143288 - RNA, 1410 nt, Artificial Sequence; identical to SEQ ID NO: 142301
  derived and/or modified CDS sequence (opt3) from neuraminidase__InfluenzaA__ABG80219

SEQ ID NO: 143289 - RNA, 1410 nt, Artificial Sequence
  derived and/or modified CDS sequence (opt3) from neuraminidase__InfluenzaA__ABG80230
augaaccccaaucagaagaucauuaccauaggcagcgugucccugacaaucgccacuauuugcuuccucaugcaaaucgcuauucuugucacgaccguuacacugcacuuuaaacaguacgaguguaacucuccuccaaauaaccaggugauguugugcgaaccgacuaucauagagagaaauaucaccgaaauuguauauuuaacaaacaccacuaucgagaaggaaauuugucccaaacuggcagaguacaggaauuggucaaagccucagugcaacaucacaggguucgccccauuuaguaaagacaauagcauacggcuauccgcgggaggugauauuugggugacccgcgagcccuaugucucuugugacccugauaagugcuaccaauucgcucucggccaggggacgacucugaacaauggacauucgaacgacaccgugcacgaucgaacaccauaucguacucuucugaugaaugaauugggcguucccuuucaucucgguaccagacagguguguaucgccuggucaagcaguuccugccacgacgggaaggcauggcugcaugucugugugacaggagaugacgagaacgccaccgcuucuuucauuuacaauggcaggcugguagauagcaucggcuccuggaguaaaaacauccuccggacgcaggaaucagagugcguuuguauuaacgggacuugcacaguggucaugaccgacggaagcgcaucugguaaggccgauacuaaaauauuauuuaucgaggaaggcaagauugugcacaucuccacacugucagagagcgcucaacacguggaagagugcaguuguuauccucgcuacccaggggucagaugcguuuguagggacaauuggaaaggaucuaaccggccgauaguggauauuaauguaaaggacuacuccaucgugagcucguaugucugcucuggccuugugggugacacccccaggaagaacgauuccuucucaaguagccauuguuuggacccuaauaacgaagaagggggacacggcguuaaaggcugggccuuugaugacgggaaugauguguggaugggacgaacgaucuccgagaagcugagaucugguuacgagaccuucaaagucauugagggcuggagcaagccaaacucaaaacuacagacaaaucgccaggugaucguagaacgggggaaccguaguggauauuccggcauuuuuagcguugaggguaagucuugcauaaaucgcuguuucuacguggaacucaucagagggaggaaagaggagacugaagucugguggaccucaaacaguauuguggucuuuugcggcacaagcggaacuuauggcaccggguccuggcccgacggagcggauaucaaucugaugccuaucuga

SEQ ID NO: 143290 - RNA, 1410 nt, Artificial Sequence; identical to SEQ ID NO: 142639
  derived and/or modified CDS sequence (opt3) from neuraminidase__InfluenzaA__ABG80241

SEQ ID NO: 143291 - RNA, 1410 nt, Artificial Sequence; identical to SEQ ID NO: 142639
  derived and/or modified CDS sequence (opt3) from neuraminidase__InfluenzaA__ABG80252

SEQ ID NO: 143292 - RNA, 1410 nt, Artificial Sequence; identical to SEQ ID NO: 143223
  derived and/or modified CDS sequence (opt3) from neuraminidase__InfluenzaA__ABG80263

SEQ ID NO: 143293 - RNA, 1410 nt, Artificial Sequence; identical to SEQ ID NO: 142784
  derived and/or modified CDS sequence (opt3) from neuraminidase__InfluenzaA__ABG80274

SEQ ID NO: 143294 - RNA, 1410 nt, Artificial Sequence; identical to SEQ ID NO: 142375
  derived and/or modified CDS sequence (opt3) from neuraminidase__InfluenzaA__ABG80285

SEQ ID NO: 143295 - RNA, 1410 nt, Artificial Sequence; identical to SEQ ID NO: 142375
  derived and/or modified CDS sequence (opt3) from neuraminidase__InfluenzaA__ABG80296

SEQ ID NO: 143296 - RNA, 1410 nt, Artificial Sequence; identical to SEQ ID NO: 142375
  derived and/or modified CDS sequence (opt3) from neuraminidase__InfluenzaA__ABG80307

SEQ ID NO: 143297 - RNA, 1410 nt, Artificial Sequence; identical to SEQ ID NO: 142762
  derived and/or modified CDS sequence (opt3) from neuraminidase__InfluenzaA__ABG80318

SEQ ID NO: 143298 - RNA, 1410 nt, Artificial Sequence; identical to SEQ ID NO: 142375
  derived and/or modified CDS sequence (opt3) from neuraminidase__InfluenzaA__ABG80329

SEQ ID NO: 143299 - RNA, 1410 nt, Artificial Sequence; identical to SEQ ID NO: 142375
  derived and/or modified CDS sequence (opt3) from neuraminidase__InfluenzaA__ABG80340

SEQ ID NO: 143300 - RNA, 1410 nt, Artificial Sequence; identical to SEQ ID NO: 143233
  derived and/or modified CDS sequence (opt3) from neuraminidase__InfluenzaA__ABG80351

SEQ ID NO: 143301 - RNA, 1410 nt, Artificial Sequence
  derived and/or modified CDS sequence (opt3) from neuraminidase__InfluenzaA__ABG80373
augaaccccaaucagaagaucauuaccauaggcagcgugucccugacaaucgccacuauuugcuuccucaugcaaaucgcuauucuugucacgaccguuacacugcacuuuaaacaguacgaguguaacucuccuccaaauaaccaggugauguugugcgaaccgacuaucauagagagaaauaucaccgaaauuguauauuuaacaaacaccacuaucgagaaggaaauuugucccaaacuggcagaguacaggaauuggucaaagccucagugcaaaaucacaggguucgccccauuuaguaaggacaacagcauacggcuauccgcgggaggugauauuugggugacccgcgagcccuaugucucuugugacccuggcaagugcuaccaauucgcucucgggcagggaacgacucugaauaaccgacauucgaaugauaccgugcacgaccguacaccauauagaacucuucugaugaacgaauugggcguucccuuucaucucgguaccaaacagguguguaucgccuggucaagcaguuccugccacgaugggaaggcauggcugcaugucugugugacaggacacgacgagaaugccaccgcuucuuucauuuacgauggcaggcugguagacagcaucggcuccuggaguaaaaacauccuccggacgcaggaaucagagugcguuuguauuaaugggacuugcacaguggucaugaccgauggaagcgcaucugagcgcgccgacacuaagauauuauuuaucgaagaggguaaaauugugcacaucuccccucugucaggcagcgcucaacauguggaagagugcaguuguuauccaagauacccgggggucaggugcguuugucgggauaacuggaagggaucuaaccgccccauaguggacauuaauguaaaggaucacuccaucgugagcucguacgucugcucuggccuugugggugacacaccucgaaagaacgacuccucaaguagcuccuauuguagaaauccaaacaaugaaaaagggucucauggaguuaaaggcugggccuucgaugacggcaacgauguguggauggggaggaccaucagcgaggaguugcggucaggauacgaaacguuuaaggucauugguggcuggaguaaacccaauuccaagcugcagaucaaccgucaggugauuguagaccgcgggaauagaagcggauauucuggcauauucucaguugaggguaaaaguugcaucaacagguguuuuuacguggaacuaauucgggggcgaaagcaggagaccgaagucugguggacaagcaauuccaucguggucuucugcggcacuucuggaaccuauggcacagggucguggccugauggagcggacaucaaccucaugccaauuuga

SEQ ID NO: 143302 - RNA, 1410 nt, Artificial Sequence; identical to SEQ ID NO: 143301
  derived and/or modified CDS sequence (opt3) from neuraminidase__InfluenzaA__ABG80384

SEQ ID NO: 143303 - RNA, 1410 nt, Artificial Sequence
  derived and/or modified CDS sequence (opt3) from neuraminidase__InfluenzaA__ABG80395
augaaccccaaucagaagaucauuaccauaggcagcgugucccugacaaucgccacuauuugcuuccucaugcaaaucgcuauucuugucacgaccguuacacugcacuuuaaacaguacgaguguaacucuccuccaaauaaccaggugauguugugcgaaccgacuaucauagagagaaauaucaccgaaauuguauauuuaacaaacaccacuaucgagaaggaaauuugucccaaacuggcagaguacaggaauuggucaaagccucagugcaaaaucacaggguucgccccauuuaguaaggacaacagcauacggcuauccgcgggaggugauauuugggugacccgcgagcccuaugucucuugugacccuggcaagugcuaccaauucgcucucgggcagggaacgacucugaauaaccgacauucgaaugauaccgugcacgaccguacaccauauagaacucuucugaugaacgaauugggcguucccuuucaucucgguaccaaacagguguguaucgccuggucaagcaguuccugccacgaugggaaggcauggcugcaugucugugugacaggacacgacgagaaugccaccgcuucuuucauuuacgauggcaggcugguagacagcaucggcuccuggaguaaaaacauccuccggacgcaggaaucagagugcguuuguauuaaugggacuugcacaguggucaugaccgauggaagcgcaucuaagcgcgccgacacuaaaauauuauuuaucgaggaagguaagauugugcacaucuccccucugucaggcagcgcucaacauguggaggaaugcaguuguuauccaagauacccgggggucaggugcguuugucgggauaacuggaagggaucuaaccgccccauaguggacauuaauguaaaagauuacuccaucgugagcucguaugucugcucuggccuugugggugacacaccucgaaagaacgacuccucaaguagcuccuacuguagaaauccaaacaaugagaaagggucucacggaguuaagggcugggccuucgaugacggcaacgauguguggauggggaggaccaucagcgaagaguugcggucaggauaugagacguuuaaagucauugguggcuggaguaagcccaauuccaaacugcagaucaaccgucaggugauuguagaccgcgggaauaugagcggauacucuggcauauucucaguugaagguaagaguugcaucaacagauguuuuuauguggagcuaauuagggggcggaagcaggaaaccgaggucugguggacaagcaauuccaucguggucuucugcggcacuucuggaaccuacggcacagggucguggccugauggagcggacaucaaccucaugccaauuuga

SEQ ID NO: 143304 - RNA, 1410 nt, Artificial Sequence; identical to SEQ ID NO: 143233
  derived and/or modified CDS sequence (opt3) from neuraminidase__InfluenzaA__ABG80406

SEQ ID NO: 143305 - RNA, 1410 nt, Artificial Sequence; identical to SEQ ID NO: 143233
  derived and/or modified CDS sequence (opt3) from neuraminidase__InfluenzaA__ABG80417

SEQ ID NO: 143306 - RNA, 1410 nt, Artificial Sequence; identical to SEQ ID NO: 143233
  derived and/or modified CDS sequence (opt3) from neuraminidase__InfluenzaA__ABG80428

SEQ ID NO: 143307 - RNA, 1410 nt, Artificial Sequence; identical to SEQ ID NO: 142174
  derived and/or modified CDS sequence (opt3) from neuraminidase__InfluenzaA__ABG88292

SEQ ID NO: 143308 - RNA, 1413 nt, Artificial Sequence; identical to SEQ ID NO: 143098
  derived and/or modified CDS sequence (opt3) from neuraminidase__InfluenzaA__ABG88314

SEQ ID NO: 143309 - RNA, 1413 nt, Artificial Sequence
  derived and/or modified CDS sequence (opt3) from neuraminidase__InfluenzaA__ABG88325
augaaccccaaucagaagaucauuaccauaggcagcacauccaucgccauugggaucauuucucugauccuccaaauaggaaacaucauuucaaucugggcuagucacagcauucagacugguucccagaaucauacgggcaucugcaaccagagaauaauuaccuacgaaaauucuacaugggugaaccaaacuuaugucaauaucaacaauaccucgguuguggcagggaaagacaagacaucaaugacccuugccggaaacagcagucuguguccuauuaggggcugggcgaucuacacuaaagauaauuccauccggauugguucuaagggggacguauucgugauacgcgagccauuuaucagcugcucccacuuggagugucgaacauucuuuuuaacccagggagcucugcuaaacgauaaacauucaaauggcacggucaaggaccguaguccguauagagcccucaugagcugcccccugggcgaagcaccuucuccauacaacuccagguucgagucaguggccuggagcgcuagugcaugucacgaugggcuuggauggcugacuauugguaucucuggccccgacaauggggccguugcuguguugaaguauaacggaauaauuaccgaaacaaucaaauccuggaagaaacggauccuccgcacucaggagagcgagugcgucuguaugaacggcucgugcuuuaccauuaugacagaugguccuucuaauggggccgcguccuacagaaucuucaagauugaaaaaggaagggugaccaagucaauagagcuggacgcaccaaacuaucauuacgaagaguguaguugcuaccccgauacgggcacuguaauguguguuugccgggacaauuggcacggcagcaaccgcccuuggguguccuuuaaucagaaccuggauuaucaaacaggguacaucugcucuggagucuucggugacaauccacgaccgaaggauggcgaggggagcuguaaccccgugaccgccgacggagcugacggcgugaaagguuuuucauauagauacgggaauggcgucuggauuggaaggacuaagaguaaccggcuccguaaaggcuucgaaaugaucugggauccuaauggguggacagacaccgauuccgacuuuagcaugaagcaggauaucguugccaugacggacuggucuggauauucagguaguuucgugcagcacccagaguuaaccggccuggauugcaugcgccccuguuuuuggguagaacuugugagaggguugccuagggagaacacaacuauuuggaccagcggauccucuauaucguucugcggcgucaauagcgacacagcaaacugguccuggccagauggugcugaacugcccuucacuaucgacaaauga

SEQ ID NO: 143310 - RNA, 1413 nt, Artificial Sequence
  derived and/or modified CDS sequence (opt3) from neuraminidase__InfluenzaA__ABG88336
augaaccccaaucagaagaucauuaccauaggcagcaucugcauggccauugggaucauuucccugauccuccaaauaggaaacaucauuucuaucugggugucacacaguauucagacagguaaucagaaccauacuggcaucuguaaucagagaauaauuacguacgagaacagcaccugggucaaucaaacauauguuaacaucaauaacacuaaugugguagcugggaaagacaccacauccgugacccuugcaggaaacucuucgcugugcccugucaggggcugggccauuuacucaaaggauaauagcauccggaucgguaguaaaggggacguguucguuauucgcgaaccauuuauauccuguucucacuuggagugccgaacuuucuuuuuaacacagggagcgcugcuaaacgauaagcauagcaauggcaccgugaaagaccguuccccguauagagcucucaugucaugucccaucggcgaagccccuaguccauacaacagcagguucgagucugucgcaugguccgccucagcuugccacgaugggaugggauggcugacgauugguaucagcggccccgacgauggggcaguggccguacuuaaguauaacggaauaauuacugaaaccaucaagaguuggcggaaacgcauccugagaacacaggagucugaguguguuugcgugaauggcuccuguuuuacuauuaugaccgacgguccuagcaacgggccagcuucguacaagaucuucaaaauugaaaagggaaaaauaacaaagucuaucgaguuggaugcccccaauucccauuaugaagagugcucauguuacccugacaccggcacggucaugugcgugugcagggauaacuggcacggcaguaaucggccaugggugagcuuuaaccagaaucucgacuaccaacugggguauauuuguuccggaaucuucggugauaacccgcgccccaaggacggcaaagggucuugcggaccugucacuguugacggcgcggauggugugaagggguuuagcuaccgauauggcaauggaguauggaucggcagaacaaaaucaaacaguuccaggaagggguucgagaugauuugggacccaaauggauggaccgauacugacagcaacuuucuggugaaacaggaugucguggcaaugacagacuggucugguuacucaggcaguuucguucagcaccccgaacucaccggguuagauuguaugcggccuugcuuuuggguggagcugauacguggacgcccaagagaaacgaccacaaucuggacuagcggcuccucuauuucguucuguggugucaauagcgacaccgugaacugguccuggcccgauggggccgagcuuccguucacaaucgacaaguga

SEQ ID NO: 143311 - RNA, 1413 nt, Artificial Sequence
  derived and/or modified CDS sequence (opt3) from neuraminidase__InfluenzaA__ABG88347
augaaccccaaucagaagaucauuaccauaggcagcaucugcauggccauugggaucauuggacugauccuccaaauagguaacaucauuuccaucugggugucucacucaauucagacaggcagucagaaucauacugggaucuguaaccagagaauaauuacguacgagaauagcaccugggucaaccaaacauauguuaauaucaacaauacuaacgugguagcuggaaaagacaccacauccgugacccuugcaggcaauucuucgcugugcccugucagggguugggccauuuacucaaaggauaacagcauccggaucgggaguaaaggagacguguucguuauucgcgaaccauuuauauccuguucucacuuggagugccgaacuuucuuuuuaacacagggcgcgcugcuaaaugauaagcauagcaacggcaccgugaaagaccguuccccguauagagcucucaugucaugucccaucggggaagccccuaguccauacaauagcagguucgagucugucgcaugguccgccucagcuugccacgauggaauggguuggcugacgauuggcaucagcgggcccgacgauggagcaguggccguacuuaaguauaacggcauaauuacugaaaccaucaagaguuggcggaaacgcauccugagaacacaggagucugaguguguuugcgugaacgguuccuguuuuacuauuaugaccgacgggccuagcaauggaccagcuucguacaagaucuucaaaauugaaaagggcaaaauaacaaagucuaucgaguuggaugcccccaacucccauuaugaagagugcucauguuacccugacaccggcacggucaugugcgugugcagggauaauuggcacgggaguaaccggccaugggugagcuuuaaucagaaccucgacuaccaacugggauauauuuguuccgguaucuucggcgauaauccgcgccccaaggacgggaaaggaucuugcggcccugucacuguugacggugcggauggggugaagggcuuuagcuaccgauauggaaacggcguauggaucgggagaacaaaaucaaauaguuccaggaagggauucgagaugauuugggacccaaacgguuggaccgauacugacagcaauuuucuggugaaacaggaugucguggcaaugacagacuggucuggcuacucagggaguuucguucagcaccccgaacucaccggauuagauuguaugcggccuugcuuuuggguggagcugauacguggccgcccaagagaaacgaccacaaucuggacuagcgguuccucuauuucguucuguggggucaacagcgacaccgugaauugguccuggcccgauggcgccgagcuuccguucacaaucgacaaguga

SEQ ID NO: 143312 - RNA, 1410 nt, Artificial Sequence
  derived and/or modified CDS sequence (opt3) from neuraminidase__InfluenzaA__ABG88358
augaaccccaaucagaagaucauuaccauaggcagcgugucccugacaaucgccacuauuugcuuccucaugcaaaucgcuauucuugucacgaccguuacacugcacuuuaaacaguacgaguguaacucuccuccaaauaaccaggugauguugugcgaaccgacuaucauagagagaaauaucaccgaaauuguauauuuaacaaacaccacuaucgagaaggaaauuugucccaaacuggcagaguacaggaauuggucaaagccucagugcaaaaucacaggguucgccccauuuaguaaggacaacagcauacggcuauccgcgggaggugauauuugggugacccgcgagcccuaugucucuugugacccuggcaagugcuaccaauucgcucucgggcagggaacgacucugaauaaccgacauucgaaugauaccgugcacgaccguacaccauauagaacucuucugaugaacgaauugggcguucccuuucaucucgguaccaaacagguguguaucgccuggucaagcaguuccugccacgaugggaaggcauggcugcaugucugugugacaggacacgacaaaaaugccaccgcuucuuucauuuacgauggcaggcugguagacagcaucggcuccuggucaaagaacauccuccggacgcaggagagugaaugcguuuguauuaaugggacuugcacaguggucaugaccgauggaagcgcaucugaccgcgccgauacuaaaauauuauuuaucgaggaggguaagauugugcacaucagaccucuguccggcucagcucaacauguggaagagugcagcuguuauccaagguacccggggguccggugcguuugucgcgacaacuggaagggaaguaaccgacccauaguggauauuaauguaaaagacuacucuaucguguccagcuaugucugcucgggccuugugggugacacaccuagaaagaacgauucuuccucaaguagcuacuguuggaauccaaacaaugaaaaagggggacacggcguuaagggcugggccuucgacgaugggaacgacguguggaugggaaggaccaucuccgaggaaucucggagcgguuaugagacguuuaaagucauuggcggguggucaaagcccaauaguaaauugcagaucaaccgucaggugauuguagaucgcggaaauagauccggcuacagcgguauauucucuguugaggggaagucaugcaucaacagguguuuuuauguggaacugauucggggccgaaagcaggagaccgaagucugguggacaaguaauagcaucguggucuucugcggaacuuccggcaccuacgggacaggaucuuggccugacggugcggauaucaaccuaaugccaauuuga

SEQ ID NO: 143313 - RNA, 1410 nt, Artificial Sequence; identical to SEQ ID NO: 143161
  derived and/or modified CDS sequence (opt3) from neuraminidase__InfluenzaA__ABG88369

SEQ ID NO: 143314 - RNA, 1410 nt, Artificial Sequence; identical to SEQ ID NO: 143161
  derived and/or modified CDS sequence (opt3) from neuraminidase__InfluenzaA__ABG88380

SEQ ID NO: 143315 - RNA, 1410 nt, Artificial Sequence; identical to SEQ ID NO: 143161
  derived and/or modified CDS sequence (opt3) from neuraminidase__InfluenzaA__ABG88391

SEQ ID NO: 143316 - RNA, 1410 nt, Artificial Sequence; identical to SEQ ID NO: 143148
  derived and/or modified CDS sequence (opt3) from neuraminidase__InfluenzaA__ABG88402

SEQ ID NO: 143317 - RNA, 1410 nt, Artificial Sequence; identical to SEQ ID NO: 143205
  derived and/or modified CDS sequence (opt3) from neuraminidase__InfluenzaA__ABG88413

SEQ ID NO: 143318 - RNA, 1410 nt, Artificial Sequence; identical to SEQ ID NO: 143149
  derived and/or modified CDS sequence (opt3) from neuraminidase__InfluenzaA__ABG88424

SEQ ID NO: 143319 - RNA, 1410 nt, Artificial Sequence; identical to SEQ ID NO: 143149
  derived and/or modified CDS sequence (opt3) from neuraminidase__InfluenzaA__ABG88435

SEQ ID NO: 143320 - RNA, 1410 nt, Artificial Sequence; identical to SEQ ID NO: 143149
  derived and/or modified CDS sequence (opt3) from neuraminidase__InfluenzaA__ABG88446

SEQ ID NO: 143321 - RNA, 1410 nt, Artificial Sequence
  derived and/or modified CDS sequence (opt3) from neuraminidase__InfluenzaA__ABG88457
augaaccccaaucagaagaucauuaccauaggcagcgugucccugacaacugccacgaucugcuuccucaugcaaauugcuauccuugucaccacaguuacucugcacuuuaaacaguacgaguguaacucuccuccaaauaaccaggugauguugugcgaaccgaccauuaucgagagaaauauaacagaaaucguauauuuaaccaacacuacaauugagaaggaaaucugucccaaacuggcagaguacaggaauuggucaaagccucagugcaaaauuaccggguucgccccauuuaguaaggacaacagcauccggcuauccgcgggaggugauauaugggugacgcgcgagcccuaugucucuugugacccuggcaagugcuaccaauucgcucucgggcagggaacuacccugaauaaccgacauucgaaugauacagugcacgaccguacuccauauagaacccuucugaugaacgaauugggcguucccuuucaucucgguacaaaacagguguguauugccuggucaagcaguuccugccacgaugggaaggcauggcugcaugucugugugaccggacacgacgagaaugccacggcuucuuucaucuacgauggcaggcugguagacagcauuggcuccuggaguaaaaacauccuccggacucaggaaucagagugcguuuguaucaaugggacaugcaccguggucaugacugauggaagcgcaucugagcgcgccgacacaaagauuuuauuuauaaaagaagguaagaucgugcacauuuccccucugucaggcagcgcucaacauguggaggaaugcaguuguuauccaagauacccgggggucaggugcguuugucgggauaacuggaagggaucuaaccgccccaucguggacauaaauguaaaagauuacuccauugugagcucguaugucugcucuggccuugugggugacaccccucgaaagaacgacuccucaaguagcuccuacugucagaauccaaacaaugagaaagggucucacggaguuaagggcugggccuucgaugacggcaacgauguguggauggggagaacgaucagcgaagaguugaggucaggauaugagaccuuuaaagucaucgguggcuggaguaagcccaauuccaaacugcagauuaaccgucaggugaucguagaccgggggaaucgcagcggauacucuggcauuuucucaguugaagguaagaguugcauaaacagauguuuuuauguggagcuaaucagggggcggaagcaagaaacagaggucugguggacuagcaauuccauuguggucuucugcggcaccucuggaacauacggcacugggucguggccugauggagcggacaucaaccucaugccaaucuga

SEQ ID NO: 143322 - RNA, 1410 nt, Artificial Sequence; identical to SEQ ID NO: 143149
  derived and/or modified CDS sequence (opt3) from neuraminidase__InfluenzaA__ABG88468

SEQ ID NO: 143323 - RNA, 1410 nt, Artificial Sequence; identical to SEQ ID NO: 143149
  derived and/or modified CDS sequence (opt3) from neuraminidase__InfluenzaA__ABG88479

SEQ ID NO: 143324 - RNA, 1410 nt, Artificial Sequence; identical to SEQ ID NO: 143149
  derived and/or modified CDS sequence (opt3) from neuraminidase__InfluenzaA__ABG88490

SEQ ID NO: 143325 - RNA, 1410 nt, Artificial Sequence; identical to SEQ ID NO: 143149
  derived and/or modified CDS sequence (opt3) from neuraminidase__InfluenzaA__ABG88501

SEQ ID NO: 143326 - RNA, 1410 nt, Artificial Sequence; identical to SEQ ID NO: 143149
  derived and/or modified CDS sequence (opt3) from neuraminidase__InfluenzaA__ABG88512

SEQ ID NO: 143327 - RNA, 1410 nt, Artificial Sequence; identical to SEQ ID NO: 143149
  derived and/or modified CDS sequence (opt3) from neuraminidase__InfluenzaA__ABG88523

SEQ ID NO: 143328 - RNA, 1410 nt, Artificial Sequence
  derived and/or modified CDS sequence (opt3) from neuraminidase__InfluenzaA__ABG88534
augaaccccaaucagaagaucauuaccauaggcagcgugucccugacaaucgccacuauuugcuuccucaugcaaaucgcuauucuugucacgaccguuacacugcacuuuaaacaguacgaguguaacucuccuccaucaaaucaggugauguugugcgaaccgacuaucauagagagaaacaucaccgaaauuguauauuuaacaaauaccacuaucgagaaggaaauuugucccaaacuggcagaguacaggaacuggaguaagccucagugcaaaaucacaggguucgccccauuuagcaaggacaauuccauacggcuaucugcgggaggugauauuugggugacccgcgagcccuaugucucgugugacccuggcaagugcuaccaauucgcucucgggcagggaacgacucugaacaaucgacauucaaacgauaccgugcacgaccguacaccauauagaacucuucugaugaaugaauugggcguucccuuucaucucgguaccaaacagguguguaucgccuggagcaguuccucuugccacgaugggaaggcauggcugcaugucugugugacaggacacgacgagaacgccaccgcuagcuucauuuacgauggcaggcugguagacuccaucggcucauggaguaaaaauauccuccggacgcaggaaagcgagugcguuuguauuaacgggacuugcacaguggucaugaccgauggaucugcauccgagcgcgccgacacuaagauauuauuuaucgaagaggguaaaauugugcacaucucaccucugagcggcagugcucaacauguggaagagugcucuuguuauccaagauacccgggggucaggugcguuugucgggauaauuggaagggauccaaccgccccauaguggacauuaacguaaaggauuacagcaucgugucgucuuaugucugcuccggccuugugggugacacaccucgaaagaaugacucaaguagcuccucuuacuguagaaacccaaauaacgaaaaagggagccacggaguuaaaggcugggccuucgaugacggcaaugauguguggauggggaggaccaucucagaggaguugcggaguggauaugaaacguuuaaggucauugguggcugguccaaacccaacagcaagcugcagaucaaucgucaggugauuguagaccgcgggaacagaucuggauacucaggcauauucaguguugagaauaaaagcugcaucaacagguguuuuuauguggaacuaauucggggucgaaagcaggagaccgaagucugguggacauccaauucuaucguggucuucugcgggacuucgggcaccuacggaacaggcagcuggccugauggggcggacaucaaccucaugccaauuuga

SEQ ID NO: 143329 - RNA, 1410 nt, Artificial Sequence; identical to SEQ ID NO: 142841
  derived and/or modified CDS sequence (opt3) from neuraminidase__InfluenzaA__ABG88567

SEQ ID NO: 143330 - RNA, 1410 nt, Artificial Sequence
  derived and/or modified CDS sequence (opt3) from neuraminidase__InfluenzaA__ABG88600
augaaccccaaucagaagaucauuaccauaggcagcgugucccugacaaucgccacuauuugcuuccucaugcaaaucgcuauucuugucacgaccguuacacugcacuuuaaacaguacgaguguaacucuccuccaaauaaccaggugauguugugcgaaccgacuaucauagagagaaauaucaccgaaauuguauauuuaacaaacaccacuaucgagaaggaaauuugucccaaaccugcagaguacaggaauuggucaaagccacagugcaacaucacaggguucgcccccuuuaguaaagacaauagcauacggcuguccgcgggaggugauauuugggugacccgcgagccuuaugucucuugugacccagauaagugcuaccaauucgcucuaggccaggggacgacucucaacaauggacauucgaacgacaccgugcacgaucgaacacccuaucguacucugcuuaugaaugaacugggcguuccuuuucauuuggguaccaaacagguguguaucgccuggucaagcaguuccugccacgacgggaaggcauggcuccaugucugugugacaggagaugacgagaacgccaccgcuucuuucauuuacaauggcagacugguagauagcaucggcuccuggucaaagaaaauccugaggacgcaggaaagugagugcguuuguauuaacgggacuugcacaguggucaugaccgacggaagcgcaucugguaaggccgauacuaaaauacucuuuaucgaggaaggcaagauugugcacacauccuuacugucagggagcgcucaacacguggaggaaugcaguuguuauccacgguacccgggaguccgcugcguuuguagagacaacuggaagggcucuaauaggcccaucguggauauaaacguaaaagacuacuccauugugagcucguaugucugcucuggucuugugggggacaccccucggaagaaugauuccucaaguagcucccauuguuuggacccaaacaaugaggaaggaggccacggcguuaaagggugggccuucgaugacggaaacgauguguggaugggucgcacgaucucugagaagcugcgaagcggcuacgagaccuuuaaagucaucgaaggguggucaaagcccaauaguaaacuacagauuaacagacaggugaucguagacaggggaaaucgguccggcuauagcgguauuuucucuguugaggggaagucaugcauaaaccguuguuuuuacguggaacucauccgcggcagaaagcaggagacagaaguccuguggaccaguaauagcauuguggucuucugcggaacuuccggcacauaugggacuggaucuuggccugauggugcggacaucaaccuuaugccaaucuga

SEQ ID NO: 143331 - RNA, 1410 nt, Artificial Sequence; identical to SEQ ID NO: 142202
  derived and/or modified CDS sequence (opt3) from neuraminidase__InfluenzaA__ABG88611

SEQ ID NO: 143332 - RNA, 1410 nt, Artificial Sequence; identical to SEQ ID NO: 142214
  derived and/or modified CDS sequence (opt3) from neuraminidase__InfluenzaA__ABG88622

SEQ ID NO: 143333 - RNA, 1410 nt, Artificial Sequence; identical to SEQ ID NO: 142202
  derived and/or modified CDS sequence (opt3) from neuraminidase__InfluenzaA__ABG88633

SEQ ID NO: 143334 - RNA, 1410 nt, Artificial Sequence; identical to SEQ ID NO: 143253
  derived and/or modified CDS sequence (opt3) from neuraminidase__InfluenzaA__ABG88655

SEQ ID NO: 143335 - RNA, 1410 nt, Artificial Sequence; identical to SEQ ID NO: 143253
  derived and/or modified CDS sequence (opt3) from neuraminidase__InfluenzaA__ABG88666

SEQ ID NO: 143336 - RNA, 1410 nt, Artificial Sequence; identical to SEQ ID NO: 142639
  derived and/or modified CDS sequence (opt3) from neuraminidase__InfluenzaA__ABG88677

SEQ ID NO: 143337 - RNA, 1410 nt, Artificial Sequence; identical to SEQ ID NO: 143253
  derived and/or modified CDS sequence (opt3) from neuraminidase__InfluenzaA__ABG88688

SEQ ID NO: 143338 - RNA, 1410 nt, Artificial Sequence; identical to SEQ ID NO: 142639
  derived and/or modified CDS sequence (opt3) from neuraminidase__InfluenzaA__ABG88699

SEQ ID NO: 143339 - RNA, 1410 nt, Artificial Sequence; identical to SEQ ID NO: 142375
  derived and/or modified CDS sequence (opt3) from neuraminidase__InfluenzaA__ABG88710

SEQ ID NO: 143340 - RNA, 1410 nt, Artificial Sequence; identical to SEQ ID NO: 142375
  derived and/or modified CDS sequence (opt3) from neuraminidase__InfluenzaA__ABG88721

SEQ ID NO: 143341 - RNA, 1410 nt, Artificial Sequence
  derived and/or modified CDS sequence (opt3) from neuraminidase__InfluenzaA__ABG88732
augaaccccaaucagaagaucauuaccauaggcagcgugucccugacaaucgccacuauuugcuuccucaugcaaaucgcuauucuugucacgaccguuacacugcacuuuaaacaguacgaguguaacucuccuccaaauaaccaggugauguugugcgaaccgacuaucauagagagaaauaucaccgaaauuguauauuuaacaaacaccacuaucgagaaggaaauuugucccaaacuggcagaguacaggaauuggucaaagccucagugcaaaaucacaggguucgccccauuuaguaaggacaacagcauacggcuauccgcgggaggugauauuugggugacccgcgagcccuaugucucuugugacccuggcaagugcuaccaauucgcucucgggcagggaacgacucugaauaaccgacauucgaaugauaccgugcacgaccguacaccauauagaacucuucugaugaacgaauugggcguucccuuucaucucgguaccaaacagguguguaucgccuggucaagcaguuccugccacgaugggaaggcauggcugcaugucugugugacaggacacgacgagaaugccaccgcuucuuucauuuacgauggcaggcugguagacagcaucggcuccuggaguaaaaacauccuccggacgcaggaaucagagugcguuuguauuaaugggacuugcacaguggucaugaccgauggaagcgcaucugagcgcgccgacacuaagauauuauuuaucgaagaggguaaaauugugcacaucuccccucugucaggcagcgcucaacauguggaagagugcaguuguuauccaagauacccgggggucaggugcguuugucgggauaacuggaagggaucuaaccgccccauaguggacauuaauguaaaggauuacuccaucgugagcucguaugucugcucuggccuugugggugacacaccucgaaagaacgacuccucaaguagcuccuacuguagaaauccaaacaaugaaaaagggucucacggaguuaaaggcugggccuucgaugacggcaacgauguguggauggggaggaccaucagcgaggaguugcggucaggauaugaaacguuuaaggucauugguggcuggaguaaacccaauuccaagcugcagaucaaccgucaggugauuguagagcgcgggaauagaagcggauacucuggcauauucucaguugaagguaaaaguugcaucaacagguguuuuuauguggagcuaauucgggggcgaaagcaggaaaccgaggucugguggacaagcaauuccaucguggucuucugcggcacuucuggaaccuacggcacagggucguggccugacggagcggauaucaaccucaugccaauuuga

SEQ ID NO: 143342 - RNA, 1410 nt, Artificial Sequence; identical to SEQ ID NO: 143301
  derived and/or modified CDS sequence (opt3) from neuraminidase__InfluenzaA__ABG88743

SEQ ID NO: 143343 - RNA, 1410 nt, Artificial Sequence; identical to SEQ ID NO: 143301
  derived and/or modified CDS sequence (opt3) from neuraminidase__InfluenzaA__ABG88754

SEQ ID NO: 143344 - RNA, 1410 nt, Artificial Sequence; identical to SEQ ID NO: 142567
  derived and/or modified CDS sequence (opt3) from neuraminidase__InfluenzaA__ABG88765

SEQ ID NO: 143345 - RNA, 1410 nt, Artificial Sequence; identical to SEQ ID NO: 143233
  derived and/or modified CDS sequence (opt3) from neuraminidase__InfluenzaA__ABG88776

SEQ ID NO: 143346 - RNA, 1410 nt, Artificial Sequence; identical to SEQ ID NO: 143233
  derived and/or modified CDS sequence (opt3) from neuraminidase__InfluenzaA__ABG88787

SEQ ID NO: 143347 - RNA, 1410 nt, Artificial Sequence
  derived and/or modified CDS sequence (opt3) from neuraminidase__InfluenzaA__ABG88820
augaaccccaaucagaagaucauuaccauaggcagcgugucccugacaaucucuacuauuugcuucuuuaugcagaucgccauucucaucacgaccgucacacuucacuucaaacaguacgaguuuaacucaccuccaaauaaccagguuaugcugugugaaccgacuauaaucgagagaaauauuaccgaaaucguguauuugacaaacaccacuauugagaaggaaaaaugccccaaguuagcugaguacaggaauuggaguaaaccucaguguaacaucacaggguucgcaccauuuagcaaggacaauuccauacggcugucugccggaggugauauuuggguaacccgcgagcccuaugugucgugcgacccugauaaguguuaccaauucgcgcuaggccaggggacgacucucaacaauguccauucaaacgacaccgugcgagaucguacaccauauagaacucugcuuaugaaugaacugggaguucccuuucacuugggcaccaaacaggugugcaucgcuuggagcaguuccucuugucaugacgguaaggccuggcuccacgucugcgugacaggggaugacaaaaacgcaaccgccagcuucauuuacaauggaaggcugguagauuccaucguuucauggaguaaggagauccugcggacgcaggaaagcgagugugugugcauuaacggcacuuguacagucgugaugaccgacggcucugcuuccgggaaagcagauacuaagauacucuuuaucgaggaaggaaagauugugcauacaucaaccuuaagcgguagugcccaacacgucgaggaaugcucuugcuauccucgcuacccaggcguuagaugugugugcagggacaacuggaaaggguccaaucggccgaucguagauauaaacauuaaggacuacagcaucgugucgucuuaugucuguuccggacuggugggcgacacgccccgcaaaaaugauucaaguagcuccucucacugccuugacccuaacaaugaggaaggugggcauggaguuaagggcugggcuuucgaugacggcaacgauguguggauggggcgaaccaucagcgagaaauugagacugggauacgagacauuuaaggucauugaagguuggucaaauccaaacaguaaacuacagacuaauaggcaagugaucguagaccggggcaaccguuccggguauagcggaauuuucucuguugagggcaagucauguauaaaucgcugcuuuuacguggaacucaucagagguaggaaggaggaaaccgagguccuguggacaaguaacagcauuguggucuucugugggacuuccggcaccuauggaacaggcucuuggcccgauggggccgacaucaaucuuaugccuaucuga

SEQ ID NO: 143348 - RNA, 1350 nt, Artificial Sequence
  derived and/or modified CDS sequence (opt3) from neuraminidase__InfluenzaA__ABI16506
augaaccccaaucagaagaucauuaccauaggcagcaucugcauggugauugggaucgucucccugaugcuccaaauuggaaacaugguuucucuuugggugucacacaguauccagacagguaaucagcaucagguagagccuauaagcaacacuaauuuccugacggaaaaagccguggcuuccgucaccuuggcaggcaacucuucguuauguccaaucagagggugggccgugcacucaaaggacaauagcauuaggaucggaaguaaaggcgauguuuuugugauucgggagccguucaucuccugcucucaucuggaaugucgcacauuuuuccuaacucaaggugcgcuccugaacgacaagcacagcaaugggaccgucaaagaucgaucaccccaucguacacuuauguccugcccugugggagaggcuccaagucccuacaacagcagauuugaaucuguagccugguccgcaucagccugucacgacggcaccagcuggcugacuauaggcauuagugggccugauaauggagcuguugcaguguugaaguauaacgguaugaucacagacaccauuaagucuuggaggaauaacauccuccggacgcaggaguccgagugcgucugugugaauggcagcugcuucacugugaugaccgaugggccaucgaacggacaggccucuuacaaaaucuuuaagauggaaaaaggcaaggucguuaaauccguggagcuggacgcucccaacuaucacuacgaagaguguucaugcuauccugaugccggugagauuacauguguaugccgcgacaauuggcaugggaguaacagaccaugggugagcuucaaucagaaccuggaauaccaaauaggauauaucugcuccggcgucuuuggcgauaauccgaggcccaacgacgggacuggaucuugugguccugugagcccaaauggcgcguacgggguuaagggauucucauuuaaguacggcaacgguguguggauugggcggaccaaaagucccuccagccgcucuggcuucgagaugaucugggauccuaauggauggacagaaaccgacucaaguuuuagcgucaagcaggacauaguggcaauuacggauugguccggcuauucugggucguucguacagcacccagagcucacuggauuagacugcauccgacccuguuucuggguugaacugaucagagguaggccgaaagagagcacaauuuggaccuccggcucaaguaucucuuuuugcggggugaacagcgauacugucuccuggucauggccugacggagccgagcuucccuucacaauugauaaguga

SEQ ID NO: 143349 - RNA, 1413 nt, Artificial Sequence; identical to SEQ ID NO: 143013
  derived and/or modified CDS sequence (opt3) from neuraminidase__InfluenzaA__ABI20840

SEQ ID NO: 143350 - RNA, 1413 nt, Artificial Sequence
  derived and/or modified CDS sequence (opt3) from neuraminidase__InfluenzaA__ABI20862
augaaccccaaucagaagaucauuaccauaggcagcaucugcaugacaauugggaucauuucccugauccuccaaauaggaaacaucauuucuaucugggugucacacaguauucagacugguagccagaaucauacgggcaucuguaaccagagaauaauuaccuacgaaaauuccacaugggucaaccaaacuuauguuaauaucaacaauaccaacgugguagccgggaaagacacaaccucugugacucuugcuggaaauucgucacugugcccuauuaggggcugggcaaucuacagcaaggauaacaguauccggauugguuccaaaggggacgucuucgugauacgcgaaccauuuaucucuuguagccacuuggagugccgaacauucuuuuuaacccagggagcccugcuaaaugauaagcauuccaacggcacgguuaaagaccguucaccguauagagcgcucaugaguugucccauuggcgaagcuccuagcccauacaauucuagguucgaguccguggccuggucagcaagcgccugccacgaugggaugggauggcugacuaucgguauaaguggccccgacgauggggcugucgcagugcuuaaguauaacggaauuaucaccgaaacaaucaagucuuggcggaaacgcauucugagaacucaggaguccgaguguguaugcguuaacggcagcuguuuuaccaucaugacagacgguccuucgaaugggccagccucuuacaggauuuucaagauagaaaaaggaaagaucaccaaauccauugaguuggaugcucccaacucacauuaugaagagugcaguuguuacccugacacgggcacugugaugugcgucugccgggauaauuggcacggcagcaaccgcccauggguguccuuuaaucagaaccucgacuaccaaacaggguauaucuguucuggaguguucggugauaauccgcgacccaaggacggcaaggggagcugcgacccugucaccguugauggagccgacggcgugaaagguuuuucauacagauaugggaacggcguauggaucggaaggacuaagaguaauuccagccggaaaggcuucgagaugauuugggauccaaacggguggacagacaccgauucuaauuuucuggugaagcaggacgucguggcgaugacggauuggucaggauacagugguagcuucguucagcaccccgaacugaccggccucgacuguaugcguccuugcuuuuggguggaguuaauacgcgggagaccaagggagaaaacaacuaucuggaccuccggaucuucgauuagcuucuguggcgucaacuccgauacagcaaauuggucauggcccgacggugccgagcugccguucacuaucgauaaguga

SEQ ID NO: 143351 - RNA, 1413 nt, Artificial Sequence
  derived and/or modified CDS sequence (opt3) from neuraminidase__InfluenzaA__ABI20873
augaaccccaaucagaagaucauuaccauaggcagcaucuccauggccauugggaucauuucucugacacuccaaaucggaaacauaaucucaauuugggcuagucacagcauccagacugguucccagaaucauacgggcauuugcaaccagagaaucauaaccuacgaaaauucuacaugggugaaccaaacuuaugucaauauuaacaauaccaacguuguggcagagaaagacaagacaucgguaacccuugccggaaauucaagccuguguccuaucagggggugggcgauuuacacuaaagauaacaguauccggaucggcuccaagggugacguguucgucauucgcgagccauuuauaucuugcagccacuuggaaugucgaacauucuuuuuaacccagggggcucugcuaaaugauaaacauuccaacggaacggugaaggaccguucaccguauagagcccucaugaguugcccccugggcgaggcaccuagcccauacaauucuagguucgaauccguugccuggucagcuacugcaugucacgauggcaucggguggcuuaccauuggaaucagcggucccgacaacggcgccguggcuguccugaaguauaacggggugauaacagagacuauuaaaaguuggaagaaacagaucuugcggacccaggagucugaaugcguauguguuaauggauccugcuuuacaaucaugaccgauggcccuagcaacggugccgcgucguaccgcauuuucaagaucgagaaagggaagauuacgaagucuauagaacucgacgcaccaaauuuucauuaugaggaguguuccugcuaccccgauacuggaacagugaugugugucugcagagacaacuggcacggcucaaauaggccuugggugaguuucaaccaaaaucuggauuaccagaucggcuauauuugcagcgggguguuuggagacaacccacggccgaaagauggugaaggcuccuguaaucccgucaccguugacggggccgacggagugaagggcuucucuuaccgcuaugguaacgggguauggaucggccgaacuaaaagcaauagacugaggaagggauuugagaucauuugggauccuaacggcuggacagacaccgauucagacuucagugugaaacaggaugucguggcuaugacggacugguccggguacagcggaucuuuuguucagcacccagaacucaccgguuuagauugcaugcggcccuguuucuggguggagcugguccguggccuuccucgcgaaaaugccacaauauggacuucagggaguagcaucuccuucugcggagugaacucugacaccgcaaauuggucguggccagauggcgcugaguugcccuuuacaauugacaaguga

SEQ ID NO: 143352 - RNA, 1410 nt, Artificial Sequence; identical to SEQ ID NO: 143148
  derived and/or modified CDS sequence (opt3) from neuraminidase__InfluenzaA__ABI20895

SEQ ID NO: 143353 - RNA, 1410 nt, Artificial Sequence; identical to SEQ ID NO: 143161
  derived and/or modified CDS sequence (opt3) from neuraminidase__InfluenzaA__ABI20906

SEQ ID NO: 143354 - RNA, 1410 nt, Artificial Sequence; identical to SEQ ID NO: 143149
  derived and/or modified CDS sequence (opt3) from neuraminidase__InfluenzaA__ABI20928

SEQ ID NO: 143355 - RNA, 1410 nt, Artificial Sequence; identical to SEQ ID NO: 143149
  derived and/or modified CDS sequence (opt3) from neuraminidase__InfluenzaA__ABI20939

SEQ ID NO: 143356 - RNA, 1410 nt, Artificial Sequence; identical to SEQ ID NO: 143149
  derived and/or modified CDS sequence (opt3) from neuraminidase__InfluenzaA__ABI20950

SEQ ID NO: 143357 - RNA, 1410 nt, Artificial Sequence; identical to SEQ ID NO: 143149
  derived and/or modified CDS sequence (opt3) from neuraminidase__InfluenzaA__ABI20961

SEQ ID NO: 143358 - RNA, 1410 nt, Artificial Sequence; identical to SEQ ID NO: 142875
  derived and/or modified CDS sequence (opt3) from neuraminidase__InfluenzaA__ABI20983

SEQ ID NO: 143359 - RNA, 1410 nt, Artificial Sequence
  derived and/or modified CDS sequence (opt3) from neuraminidase__InfluenzaA__ABI20994
augaaccccaaucagaagaucauuaccauaggcagcgugucccugacaaucgccacuauuugcuuccucaugcaaaucgcuauucuugucacgaccguuacacugcacuuuaaacaguacgaguguaacucuccuccaaauaaccaggugauguugugcgaaccgacuaucauagagagaaauaucaccgaaauuguauauuuaacaaacaccacuaucgagaaggaaauuugucccaaacuggcagaguacaggaauuggucaaagccucagugcaacaucacaggguucgccccauuuaguaaagacaauagcauacggcuauccgcgggaggugauauuugggugacccgcgagcccuaugucucuugugacccugauaagugcuaccaauucgcucucggccaggggacgacucugaacaauggacauucgaacgacaccgugcacaaucgaacaccauaucguacucuucugaugaacgaauugggcguucccuuucaucucgguaccaaacagguguguaucgccuggucaagcaguuccugccacgaugggaaggcauggcugcaugucugugugacaggagacgaugagaaugccaccgcuucuuucauuuacaacggcagacugguagacagcaucggcuccuggucaaagaaaauccucaggacgcaggaaagugagugcguuuguauuaacgggacuugcacaguggucaugaccgauggaagcgcaucugguaaggccgacacuaaaauauuauuuaucgaggaaggcaagauugugcacacauccucacugagcgggagugcucaacacguggaggaaugcucuuguuauccucgguacccaggaguccgcugcguuuguagagauaauuggaagggcuccaacaggccgaucguggacauaaauguaaaagauuacagcauugugucgucuuaugucugcuccggucuugugggggacacgccccggaagaacgacucaaguagcuccucucauuguuuggauccuaauaacgaggaaggaggccacggcguuaaagggugggccuucgacgauggaaaugacguguggaugggucgcaccaucagcgagaagcugcgaucaggcuacgagaccuuuaaagucaucgaaggguggaguaagccaaacuccaaacuacagauuaauagacaggugaucguagauaggggaaaccggagcggcuauucugguauuuucucaguugagaguaagagcugcauaaaucguuguuuuuacguggaacucauccgcgggagaaagcaggagacagaaguccuguggacuuccaacucuauuguggucuucugcggcaccucgggaacauauggcacugggagcuggcccgacggagcggauaucaaucuuaugccuaucuga

SEQ ID NO: 143360 - RNA, 1410 nt, Artificial Sequence
  derived and/or modified CDS sequence (opt3) from neuraminidase__InfluenzaA__ABI21005
augaaccccaaucagaagaucauuaccauaggcagcgugucccugacaaucgccacuauuugcuuccucaugcaaaucgcuguccuuguuacgaccgugacacugcacuuuaaacaguacgaguguaacucuccuccaaauaaccagguaauguugugcgaaccgacuauuaucgagagaaauauaaccgaaaucguguauuuaacaaacaccacuauugagaaggaaaucugucccaaacuggcagaguacaggaauuggucaaagccucagugcaacauuacaggguucgccccauuuaguaaagacaauagcauccggcuauccgcgggaggugauauaugggucacccgcgagcccuaugugucuugugacccugauaagugcuaccaauucgcucucggccaggggacgacucugaacaauggacauucgaacgacaccguucacgaucgaacaccauaucguacucuucugaugaaugaauugggcgugcccuuucaucucgguaccaagcaggucuguauugccuggucaagcaguuccugccacgacgggaaagcauggcugcauguguguguaacaggagaugacgagaacgccaccgcuucuuucaucuacaauggcagacuggcagauagcauuggcuccuggucaaagaaaauccucaggacgcaggaaagugagugcguuuguaucaacgggacuugcacaguggucaugaccgacggaagcgccucugguaaggcugauacuaaaauuuuauuuauagaggaaggcaagaucgugcacacaucccugcuuucagggagcgcccaacacguggaggaaugcaguuguuauccucgguacccaggaguccgcugcguuuguagagacaacuggaagggcucuaauaggccgauuguggauaucaacguaaaagacuacuccauagugagcucguaugucugcucugguuuggugggggacacuccccggaagaaugauuccucaaguagcucccauugucuggacccuaacaaugaggaaggaggccacggcguuaaagggugggcguucgaugacggaaacgauguguggaugggucgcacgauuucugagaagcuacgaagcggcuacgagaccuuuaaagucaucgaaggguggucaaagccaaauaguaaacuccagaucaacagacaggugauuguagacaggggaaaucgguccggcuauagcgguaucuucucuguugaggggaagucaugcauuaaccguuguuuuuacguggaacugauacgcggcagaaagcaggagacagaaguccuuuggaccaguaauagcaucguggucuucugcggaaccuccggcacauaugggacuggaucuuggcccgauggugcagacauuaaccugaugccuaucuga

SEQ ID NO: 143361 - RNA, 1410 nt, Artificial Sequence; identical to SEQ ID NO: 142202
  derived and/or modified CDS sequence (opt3) from neuraminidase__InfluenzaA__ABI21016

SEQ ID NO: 143362 - RNA, 1410 nt, Artificial Sequence
  derived and/or modified CDS sequence (opt3) from neuraminidase__InfluenzaA__ABI21027
augaaccccaaucagagaaucauuaccauaggcagcgugucccugacaaucgccacuauuugcuuccucaugcaaaucgcuauucuugucacgaccguuacacugcacuuuaagcaguacgaguguaacucuccuccaaauaaccaggugauguugugcgaaccgacuaucauagagaggaauaucaccgaaauuguauauuuaacaaacaccacuaucgagaaagaaauuugucccaagcuggcagaguaccggaauuggucaaaaccucagugcaacaucacaggguucgccccauuuaguaaggacaauagcauacgccuauccgcgggaggugauauuugggugacccgagagcccuaugucucuugugacccugauaaaugcuaccaauucgcucucggccaggggacgacucugaacaauggacauucgaacgacaccgugcacgaucguacaccauauagaacucuucugaugaaugaauugggcguucccuuucaucucgguacccgacagguguguaucgccuggucaagcaguuccugccacgacgggaaggcauggcugcaugucugugugacaggagaugacgagaacgccaccgcuucuuucauuuacaauggccggcugguagauagcaucggcuccuggucaaagaaaauccuccgcacgcaggaaagugagugcguuuguauuaacgggacuugcacaguggucaugaccgacggaagcgcaucugguaaggccgauacuaaaauauuauuuaucgaggaaggcaagauugugcacaucuccacacugucagggagcgcucaacacguggaggaaugcaguuguuauccuagauacccaggagucaggugcguuugucgggacaacuggaaaggcucuaaucgcccgauaguggauauuaacguaaaggacuacuccaucgugagcucguaugucugcucuggucuugugggggacacccccaggaagaaugauuccuucucaaguagccauuguuuggacccuaacaaugaggaaggaggccacggcguuaaagggugggccuuugaugacggaaacgauguguggauggguagaacgaucuccgagaagcugaggucuggcuacgagaccuucaaagucauugaaggguggagcaagccaaauucaaaacuacagacaaaccgucaggugaucguagagcggggaaaucgcaguggcuauuccgguauuuuuagcguugaagggaagucuugcauaaacagauguuucuacguggagcucaucaggggccggaaagaagagacugaggucugguggaccucaaauaguauuguggucuuuugcggaacacccggcacuuaugggaccggaagcuggccugacggugcggauaucaaccugaugccaaucuga

SEQ ID NO: 143363 - RNA, 1410 nt, Artificial Sequence; identical to SEQ ID NO: 142639
  derived and/or modified CDS sequence (opt3) from neuraminidase__InfluenzaA__ABI21038

SEQ ID NO: 143364 - RNA, 1410 nt, Artificial Sequence
  derived and/or modified CDS sequence (opt3) from neuraminidase__InfluenzaA__ABI21049
augaaccccaaucagaagaucauuaccauaggcagcgugucccugacaaucgccacuauuugcuuccucaugcaaaucgcuauucuugucacgaccguuacacugcacuuuaaacagcaugaguguaacucuccuccaaauaaccaggugauguugugcgaaccgacuaucauagagagaaauaucaccgaaauuguauacuuaacaaacaccacuaucgagaaggaaauuugucccaaacugguggaguauaggaauuggucaaagccucagugcaacaucacaggguucgcaccauuuaguaaagacaauagcauacggcuauccgccggaggugauauuugggucacccgcgagcccuacgugucuugugacccugauaagugcuaucaauucgcgcucggccaggggacgacucugaacaauggacacucgaacgacaccguucaugaucgaacaccauaccguacucuucugaugaaugaauugggcgugcccuuucaccucgguaccagacaggucuguaucgcuuggucaagcaguuccugccaugacgggaaggccuggcugcacguguguguaacaggagaugacaaaaacgcaaccgccucuuucauuuauaauggcaggcugguugauagcaucggcuccuggucaaagaaaauccuccggacgcaggagagugaaugcguguguauuaacgggacuugcacagucgugaugaccgacggaagcgcuucugguaaggcagauacuaaaauauuauuuaucgaggagggcaagauugugcacaucuccacacugucagggagcgcccaacaugucgaagagugcaguuguuacccucgcuauccaggaguuagaugcguguguagggacaacuggaagggcucuaaucggccgauaguagauauuaacgugaaagacuacuccaucgucagcgguuacgugugcucggggcuuguuggagacacgccccgcaagaaugauucuuucuccucaagucacuguuuggacccuaacaaugaagagggcggccauggggugaaaggaugggcuuuugaugacgguaacgaugucuggaugggccgaaccaucagcgaaaagcugagauccggguaugagaccuucaaagugauugagggauggucuaagccaaauagcaaacuacagaucaacaggcagguaauuguugaacggggcaaucguucagguuacagugggauauuuuccguggagggcaagagcugcaucaaccgcuguuucuaugucgaacucauuagaggaaggaaggaggaaacagaggugugguggacuucuaauucaaucgucguguuuugcggcaccagugggacauacggaacugguagcuggcccgacggcgccgauaucaaccugaugccuauuuga

SEQ ID NO: 143365 - RNA, 1410 nt, Artificial Sequence
  derived and/or modified CDS sequence (opt3) from neuraminidase__InfluenzaA__ABI21060
augaaccccaaucagaagaucauuaccauaggcagcgugucccugacaaucgccacuauuugcuuccucaugcaaaucgcuauucuugucacgaccguuacacugcacuuuaaacagcaugaguguaacucuccuccaaauaaccaggugauguugugcgaaccgacuaucauagagagaaauaucaccgaaauuguauacuuaacaaacaccacuaucgagaaggaaauuugucccaaaccuguggaguauaggaauuggucaaagccacagugcaacaucacaggguucgcacccuuuaguaaagacaauagcauacggcuguccgccggaggugauauuugggucacccgcgagccuuacgugucuugugacccagauaagugcuaucaauucgcgcuaggccaggggacgacucucaacaauggacacucgaacgacaccguucaugaucgaacacccuaccguacucugcuuaugaaugaacugggcgugccuuuucacuuggguaccagacaggucuguaucgcuuggucaagcaguuccugccaugacgggaaggccuggcuccacguguguguaacaggagaugacaaaaacgcaaccgccucuuucauuuauaauggcaggcugguugauagcaucggcuccuggucaaagaaaauccugcggacgcaggagagugaaugcguguguauuaacgggacuugcacagucgugaugaccgacggaagcgcuucugguaaggcagauacuaaaauacucuuuaucgaggagggcaagauugugcacaucuccacauuaucagggagcgcccaacaugucgaagagugcaguuguuacccacgcuauccgggaguuagaugcguguguagggacaacuggaagggcucuaaucggcccauaguagauauuaacgugaaagacuacuccaucgucagcucguacgugugcucuggucugguuggggacaccccucgcaagaaugauuccuucucaaguagccacugucuugacccaaacaaugaagagggaggccauggcgugaaagggugggcuuuugaugacggaaacgaugucuggaugggucgaacgaucuccgaaaaguugagaucuggcuaugagaccuucaaagugauugagggguggagcaagcccaauucaaaacugcagaucaacaggcagguaauuguugaacggggaaaucguaguggcuacuccgguauauuuagcguggaggggaagucuugcaucaaccgcuguuucuaugucgaacuaauuagaggcaggaaggaggaaacagaggugugguggacuucaaauaguaucgucguguuuugcggaaccagcggcacauacgggacuggauccuggccugacggugccgauaucaaccucaugccaauuuga

SEQ ID NO: 143366 - RNA, 1410 nt, Artificial Sequence
  derived and/or modified CDS sequence (opt3) from neuraminidase__InfluenzaA__ABI21071
augaaccccaaucagaagaucauuaccauaggcagcgugucccugacaaucucuacuauuugcuucuuuaugcaaaucgccauucucaucacgaccgucacacuucacuucaaacaguacgaguuuaacucaccuccaaauaaccagguuaugcugugugaaccgacuauaaucgagagaaauauuaccgaaaucguguauuugacaaacaccacuauugagaaggaaaucugccccaaauuagcugaguacaggaauuggaguaagccucagugugacauaacaggguucgcaccauuuagcaaagauaacuccauucggcugucugccggaggugacaucuggguaacccgcgagcccuaugugucgugcgauccugacaaguguuaccaauucgcgcuaggccaggggacgacucucaauaacguccauucaaaugauaccgugcacgaccgaacaccauaucguacucugcuuaugagcgaacugggaguucccuuucauuugggcaccaaacaggugugcauugcuuggaguuccucuagcugucacgaugguaaggccuggcuccaugucugcgugacaggggacgauaagaacgcaaccgccuccuucaucuacaauggaagacugguagacucaaucguuaguuggagcaaagagauucugaggacgcaggaaucugagugugugugcauaaacggcacuuguacagucgugaugaccgauggcuccgcuucagggaaggcagacacuaaaauccucuuuauugaggaaggaaagaucgugcacacaagcaccuuaagugguucugcccaacacgucgaggaaugcuccugcuauccucgguacccaggcguucgcugugugugcagagauaauuggaaggggagcaacaggccgauaguagacauuaacaucaaagacuacucgaucgugucuuccuaugucuguucaggacuggugggcgauacgccccggaagaaugacaguagcuccucuagccauugccuugauccuaacaaugaggaaggugggcacggaguuaaaggcugggcuuucgacgauggcaacgacguguggauggggcgcaccauuucagagaaguugcgaaguggauacgagacauuuaaagucaucgaagguugguccaauccaaacagcaagcugcagauuaauagacaggugauaguagauaggggcaaccggucuggguauucaggaaucuucaguguugagggcaaaagcuguauuaaucguugcuuuuacguggaacuaauccgcgguagaaaggaggaaacugagguccucuggaccuccaacucuaucguggucuucugugggacaucgggcacuuauggaaccggcagcuggcccgacggggccgauauuaaucugaugccuauauga

SEQ ID NO: 143367 - RNA, 1410 nt, Artificial Sequence
  derived and/or modified CDS sequence (opt3) from neuraminidase__InfluenzaA__ABI21082
augaaccccaaucagaagaucauuaccauaggcagcgugucccugacaaucucuacuauuugcuucuuuaugcaaaucgccacgcucauuaccacagucacucuucacuucaaacaguacgaguuuaacucaccuccaaauaaccagguuaugcugugugaaccgaccaucauagagagaaauaucacagaaauuguguauuugaccaacacuacaaucgagaaggaaauuugccccaaauuagcugaguacaggaauuggaguaagccucagugugacaucaccggguucgcaccauuuagcaaagauaacuccauacggcugucugccggaggugacauuuggguaacgcgcgagcccuaugugucgugcgauccugacaaguguuaccaauucgcgcuaggccaggggacuacccucaauaacguccauucaaaugauacagugcacgaccgaacuccauaucguacccugcuuaugaacgaacugggaguucccuuucauuugggcacaaaacaggugugcaucgcuuggagcaguuccucuugucacgaugguaaggccuggcuccaugucugcgugaccggggacgauaagaaugcaacggccagcuucauuuacaacggaagacugguagacuccaucguuucauggaguaaagagauccugaggacucaggaaagcgagugugugugcauuaauggcacauguaccgucgugaugacugauggcucugcuuccgggaaggcagacacaaaaauacucuuuaucgaggaaggaaagauugugcacaccucaacguuaagcgguagugcccaacacgucgaggaaugcucuugcuauccucgguacccaggcguucgcugugugugcagagauaacuggaagggguccaacaggccgaucguagacauaaauauuaaagacuacagcaucgugucgucuuaugucuguuccggacuggugggcgauacaccccggaagaacgacucaaguagcuccucucauugccuugauccuaauaacgaggaaggugggcacggaguuaaaggcugggcuuucgacgauggcaaugacguguggauggggcgcaccaucagcgagaaguugcgaucaggauacgagacuuuuaaagucauugaagguuggaguaacccaaauuccaagcugcagaucaacagacaggugauuguagauaggggcaaucggagcggguauucuggaauauucucaguugagggcaaaaguuguaucaaccguugcuuuuacguggaacuaauucgcgguagaaaggaggaaaccgagguccucuggacaagcaauuccaucguggucuucugugggacuucuggcaccuauggaacaggcucguggcccgacggggccgauaucaaccugaugccuauuuga

SEQ ID NO: 143368 - RNA, 1410 nt, Artificial Sequence; identical to SEQ ID NO: 142784
  derived and/or modified CDS sequence (opt3) from neuraminidase__InfluenzaA__ABI21093

SEQ ID NO: 143369 - RNA, 1410 nt, Artificial Sequence
  derived and/or modified CDS sequence (opt3) from neuraminidase__InfluenzaA__ABI21104
augaaccccaaucagaagaucauuaccauaggcagcgugucccugacaaucucuacuauuugcuucuuuaugcaaaucgccauucucaucacgaccgucacacuucacuucaaacaguacgaguuuaacucaccuccaaauaaccagguuaugcugugugaaccgacuauaaucgagagaaauauuaccgaaaucguguauuuggcuaacacaaccauugagaaggaaaucugccccaaauuagcagaguacaggaauuggaguaagccucagugugacauaacuggguucgccccauuuagcaaagauaacuccauucggcugucugcgggaggugacaucuggguaacacgcgagcccuaugugucgugcgauccugacaaguguuaccaauucgcucuaggccaggggaccacgcucaauaacguccauucaaaugauacugugcacgaccgaaccccauaucguacacugcuuaugaacgaacugggaguucccuuucauuugggcacuaaacaggugugcauugccuggagcaguuccucuugucacgaugguaaggcauggcuccaugucugcgugaccggggacgauaagaaugccacagcuagcuucaucuacaacggaagacugguagacuccaucguuucauggaguaaagagauucugaggacccaggaaagcgagugugugugcauaaauggcacguguacugucgugaugacagauggcucugcauccgggaaggccgacaccaaaauccucuuuauugaggaaggaaagaucgugcacacuucaacauuaagcgguagugcucaacacgucgaggaaugcucuugcuauccucgguacccaggcguucgcugugugugcagagauaacuggaagggguccaacaggccgauaguagacauuaauaucaaagacuacagcaucgugucgucuuaugucuguuccggacuggugggcgauacuccccggaagaacgacucaaguagcuccucucauugccuugauccuaauaacgaggaaggugggcacggaguuaaaggcugggccuucgacgauggcaaugacguguggauggggcgcacgauuagcgagaaguugcgaucaggauacgagaccuuuaaagucaucgaagguuggaguaacccaaauuccaagcugcagauuaacagacaggugauaguagauaggggcaaucggagcggguauucuggaaucuucucaguugagggcaaaaacuguauuaaucguugcuuuuacguggaacuaauccgcgguagaaaggaggaaacagagguccucuggaccaguaacagcaucguggucuucugugggaccuccggcacauauggaacuggcucuuggcccgacggggcggauauuaaucugaugccuauauga

SEQ ID NO: 143370 - RNA, 1410 nt, Artificial Sequence; identical to SEQ ID NO: 142375
  derived and/or modified CDS sequence (opt3) from neuraminidase__InfluenzaA__ABI21115

SEQ ID NO: 143371 - RNA, 1410 nt, Artificial Sequence; identical to SEQ ID NO: 142375
  derived and/or modified CDS sequence (opt3) from neuraminidase__InfluenzaA__ABI21126

SEQ ID NO: 143372 - RNA, 1410 nt, Artificial Sequence; identical to SEQ ID NO: 142784
  derived and/or modified CDS sequence (opt3) from neuraminidase__InfluenzaA__ABI21137

SEQ ID NO: 143373 - RNA, 1410 nt, Artificial Sequence; identical to SEQ ID NO: 142375
  derived and/or modified CDS sequence (opt3) from neuraminidase__InfluenzaA__ABI21148

SEQ ID NO: 143374 - RNA, 1410 nt, Artificial Sequence
  derived and/or modified CDS sequence (opt3) from neuraminidase__InfluenzaA__ABI21159
augaaccccaaucagaagaucauuaccauaggcagcgugucccugacaaucucuacuauuugcuucuuuaugcaaaucgccauucucaucacgaccgucacacuucacuucaaacaguacgaguuuaacucaccuccaaauaaccagguuaugcugugugaaccgacuauaaucgagagaaauauuaccgaaaucguguauuugacaaacaccacuauugagaaggaaaucugccccaaauuagcugaguacaggaauuggaguaagccucagugugacauaacaggguucgcaccauuuagcaaagauaacuccauucggcugucugccggaggugacaucuggguaacccgcgagcccuaugugucgugcgauccugacaaguguuaccaauucgcgcuaggccaggggacgacucucaauaacguccauucaaaugauaccgugcacgaccgaacaccauaucguacucugcuuaugaacgaacugggaguucccuuucauuugggcaccaaacaggugugcauugcuuggagcaguuccucuugucacgaugguaaggccuggcuccaugucugcgugacaggggacgauaagaaugcaaccgccagcuucaucuacaacggaagacugguagacuccaucguuucauggaguaaagagauucugaggacgcaggaaagcgagugugugugcauaaauggcacuuguacagucgugaugaccgauggcucugcuuccgggaaggcagacacuaaaauccucuuuauugaggaaggaaagaucgugcacacaucaaccuuaagcgguagugcccaacacgucgaggaaugcucuugcuauccucgguacccaggcguucgcugugugugcagagauaacuggaagggguccaacaggccgauaguagacauuaauaucaaagacuacagcaucgugucgggauaugucuguucuggccuggugggugauacgccccggaagaacgacuccucaaguagcucccauugccuugauccuaauaacgaggaagggggacacggcguuaaaggcugggcuuucgacgaugggaaugacguguggaugggacgcaccauuucugagaaguugcgaagcgguuacgagacauuuaaagucaucgaaggcuggucaaacccaaauaguaagcugcagauuaacagacaggugauaguagauagggggaaucgguccggauauagcggcaucuucucuguugaggguaaaucauguauuaaccguugcuuuuacguggaacuaauccgcgggagaaaggaggaaacugagguccucuggaccaguaauagcaucguggucuucuguggcacauccggaacuuauggcaccgggucuuggcccgacggagccgauauuaaccugaugccuauauga

SEQ ID NO: 143375 - RNA, 1410 nt, Artificial Sequence; identical to SEQ ID NO: 142375
  derived and/or modified CDS sequence (opt3) from neuraminidase__InfluenzaA__ABI21170

SEQ ID NO: 143376 - RNA, 1410 nt, Artificial Sequence; identical to SEQ ID NO: 142375
  derived and/or modified CDS sequence (opt3) from neuraminidase__InfluenzaA__ABI21181

SEQ ID NO: 143377 - RNA, 1413 nt, Artificial Sequence
  derived and/or modified CDS sequence (opt3) from neuraminidase__InfluenzaA__ABI21192
augaaccccaaucagaagaucauuaccauaggcagcaucuccauugccaucgggauuaucucucugaugcuccaaauaggaaacaucauuucaaucugggcuagucacagcauucagacagguucccagaaucauacuggcacgugcaaccagagaaucauaaccuacgaaaauucuacaugggugaaccacacuuaugucaauauuaacaauaccaacguuguggcagggaaagacaagacaucgguaacccuugccggaaauucaagccuguguaguaucuccggcugggcgauuuacacuaaagauaacucuaucaggaucgguagcaagggggacguguucgucauucgggagccuuuuauauccugcucacauuuggagugucgcacauucuuuuuaacccaaggagcucugcuaaaugauaaacacaguaacggcacggugaaggaccgaagcccauaucgugcccucaugucuugcccgcugggcgaagcacccuccccuuacaauucaaaguucgagagcguugccuggagugcuucugcaugucaugaugggaugggauggcuuacuaucgguauuuccggcccagacaacggggccguggcuguccugaaauauaacggaaucauaaccgaaacaauuaagagcuggagaaaaaggaucuugcggacucaggagucggagugcguguguguaaauggcucuugcuuuaccaucaugacagauggucccuccaacggggccgcgucauacaagauuuucaaaaucgaaaagggaaagguuaccaaaaguauugagcucaaugcaccuaacuuucacuaugaagaguguagcugcuacccagacacgggcacugugaugugugucugccgcgauaauuggcacggcuccaacagacccugggugucuuucaaucagaaccuggacuaccagauaggguauaucugcagcggaguguuuggugauaauccuaggccaaaggacggcaaagggucauguaacccggucacaguugauggagccgacggcgugaaggguuucaguuacaaauaugggaauggcguauggauuggacggaccaaguccaaccgccugcgaaaaggcuuugagaugaucugggaccccaauggguggacugauacagacagcgauuucucugugaagcaagacgucguggcuaucaccgauuggucaggauacagugguagcuuuguucagcauccugaacucacgggcuuagacugcauuagaccauguuucuggguggagcuggucagggggcuuccccgggaaaacaccacaauauggacuuccggaucuucgaucagcuucugcggcguggauuccgacaccgccaauuggucauggccugauggugcagaguugccauuuauuaucgacaaguga

SEQ ID NO: 143378 - RNA, 1413 nt, Artificial Sequence; identical to SEQ ID NO: 142434
  derived and/or modified CDS sequence (opt3) from neuraminidase__InfluenzaA__ABI21203

SEQ ID NO: 143379 - RNA, 1413 nt, Artificial Sequence
  derived and/or modified CDS sequence (opt3) from neuraminidase__InfluenzaA__ABI21214
augaaccccaaucagaagaucauuaccauaggcagcaucuccauugccaucgggauuaucucucugaugcuccaaauaggaaacaucauuucaaucugggcuagucacagcauucagacagguucccagaaucauacuggcaucugcaaccagagaauaauuacguacgaaaauucuaccugggugaaccacacauaugucaauaucaacaauacuaacguuguggcagggaaagacauuaccucgguaacacuugccggaaauucaagccuguguaguaucuccggcugggcgaucuacaccaaggauaacucuauuaggauagguagcaaaggggacguguucgucauccgggagccuuuuauuuccugcucacauuuggagugucgcacuuucuuuuuaacacaaggagcucugcuaaaugauaagcacaguaacggcaccgugaaagaccgaagcccauaucgugcccucaugucuugcccgcugggcgaagcacccuccccuuacaauucaaaguucgagagcguugccuggagugcuucugcaugucaugaugggaugggauggcuuacgaucgguauauccggcccagacaacggggccguggcuguccugaaguauaacggaauuaucacugaaaccaucaaaagcuggaagaaaagaauuuugaggacacaggagucggagugcguguguguaaauggcucuugcuuuacuaucaugaccgauggucccuccaacggggccgcgucauacaagauuuucaaaauagaaaagggaaagguuacaaaaaguaucgagcucaaugcaccuaacuuucacuaugaagaguguagcugcuacccagacaccggcacggugaugugugucugccgggauaauuggcacggcuccaaccgccccugggugucuuucaaucagaaccuggacuaccagauuggguauaucugcagcggaguguuuggugauaauccuagaccaaaggacggcaaagggucauguaacccggucacuguugauggagccgacggcgugaaggguuucaguuacaaauaugggaauggcguauggaucggaaggacaaaguccaaccggcugcgcaaaggcuuugagaugauuugggaccccaauggguggaccgauacugacagcgauuucucugugaagcaagacgucguggcuauaacagauuggucaggauacagugguagcuuuguucagcauccugaacucaccggcuuagacugcauccgaccauguuucuggguggagcuggucagagggcuucccagggaaaacacgaccauuuggacauccggaucuucgaucagcuucugcggcguggauuccgacacugccaauuggucauggccugauggugcagaguugccauuuaccauugacaaguga

SEQ ID NO: 143380 - RNA, 1410 nt, Artificial Sequence
  derived and/or modified CDS sequence (opt3) from neuraminidase__InfluenzaA__ABI21247
augaaccccaaucagaagaucauuaccauaggcagcgugucccugacaaucgccacuauuugcuuccucaugcaaaucgcuauucuugucacgaccguuacacugcacuuuaaacaguacgaguguaacucuccuccaaauaaccaggugauguugugcgaaccgacuaucauagagagaaauaucaccgaaauuguauauuuaacaaacaccacuaucgagaaggaaaaaugucccaagcuggcagaguacaggaauuggucaaaaccucagugcaagauuacaggguucgccccauuuaguaaggacaacagcauccggcuauccgcgggaggugauauaugggugacccgcgagcccuaugucucuugugacccuggcaaaugcuaccaauucgcucucgggcagggaacgacucugaauaaccgacauucgaaugauaccgugcacgaccguacaccauauagaacucuucugaugaacgaauugggcguucccuuucaucucgguaccaaacagguguguauugccuggucaagcaguuccugccacgaugggaaggcauggcugcaugucugugugacaggacacgacgagaaugccaccgcuucuuucaucuacgauggcaggcugguagacagcauuggcuccuggucaaagaacauccuccggacgcaggaaagugagugcguuuguaucaaugggacuugcacaguggucaugaccgauggaagcgcaucugagcgcgccgacacuaaaauuuuauuuauagaagaggguaagaucgugcacauuuccccucugucaggcagcgcucaacauguggaagagugcaguuguuauccaagauacccgggggucaggugcguuugucgggauaacuggaagggaucuaaccgccccaucguggacauaaauguaaaagaucacuccauugugagcucguacgucugcucuggccuugugggugacacaccucgaaagaacgacuccucaaguagcuccuauuguagaaauccaaacaaugaaaaagggucucauggaaugaagggcugggccuucgaugacggcaacgauguuuggauggggaggaccaucagcgaggaguugcggucaggauacgaaacguuuaaagugaucgguggcuggaguaagcccaauuccaaacugcagauuaaccgucaggucaucguggaccgcgggaauagaagcggauauucuggcauuuucucaguagaggguaagaguugcauaaacagguguuuuuacguugaacuaauccgggggcgaaagcaggagaccgaagugugguggacaagcaauuccauugucguguucugcggcacuucuggaaccuauggcacagggucguggccugauggagcggacaucaaccucaugccaaucuga

SEQ ID NO: 143381 - RNA, 1410 nt, Artificial Sequence; identical to SEQ ID NO: 143301
  derived and/or modified CDS sequence (opt3) from neuraminidase__InfluenzaA__ABI21258

SEQ ID NO: 143382 - RNA, 1410 nt, Artificial Sequence; identical to SEQ ID NO: 143301
  derived and/or modified CDS sequence (opt3) from neuraminidase__InfluenzaA__ABI21269

SEQ ID NO: 143383 - RNA, 1410 nt, Artificial Sequence; identical to SEQ ID NO: 143301
  derived and/or modified CDS sequence (opt3) from neuraminidase__InfluenzaA__ABI21280

SEQ ID NO: 143384 - RNA, 1410 nt, Artificial Sequence; identical to SEQ ID NO: 143233
  derived and/or modified CDS sequence (opt3) from neuraminidase__InfluenzaA__ABI21302

SEQ ID NO: 143385 - RNA, 1410 nt, Artificial Sequence; identical to SEQ ID NO: 143233
  derived and/or modified CDS sequence (opt3) from neuraminidase__InfluenzaA__ABI21313

SEQ ID NO: 143386 - RNA, 1410 nt, Artificial Sequence; identical to SEQ ID NO: 143233
  derived and/or modified CDS sequence (opt3) from neuraminidase__InfluenzaA__ABI21324

SEQ ID NO: 143387 - RNA, 1410 nt, Artificial Sequence; identical to SEQ ID NO: 143233
  derived and/or modified CDS sequence (opt3) from neuraminidase__InfluenzaA__ABI21335

SEQ ID NO: 143388 - RNA, 1410 nt, Artificial Sequence; identical to SEQ ID NO: 143301
  derived and/or modified CDS sequence (opt3) from neuraminidase__InfluenzaA__ABI21346

SEQ ID NO: 143389 - RNA, 1410 nt, Artificial Sequence
  derived and/or modified CDS sequence (opt3) from neuraminidase__InfluenzaA__ABI21357
augaaccccaaucagaagaucauuaccauaggcagcgugucccugacaaucgccacuauuugcuuccucaugcaaaucgcuauucuugucacgaccguuacacugcacuuuaaacaguacgaguguaacucuccuccaaauaaccaggugauguugugcgaaccgacuaucauagagagaaauaucaccgaaauuguauauuuaacaaacaccacuaucgagaaggaaauuugucccaaacuggcagaguacaggaauuggucaaagccucagugcaaaaucacaggguucgccccauuuaguaaggacaacagcauacggcuauccgcgggaggugauauuugggugacccgcgagcccuaugucucuugugacccuggcaagugcuaccaauucgcucucgggcagggaacgacucugaauaaccgacauucgaaugauaccgugcacgaccguacaccauauagaacucuucugaugaacgaauugggcguucccuuucaucucgguaccaaacagguguguaucgccuggucaagcaguuccugccacgaugggaaggcauggcugcaugucugugugacaggacacgacgagaaugccaccgcuucuuucauuuacgauggcaggcugguagacagcaucggcuccuggaguaaaaacauccuccggacgcaggaaucagagugcguuuguauuaaugggacuugcacaguggucaugaccgauggaagcgcaucugagcgcgccgacacuaagauauuauuuaucgaagaggguaaaauugugcacaucuccccucugucaggcagcgcucaacauguggaagagugcaguuguuauccaagauacccgggggucaggugcguuugucgggauaacuggaagggaucuaaccgccccauaguggacauuaauguaaagaacuacuccaucgugagcucguaugucugcucuggccuugugggugauacaccucgaaagaaugacuccucaaguagcuccuacuguagaaacccaaauaacgaaaaagggucucacggaguuaaaggcugggccuucgacgauggcaaugacguguggauggggaggaccaucagcgaggaguugcggucaggauaugaaacguuuaaggucauugguggcuggaguaaacccaacuccaagcugcagaucaaucgucaggugauuguagaucgcgggaacagaagcggauacucuggcauauucucaguugaggguaaaaguugcaucaauagguguuuuuauguggaacuaauucgggggcgaaagcaggaggcggaagucugguggaccagcaacuccaucguggucuucugcggcacaucuggaacuuacggcaccgggucguggccugacggagcagauaucaaucucaugccaauuuga

SEQ ID NO: 143390 - RNA, 1410 nt, Artificial Sequence; identical to SEQ ID NO: 143233
  derived and/or modified CDS sequence (opt3) from neuraminidase__InfluenzaA__ABI21368

SEQ ID NO: 143391 - RNA, 1410 nt, Artificial Sequence; identical to SEQ ID NO: 143233
  derived and/or modified CDS sequence (opt3) from neuraminidase__InfluenzaA__ABI21379

SEQ ID NO: 143392 - RNA, 1410 nt, Artificial Sequence; identical to SEQ ID NO: 143233
  derived and/or modified CDS sequence (opt3) from neuraminidase__InfluenzaA__ABI21390

SEQ ID NO: 143393 - RNA, 1410 nt, Artificial Sequence; identical to SEQ ID NO: 143301
  derived and/or modified CDS sequence (opt3) from neuraminidase__InfluenzaA__ABI21401

SEQ ID NO: 143394 - RNA, 1410 nt, Artificial Sequence
  derived and/or modified CDS sequence (opt3) from neuraminidase__InfluenzaA__ABI21412
augaaccccaaucagaagaucauuaccauaggcagcgugucccugacaaucgccacuauuugcuuccucaugcaaaucgcuauucuugucacgaccguuacacugcacuuuaaacaguacgaguguaacccuccaccgaauaaccaggugauguugugcgaacccacuaucauagagagaaauaucaccgaaauuguauauuuaacaaacaccacuaucgagaaggaaauuuguccuaaacuggcagaguacaggaauuggucuaagccacagugcaaaaucacaggguucgcccccuuuucaaaggacaacaguauacggcuaagcgcgggaggugauauuugggugacccgcgagccuuaugucuccugugacccaggcaagugcuaccaauucgcucucgggcagggaacgacucugaauaaccgacauucuaaugauaccgugcacgaccguacacccuauagaacucuucugaugaacgaauugggcguuccuuuucaucucgguaccaaacagguguguaucgccuggucgucaagcaguugccacgaugggaaggcauggcugcaugucugugugacaggacacgacgagaaugccaccgcuuccuucauuuacgauggcaggcugguagacucuaucggcagcugguccaaaaacauccuccggacgcaggaaucagagugcguuuguauuaaugggacuugcacaguggucaugaccgauggaagugcaagcgagcgcgccgacacuaagauauuauuuaucgaagaggguaaaauugugcacaucucuccacuguccggcucagcucaacauguggaagagugcagcuguuauccgagauaccccggggucaggugcguuugucgggauaacuggaagggaaguaaccgcccuauaguggacauuaauguaaaggauuacucuaucguguccagcuaugucugcucgggccuugugggugacacaccacgaaagaacgacucuuccucaaguagcuacuguagaaaucccaacaaugaaaaagggucccacggaguuaaaggcugggccuucgaugacggcaacgauguguggauggggaggaccaucucugaggaguugcggagcggauaugaaacguuuaaggucauugguggcuggucaaaaccuaauaguaagcugcagaucaaccgucaggugauuguagaccgcgggaauagauccggauacagcggcauauucucuguugaggguaaaucaugcaucaacagguguuuuuauguggaacuaauucgggggcgaaagcaggagaccgaagucugguggacaaguaauagcaucguggucuucugcggcacuuccggaaccuacggcacagggucuuggccagauggagcggacaucaaccucaugcccauuuga

SEQ ID NO: 143395 - RNA, 1410 nt, Artificial Sequence; identical to SEQ ID NO: 142567
  derived and/or modified CDS sequence (opt3) from neuraminidase__InfluenzaA__ABI21423

SEQ ID NO: 143396 - RNA, 1410 nt, Artificial Sequence; identical to SEQ ID NO: 143233
  derived and/or modified CDS sequence (opt3) from neuraminidase__InfluenzaA__ABI21434

SEQ ID NO: 143397 - RNA, 1410 nt, Artificial Sequence; identical to SEQ ID NO: 143301
  derived and/or modified CDS sequence (opt3) from neuraminidase__InfluenzaA__ABI21445

SEQ ID NO: 143398 - RNA, 1410 nt, Artificial Sequence; identical to SEQ ID NO: 143301
  derived and/or modified CDS sequence (opt3) from neuraminidase__InfluenzaA__ABI21456

SEQ ID NO: 143399 - RNA, 1410 nt, Artificial Sequence; identical to SEQ ID NO: 143394
  derived and/or modified CDS sequence (opt3) from neuraminidase__InfluenzaA__ABI21467

SEQ ID NO: 143400 - RNA, 1410 nt, Artificial Sequence; identical to SEQ ID NO: 143301
  derived and/or modified CDS sequence (opt3) from neuraminidase__InfluenzaA__ABI21478

SEQ ID NO: 143401 - RNA, 1410 nt, Artificial Sequence; identical to SEQ ID NO: 143301
  derived and/or modified CDS sequence (opt3) from neuraminidase__InfluenzaA__ABI21489

SEQ ID NO: 143402 - RNA, 1410 nt, Artificial Sequence; identical to SEQ ID NO: 143301
  derived and/or modified CDS sequence (opt3) from neuraminidase__InfluenzaA__ABI21500

SEQ ID NO: 143403 - RNA, 1410 nt, Artificial Sequence
  derived and/or modified CDS sequence (opt3) from neuraminidase__InfluenzaA__ABI21511
augaaccccaaucagaagaucauuaccauaggcagcgugucccugacaaucgccacuauuugcuuccucaugcagaucgcuauucuugucacgaccguuacacugcacuuuaaacaguacgaguguaacucuccuccaaauaaccaggugauguugugcgaaccggcaaucauagagagaaauaucacugaaauuguauauuuaaccaacacaaccaucgagaaggaaaugugucccaaacuggccgaguacaggaauuggucaaagccucagugcaacauuacuggguucgcgccauuuaguaaagacaauagcauccggcuauccgcuggaggugauauaugggugacacgcgagcccuaugucucuugugacccugauaagugcuaccaauucgcccucggccaggggaccacgcugaacaauggacauucgaacgacacugugcacgaucgaaccccauaucguacacuucugaugaaugaauugggcguucccuuucaucucgguacuagacagguguguauugcauggucaagcaguuccugccacgacgggaaggccuggcugcaugucugugugaccggagaugacgagaacgcuacagcaucuuucaucuacgauggcaggcugguagacagcauuggcuccuggaguaaaaagauccuccggacccaggaaucagagugcguuuguaucaaugggacgugcacuguggucaugacagauggaagcgccucugguaaagcugacaccaagauuuuauuuauagaggaaggcaaaaucgugaacauuuccacucugucagggagcgcccaacacguggaggaaugcaguuguuauccucgcuacccaggagucagaugcguuuguagggauaacuggaagggcucuaaucggccgaucguggacauaaacguaaaggacuacuccauugugagcucguaugucugcucuggucuugugggggauacaccccgcaaaaaugacuccuucucaaguagccacuguuuggauccuaacaaugaggaaggaggccauggcguuaaggggugggcguuugacgauggaaacgacguguggaugggucgaaccaucuccgagaaacugagaucuggcuacgagacguucaaggucaucgaaggguggagcaaaccaaauucaaagcuacagauuaacaggcaagugaucguagagcggggaaaucguaguggcuauuccgguauuuuuagcguugaagggaaaucuugcauaaaccgcuguuucuacguggagcucaucagaggcaggaaggaagagaccgaggucugguggacaucaaauaguauuguggucuuuugcggaacuagcggcaccuaugggacaggauccuggcccgauggugcagacaucaaccugaugccuaucuga

SEQ ID NO: 143404 - RNA, 1413 nt, Artificial Sequence
  derived and/or modified CDS sequence (opt3) from neuraminidase__InfluenzaA__ABI21533
augaaccccaaucagaagaucauuaccauaggcagcaucuccauugccaucgggauuaucucucugaugcuccaaauaggaaacaucauuucaaucugggcuagucacagcauucagacagguucccagaaucauacuggcaucugcaaccagagaauaauuacguacgaaaauucuaccugggugaaccacacauaugugaauaucaacaauacuaacguuguggcagggaaagacaagaccucgguaacacuugccggaaauucaagccuguguaguauuuccggcugggcgaucuacaccaaagauaacucuaucaggauugguagcaagggggacguguucgucaugcgggagccuuuuauauccugcucacauuuggagugucgcacuuucuuuuuaacacaaggagcucugcuaaaugauaaacacaguaacggcaccgugaaggaccgaagcccauaucgugcccucaugucuugcccgcugggcgaagcacccuccccuuacaauucaaaguucgagagcguugccuggagugcuucugcaugucaugaugggaugggauggcuuacgaucgguauuuccggcccagacaacggggccguggcuguccugaaauauaacggaaucauaacugaaaccauuaagagcuggaaaaagagaaucuugaggacacaggagucggagugcguguguguaaauggcucuugcuuuacuaucaugaccgauggucccuccaacggggccgcgucauacaaaauuuucaagaucgaaaagggaaaaguuauuaagaguauagagcucaaugcaccuaacagccacuaugaagaguguuccugcuacccagacacaggcaccgugaugugugucugccgggauaauuggcacggcucuaaccgccccugggugagcuuuaaucagaaccuggacuaccagaucggguauauuugcucaggaguguucggugauaauccuagaccaaaagacggcgaggggaguuguaacccggucacgguugauggagccgacggcgugaaggguuuuuccuacaaauaugggaauggcguauggaucggaaggacuaagagcaaccggcugcgcaaaggcuucgaaaugaucugggaccccaauggguggacagauaccgacucugauuuuucagugaagcaagacgucguggcuauuacugauuggaguggauacagcgguuccuucguucagcauccugagcucacaggcuuagacugcauacgaccauguuuuuggguggaacuggucagagggaggccccgggagaacaccacgaucuggaccucuggaucgagcauuuccuucugcggcgucaauucagauacagccaacuggaguuggccugacggugcagaacuuccauucacuaucgauaaguga

SEQ ID NO: 143405 - RNA, 1413 nt, Artificial Sequence; identical to SEQ ID NO: 143404
  derived and/or modified CDS sequence (opt3) from neuraminidase__InfluenzaA__ABI21544

SEQ ID NO: 143406 - RNA, 1413 nt, Artificial Sequence; identical to SEQ ID NO: 143404
  derived and/or modified CDS sequence (opt3) from neuraminidase__InfluenzaA__ABI21555

SEQ ID NO: 143407 - RNA, 1413 nt, Artificial Sequence; identical to SEQ ID NO: 143404
  derived and/or modified CDS sequence (opt3) from neuraminidase__InfluenzaA__ABI21566

SEQ ID NO: 143408 - RNA, 1413 nt, Artificial Sequence; identical to SEQ ID NO: 143404
  derived and/or modified CDS sequence (opt3) from neuraminidase__InfluenzaA__ABI21577

SEQ ID NO: 143409 - RNA, 1413 nt, Artificial Sequence
  derived and/or modified CDS sequence (opt3) from neuraminidase__InfluenzaA__ABI22112
augaaccccaaucagaagaucauuaccauaggcagcaucuccauugccaucgggauuaucucucugaugcuccaaauaggaaacaucauuucaaucugggcuagucacagcauucagacagguucccagaaucauacuggcaucugcaaccagagaauaauuacguacgagaauagcaccugggugaaccacacauaugucaauaucaacaauacuaacguuguggcagggaaagacaagaccucgguaacacuugccggaaauucaagccuguguaguauuuccggcugggcgaucuacaccaaagauaacucuaucaggauugguagcaagggggacguguucgucauacgggaaccuuuuaucuccugcucacauuuggagugucgcacuuucuuuuuaacacaaggagcucugcuaaaugauaaacacaguaacggcaccgugaaggaccgaagcccauaucgugcccucaugucuugcccgcugggcgaagcacccuccccuuacaauucaaaguucgagagcguugccuggagugcuucugcaugucaugaugggaugggauggcuuacgauugguaucuccggcccagacaacggggccguggcuguccugaaauauaacgaaauaauuacugagaccaucaagagcuggaaaaagagaaucuugaggacacaggagucggaaugcguguguguaaauggaucuugcuuuacuauuaugaccgauggccccuccaacggugccgcgucauacaaaaucuucaagauugagaaggggaaaguuacaaagaguauagaacucaaugcaccuaacuuucacuaugaggaguguagcugcuacccagacaccggaacggugaugugugucugccgggauaauuggcacggcuccaaccgccccugggugucuuucaaucagaaccuggacuaccagaucggcuauauuugcagcgggguguuuggagauaauccuagaccaaaagacgguaagggcucauguaacccggucacuguugauggggccgacggagugaaaggcuucaguuacaaguaugguaaugggguauggaucggcaggacaaaauccaaccggcugcgcaagggauuugaaaugaucugggaccccaauggcuggaccgauacugacagcgauuucucugugaagcaagacgucguggcuauuacagauuggucaggguacaguggaucuuuuguucagcauccugagcucaccgguuuagacugcauacgaccauguuucuggguggaacuggucagaggccuucccagggagaacacgaccaucuggacauccgggucuucgauuagcuucugcggaguggauuccgacacugccaauuggucauggccugauggcgcagaauugccauuuaccaucgacaaauga

SEQ ID NO: 143410 - RNA, 1410 nt, Artificial Sequence
  derived and/or modified CDS sequence (opt3) from neuraminidase__InfluenzaA__ABI22162
augaaccccaaucagaagaucauuaccauaggcagcgugucccugacaaucucuacuauuugcuucuuuaugcaaaucgccauucucaucacgaccgucacacuucacuucaaacaguacgaguuuaacucaccuccaaauaaccagguuaugcugugugaaccgacuauaaucgagagaaauauuaccgaaaucguguauuugacaaacaccacuauugagaaggaaaucugccccaaauuagcugaguacaggaauuggaguaagccucaguguaacauaacaggguucgcaccauuuagcaaagacaauuccauucggcugucugccggaggugauaucuggguaacccgcgagcccuaugugucgugcgacccugauaaguguuaccaauucgcgcuaggccaggggacgacucucaacaauguccauucaaacgacaccgugcacgaucgaacaccauaucguacucugcuuaugaaugaacugggaguucccuuucauuugggcaccaaacaggugugcauugcuuggagcaguuccucuugucacgacgguaaggccuggcuccaugucugcgugacaggggaugacaagaacgcaaccgccagcuucaucuacaauggaagacugguagauuccaucguuucauggaguaaagagauucugaggacgcaggaaagcgagugugugugcauaaacggcacuuguacagucgugaugaccgacggcucugcuuccgggaaggcagauacuaaaauccucuuuauugaggaaggaaagaucgugcacacaucaaccuuaagcgguagugcccaacacgucgaggaaugcucuugcuauccucgguacccaggcguucgcugugugugcagagacaacuggaagggguccaauaggccgauaguagauauuaacaucaaagacuacagcaucgugucgucuuaugucuguuccggacuggugggcgacacgccccggaagaaugauucaaguagcuccucucauugccuugacccuaacaaugaggaaggugggcacggaguuaaaggcugggcuuucgaugacggcaacgauguguggauggggcgcaccauuagcgagaaguugcgaucaggauacgagacauuuaaagucaucgaagguuggaguaauccaaacuccaagcugcagacuaauagacaggugauuguagacaggggcaaccggagcggguauucuggaauauucucaguugagggcaaaaguuguaucaaucguugcuuuuacguggaacuaauucgcgguagaaaggaggaaaccgagguccucuggacaagcaacuccaucguggucuucugugggacuucuggcaccuauggaacaggcucguggcccgauggggccgacaucgaucugaugccuauuuga

SEQ ID NO: 143411 - RNA, 1350 nt, Artificial Sequence
  derived and/or modified CDS sequence (opt3) from neuraminidase__InfluenzaA__ABI23981
augaaccccaaucagaagaucauuaccauaggcagcaucugcauggugauugggaucgucucccugaugcuccaaauuggaaacaugaucucuauauggguuucacacaguauccagacagguaaucagagacaggccgagagcauuuccaacacuaaauuccuuacggaaaaggcuguggcaucuguaacccuggccggcaauucgucauuguguccuaucagcgggugggcgguguacaguaaagacaacuccauuaggaucggaucucggggcgaugucuuugugauacgcgagccauucauuagcugcucccauuuagaaugucgaacauuuuuccugacucaaggugcucuacucaaugacaagcacucaaacgggaccguuaaagaucguaguccguauagaacacugaugagcucucccgugggagaggccccuuccccauacaauucaagguuugaaagcgucgcauggagugccucugcuugccaugacggcaccuccuggcuuacuaucggcauuagcgggcccgauaacggagcaguggccguacugaaguauaaugguaucaucacagacaccauuaagucguggcggaacaauauauugcgcacgcaggagucugagugugcuugcguuaacggcuccuguuucacugugaugaccgaugggccuucaaauggacaggccaguuacaaaaucuuuaagauggaaaaaggcaaggucgugaaaagcguggagcucgacgcgccaaacuaucacuacgaagagugcuccuguuaucccgaugccggugagauuacaugcgucuguagagacaacuggcaugggucuaauaggccuuggguuagcuucaaccagaaucuggaauaccaaaucggauacauaugcucaggcguguuuggcgauaacccacggccgaaugacgggacuggaaguugcggucccguaucccugaacggcgcauauggggugaagggauucagcuuuaaguacggcaauggugucuggauugggcgcaccaaaucuacaaacucacgaaguggcuucgagaugaucugggauccuaauggauggaccggcacggacagcuccuuuucugugaagcaggacaucguugcuauuacugauuggucgggguauagcggauccuucgugcagcacccagaacucacagguuuagacuguaucagacccugcuucugggucgagcugauuaggggccggccuaaagaaucaaccauauggacaagugggucuagcaucuccuuuuguggagugaacucagauacuguaagcuggucuuggccagacggcgccgagcuucccuucaccauugauaaguga

SEQ ID NO: 143412 - RNA, 1410 nt, Artificial Sequence; identical to SEQ ID NO: 142375
  derived and/or modified CDS sequence (opt3) from neuraminidase__InfluenzaA__ABI26649

SEQ ID NO: 143413 - RNA, 1413 nt, Artificial Sequence; identical to SEQ ID NO: 143098
  derived and/or modified CDS sequence (opt3) from neuraminidase__InfluenzaA__ABI30370

SEQ ID NO: 143414 - RNA, 1410 nt, Artificial Sequence; identical to SEQ ID NO: 143149
  derived and/or modified CDS sequence (opt3) from neuraminidase__InfluenzaA__ABI30392

SEQ ID NO: 143415 - RNA, 1410 nt, Artificial Sequence; identical to SEQ ID NO: 142778
  derived and/or modified CDS sequence (opt3) from neuraminidase__InfluenzaA__ABI30403

SEQ ID NO: 143416 - RNA, 1410 nt, Artificial Sequence; identical to SEQ ID NO: 142778
  derived and/or modified CDS sequence (opt3) from neuraminidase__InfluenzaA__ABI30414

SEQ ID NO: 143417 - RNA, 1410 nt, Artificial Sequence; identical to SEQ ID NO: 142375
  derived and/or modified CDS sequence (opt3) from neuraminidase__InfluenzaA__ABI30425

SEQ ID NO: 143418 - RNA, 1410 nt, Artificial Sequence; identical to SEQ ID NO: 142375
  derived and/or modified CDS sequence (opt3) from neuraminidase__InfluenzaA__ABI30436

SEQ ID NO: 143419 - RNA, 1410 nt, Artificial Sequence; identical to SEQ ID NO: 142375
  derived and/or modified CDS sequence (opt3) from neuraminidase__InfluenzaA__ABI30447

SEQ ID NO: 143420 - RNA, 1410 nt, Artificial Sequence; identical to SEQ ID NO: 142375
  derived and/or modified CDS sequence (opt3) from neuraminidase__InfluenzaA__ABI30458

SEQ ID NO: 143421 - RNA, 1410 nt, Artificial Sequence; identical to SEQ ID NO: 142375
  derived and/or modified CDS sequence (opt3) from neuraminidase__InfluenzaA__ABI30469

SEQ ID NO: 143422 - RNA, 1410 nt, Artificial Sequence; identical to SEQ ID NO: 142375
  derived and/or modified CDS sequence (opt3) from neuraminidase__InfluenzaA__ABI30480

SEQ ID NO: 143423 - RNA, 1410 nt, Artificial Sequence
  derived and/or modified CDS sequence (opt3) from neuraminidase__InfluenzaA__ABI30491
augaaccccaaucagaagaucauuaccauaggcagcgugucccugacaaucucuacuauuugcuucuuuaugcaaaucgccauucucaucacgaccgucacacuucacuucaaacaguacgaguuuaacucaccuccaaauaaccagguuaugcugugugaaccgacuauaaucgagagaaauauuaccaagaucguguauuugacaaacaccacuauugaaaaagagaucugccccaaguuagcugaauacaggaauuggaguaaaccucagugugacauaacaggguucgcaccauuuagcaaggauaacuccauucggcugucugccggaggugacaucuggguaacccgcgagcccuaugugucgugcgauccugacaaguguuaccaauucgcgcuaggccaggggacgacucucaauaacguccauucaaaugauaccgugcacgaccgaacaccauaucguacucugcuuaugaacgagcugggaguucccuuucauuugggcaccaaacaggugugcauugcuuggagcaguuccucuugucacgaugguaaggccuggcuccaugucugcgugacaggggacgauaaaaaugcaaccgccagcuucaucuacaacggaagacugguagacuccaucguuucauggaguaaggaaauucugaggacgcaggagagcgaaugugugugcauaaauggcacuuguacagucgugaugaccgauggcucugcuuccgggaaagcagacacuaagauccucuuuauugaggagggaaagaucgugcacacaucaaccuuaagcgguagugcccaacacgucgaagagugcucuugcuauccucgguacccaggcguucgcugugugugcagagauaacuggaaaggguccaacaggccgauaguagacauuaauaucaaggacuacagcaucgugucgucuuaugucuguuccggacuggugggcgauacgccccggaaaaacgacucaaguagcuccucucauugccuugauccuaauaacgaagagggugggcacggaguuaagggcugggcuuucgacgauggcaaugacguguggauggggcgcaccauuagcgaaaaauugcgaucaggauacgagacauuuaaggucaucgaggguuggaguaacccaaauuccaaacugcagauuaacagacaggugauaguagauaggggcaaucggagcggguauucuggaaucuucucaguugaaggcaagaguuguauuaaccguugcuuuuacguggagcuaauccgcgguagaaaggaagagacugaaguccucuggaccagcaauuccaucguggucuucugugggacaucuggcacuuauggaaccggcucguggcccgacggggccgauauuaaccugaugccuauauga

SEQ ID NO: 143424 - RNA, 1410 nt, Artificial Sequence; identical to SEQ ID NO: 142375
  derived and/or modified CDS sequence (opt3) from neuraminidase__InfluenzaA__ABI30502

SEQ ID NO: 143425 - RNA, 1410 nt, Artificial Sequence
  derived and/or modified CDS sequence (opt3) from neuraminidase__InfluenzaA__ABI30513
augaaccccaaucagaagaucauuaccauaggcagcgugucccugacaaucucuacuauuugcuucuuuaugcaaaucgccauucucaucacgaccgucacacuucacuucaaacaguacgaguuuaacucaccuccaaauaaccagguuaugcugugugaaccgacuauaaucgagagaaauauuaccgaaaucguguauuugacaaacaccacuauugagaaggaaaucugccccaaauuagcugaguacaggaauuggaguaagccucagugugacauaacaggguucgcaccauuuagcaaagauaacuccauucggcugucugccggaggugacaucuggguaacccgcgagcccuaugugucgugcgauccugacaaguguuaccaauucgcgcuaggccaggggacgacucucaauaacguccauucaaaugauaccgugcacgaccgaacaccauaucguacucugcuuaugaacgaacugggaguucccuuucauuugggcaccaaacaggugugcauugcuuggagcaguuccucuugucacgaugguaaggccuggcuccaugucugcgugacaggggacgauaagaaugcaaccgccagcuucaucuacaacggaagacugguagacuccaucguuucauggaguaaagagauucugaggacgcaggaaagcgagugugugugcauaaauggcacuuguacagucgugaugaccgauggcucugcuuccgggaaggcagacacuaaaauccucuuuauugaggaaggaaagaucgugcacacaucaaccuuaagcgguagugcccaacacgucgaggaaugcucuugcuauccucgguacccaggcguucgcugugugugcagagauaacuggaagggguccaacaggccgauaguagacauuaauaucaaagacuacagcaucgugucgucuuaugucuguuccggacuggugggcgauacgccccggaagaacgacucaaguagcuccucucauugccuugauccuaauaacgaggaaggugggcacggaguuaaaggcugggcuuucgacgauggcaaugacguguggauggggcgcaccauuagcgagaaguugcgaucaggauacgagacauuuaaagucaucgaagguuggaguaacccaaauuccaagcugcagacuaacagacaggugauuguagauaggggcaaucggagcggguauucuggaauauucucaguugagggcaaaaguuguaucaaccguugcuuuuacguggaacuaauucgcgguagaaaggaggaaaccgagguccucuggacaagcaauuccaucguggucuucugugggacuucuggcaccuauggaacaggcucguggcccgacggggccgauaucaaccugaugccuauuuga

SEQ ID NO: 143426 - RNA, 1410 nt, Artificial Sequence; identical to SEQ ID NO: 142375
  derived and/or modified CDS sequence (opt3) from neuraminidase__InfluenzaA__ABI30524

SEQ ID NO: 143427 - RNA, 1410 nt, Artificial Sequence; identical to SEQ ID NO: 142375
  derived and/or modified CDS sequence (opt3) from neuraminidase__InfluenzaA__ABI30535

SEQ ID NO: 143428 - RNA, 1410 nt, Artificial Sequence
  derived and/or modified CDS sequence (opt3) from neuraminidase__InfluenzaA__ABI30546
augaaccccaaucagaagaucauuaccauaggcagcgugucccugacaaucucuacuauuugcuucuuuaugcaaaucgccauucucaucacgaccgucacacuucacuucaaacaguacgaguuuaacucaccuccaaauaaccagguuaugcugugugaaccgacuauaaucgagagaaauauuaccgaaaucguguauuugacaaacaccacuauugagaaggaaaucugccccaaauuagcugaguacaggaauuggaguaagccucagugugacauaacaggguucgcaccauuuagcaaagauaacuccauucggcugucugccggaggugacaucuggguaacccgcgagcccuaugugucgugcgauccugacaaguguuaccaauucgcgcuaggccaggggacgacucucaauaaccugcauucaaaugauaccguccacgaccgaacaccauaucguacucuucugaugagcgaauugggagugcccuuucaucucggcaccaagcagguuugcauugcuuggaguuccucuagcugucacgaugguaaagccuggaugcaugugugcgucacaggggacgauaagaacgcaaccgccuccuucaucuacaauggaagacugguggacucaaucguaaguuggagcaaagagauucugaggacgcaggaaucugaguguguuugcauaaacggcacuuguacaguggucaugaccgauggcuccgcuucagggaaggcagacacuaaaauccucuuuauugaggaaggaaagaucgugcacacaagcaccuuaagugguucugcccaacacguggaggaaugcuccugcuauccucgguacccaggcguccgcuguguuugcagagauaauuggaaggggagcaacaggccgauaguggacauuaacaucaaagacuacucgaucguaucuuccuauguguguucaggacuggucggcgauacgccccggaagaaugacaguagcuccucuagccauugccuugauccuaacaaugaggaaggugggcacggagugaaaggcugggcuuucgacgauggcaacgacguuuggauggggcgcaccauuucagagaaguugcgaaguggauacgagacauuuaaagugaucgaagguugguccaauccaaacagcaagcugcagauuaauagacaggucauaguggauaggggcaaccggucuggguauucaggaaucuucaguguagagggcaaaaauuguauuaaccguugcuuuuacguugaacuaauccgcgguagaaaggaggaaacugaggugcucuggaccagcaauuccaucgucguguucugugggacaucuggcacuuauggaaccggcucguggcccgacggggccgauauuaaccugaugccuauauga

SEQ ID NO: 143429 - RNA, 1410 nt, Artificial Sequence; identical to SEQ ID NO: 142375
  derived and/or modified CDS sequence (opt3) from neuraminidase__InfluenzaA__ABI30557

SEQ ID NO: 143430 - RNA, 1410 nt, Artificial Sequence; identical to SEQ ID NO: 142762
  derived and/or modified CDS sequence (opt3) from neuraminidase__InfluenzaA__ABI30579

SEQ ID NO: 143431 - RNA, 1410 nt, Artificial Sequence
  derived and/or modified CDS sequence (opt3) from neuraminidase__InfluenzaA__ABI30590
augaaccccaaucagaagaucauuaccauaggcagcgugucccugacaaucucuacuauuugcuucuuuaugcaaaucgccauucucaucacgaccgucacacuucacuucaaacaguacgaguuuaacucaccuccaaauaaccagguuaugcugugugaaccgacuauaaucgagagaaauauuaccgaaaucguguauuugacaaacaccacuauugagaaggaaaucugccccaaauuagcugaguacaggaauuggaguaagccucagugugacauaacaggguucgcaccauuuagcaaagauaacuccauucggcugucugccggaggugacaucuggguaacccgcgagcccuaugugucgugcgauccugacaaguguuaccaauucgcgcuaggccaggggacgacucucaauaacguccauucaaaugauaccgugcacgaccgaacaccauaucguacucugcuuaugaacgaacugggaguucccuuucauuugggcaccaaacaggugugcauugcuuggagcaguuccucuugucacgaugguaaggccuggcuccaugucugcgugacaggggacgauaagaaugcaaccgccagcuucaucuacaacggaagacugguagacuccaucguuucauggaguaaaaagauucugaggacgcaggagagcgaaugugugugcauaaauggcacuuguacagucgugaugaccgauggcucugcuuccgggaaagcagacacuaagauccucuuuauugaggagggaaagaucgugcacacaucaaccuuaagcgguagugcccaacacgucgaagagugcucuugcuauccucgguacccaggcguucgcugugugugcagagauaacuggaaaggguccaacaggccgauaguagacauuaauaucaaggacuacagcaucgugucgucuuaugucuguuccggacuggugggcgauacgccccggaaaaacgacucaaguagcuccucucauugccuugauccuaauaacgaagagggugggcacggaguuaagggcugggcuuucgacgauggcaaugacguguggauggggcgcaccauuagcgaaaaauugcgaucaggauacgagacauuuaaggucaucgaggguuggaguaacccaaauuccaaacugcagauuaacagacaggugauaguagauaggggcaaucggagcggguauucuggaaucuucucaguugaaggcaaggguuguauuaaccguugcuuuuacguggagcuaauccgcgggagaaaggaagagacugaaguccucuggaccaguaauagcaucguggucuucuguggcacauccggaacuuauggcaccgggucuuggcccgacggagccgauauuaaccugaugccuauauga

SEQ ID NO: 143432 - RNA, 1410 nt, Artificial Sequence; identical to SEQ ID NO: 142855
  derived and/or modified CDS sequence (opt3) from neuraminidase__InfluenzaA__ABI30601

SEQ ID NO: 143433 - RNA, 1410 nt, Artificial Sequence
  derived and/or modified CDS sequence (opt3) from neuraminidase__InfluenzaA__ABI30612
augaaccccaaucagaagaucauuaccauaggcagcgugucccugacaaucucuacuauuugcuucuuuaugcaaaucgccauucucaucacgaccgucacacuucacuucaaacaguacgaguuuaacucaccuccaaauaaccagguuaugcugugugaaccgacuauaaucgagagaaauauuaccgaaaucguguauuugacaaacaccacuauugagaaggaaaucugccccaaauuagcugaguacaggaauuggaguaagccucaguguaacauaacaggguucgcaccauuuagcaaagacaauuccauucggcugucugccggaggugauaucuggguaacccgcgagcccuaugugucgugcgacccugauaaguguuaccaauucgcgcuaggccaggggacgacucucaacaauguccauucaaacgacaccgugcacgaucgaacaccauaucguacucugcuuaugaaugaacugggaguucccuuucauuugggcaccaaacaggugugcauugcuuggagcaguuccucuugucacgacgguaaggccuggcuccaugucugcgugacaggggaugacaagaacgcaaccgccagcuucaucuacaauggaagacugguagauuccaucguuucauggaguaaagagauucugaggacgcaggaaagcgagugugugugcauaaacggcacuuguacagucgugaugaccgacggcucugcuuccgggaaggcagauacuaaaauccucuuuauugaggaaggaaagaucauacacacaucaaccuuaagcgguagugcccaacacguggaggaaugcucuugcuauccucgguacccaggcguccgcuguguuugcagagacaacuggaagggguccaauaggccgauuguggauaucaacaucaaagacuacagcauuguaucgucuuauguguguuccggacuggucggcgacacgccccggaagaaugauucaaguagcuccucucauugccuugacccuaacaaugaggaaggugggcacggagugaaaggcugggcuuucgaugacggcaacgauguuuggauggggcgcaccaucagcgagaaguugcgaucaggauacgagacauuuaaagugauugaagguuggaguaauccaaacuccaagcugcagauaaauagacaggucaucguggacaggggcaaccggagcggguauucuggaauuuucucaguagagggcaaaaguuguaucaaucguugcuuuuacguugaacuaauccgcgguagaaaggaggaaacugaggugcucuggaccagcaacuccauugucguguucugugggacaucuggcacuuauggaaccggcucguggcccgauggggccgacauaaaucugaugccuaucuga

SEQ ID NO: 143434 - RNA, 1410 nt, Artificial Sequence; identical to SEQ ID NO: 142855
  derived and/or modified CDS sequence (opt3) from neuraminidase__InfluenzaA__ABI30623

SEQ ID NO: 143435 - RNA, 1410 nt, Artificial Sequence
  derived and/or modified CDS sequence (opt3) from neuraminidase__InfluenzaA__ABI30736
augaaccccaaucagaagaucauuaccauaggcagcgugucccugacaaucucuacuauuugcuucuuuaugcaaaucgccauucucaucacgaccgucacacuucacuucaaacaguacgaguuuaacucaccuccaaauaaccagguuaugcugugugaaccgacuauaaucgagagaaauauuaccgaaaucguguauuugacaaacaccacuauugagaaggaaaucugccccaaauuagcugaguacaggaauuggaguaagccucagugugacauaacaggguucgcaccauuuagcaaagauaacuccauucggcugucugccggaggugacaucuggguaacccgcgagcccuaugugucgugcgauccugacaaguguuaccaauucgcgcuaggccaggggacgacucucaauaacguccauucaaaugauaccgugcacgaccgaacaccauaucguacucugcuuaugaacgaacugggaguucccuuucauuugggcaccaaacaggugugcauugcuuggagcaguuccucuugucacgaugguaaggccuggcuccaugucugcgugacaggggacgauaagaaugcaaccgccagcuucaucuacaacggaagacugguagacuccaucguuucauggaguaaaaagauucugaggacgcaggagagcgaaugugugugcauaaauggcacuuguacagucgugaugaccgauggcucugcuuccgggaaagcagacacuaagauccucuuuauugaggagggaaagaucgugcacacaucaaccuuaagcgguagugcccaacacgucgaagagugcucuugcuauccucgguacccaggcguucgcugugugugcagagauaacuggaaaggguccaacaggccgauaguagacauuaauaucaaggacuacagcguggucucgucuuauguguguuccggacugguuggcgauacgccccggaaaaacgacucaaguagcuccucucauugccuugauccuaauaacgaagagggugggcacggagugaagggcugggcuuucgacgauggcaaugacgucuggauggggcgcaccaucagcgaaaaauugcgaucaggauacgagacauuuaaggugauugaggguuggaguaacccaaauuccaaacugcagaucaacagacagguaauuguugauaggggcaaucggagcggguauucuggaauauucucaguggaaggcaagaguuguaucaaccguugcuuuuacgucgagcuaauucgcgguagaaaggaagagacugaagugcucuggaccagcaauuccaucgucguguucugugggacaucuggcacuuauggaaccggcucguggcccgacggggccgauaucaaccugaugccuauuuga

SEQ ID NO: 143436 - RNA, 1410 nt, Artificial Sequence
  derived and/or modified CDS sequence (opt3) from neuraminidase__InfluenzaA__ABI30758
augaaccccaaucagaagaucauuaccauaggcagcgugucccugacaaucucuacuauuugcuucuuuaugcaaaucgccauucucaucacgaccgucacacuucacuucaaacaguacgaguuuaacucaccuccaaauaaccagguuaugcuguaugaaccgacuauaaucgagagaaauauuaccgaaaucguguacuugacaaacaccacuauugagaaggaaaucugucccaaauuagcugaguauaggaauuggaguaagccucagugcgacauaacaggguucgcaccauuuagcaaagauaacuccauucggcugucugccggaggugacaucuggguaacccgcgagcccuacgugucgugugauccugacaagugcuaucaauucgcgcuaggccaggggacgacucucaauaacguccauucaaaugauaccgugcacgaccgaacaccauaccguacucugcuuaugaacgaacugggaguucccuuucauuugggcaccaaacagguguguauugcuuggagcaguuccucuugccacgaugguaaggccuggcuccaugucugugugacaggggacgauaagaaugcaaccgccagcuucaucuauaacggaagacugguagacuccaucguuucauggaguaaaaagauucugaggacgcaggagagcgaaugcguguguauaaauggcacuugcacagucgugaugaccgauggcucugcuuccgggaaagcagacacuaagauccucuuuauugaggagggaaagaucgugcacacaucaaccuuaagcgguagugcccaacacgucgaagaguguucuugcuacccucgguacccaggcguucgcugcguguguagagauaacuggaaaggguccaacaggccgauaguagacauuaauaucaaggacuauagcaucgugucgucuuacgucugcuccggacuggugggcgauacgccccggaaaaacgacucaaguagcuccucucauugucuugauccuaauaacgaagagggugggcacggaguuaagggcugggcuuucgacgauggcaaugacguguggauggggcgcaccauuagcgaaaaauugcgaucaggauaugagacauuuaaggucaucgaggguuggaguaacccaaauuccaaacugcagauuaacagacaggugauaguagauaggggcaaucggagcggguacucuggaaucuucucaguugaaggcaagaguugcauuaaccguuguuuuuauguggagcuaauccgcgguagaaaggaagagacugaaguccucuggaccagcaauuccaucguggucuucugcgggacaucuggcacuuacggaaccggcucguggcccgacggggccgauauuaaccugaugccuauauga

SEQ ID NO: 143437 - RNA, 1410 nt, Artificial Sequence; identical to SEQ ID NO: 142762
  derived and/or modified CDS sequence (opt3) from neuraminidase__InfluenzaA__ABI30769

SEQ ID NO: 143438 - RNA, 1410 nt, Artificial Sequence; identical to SEQ ID NO: 142762
  derived and/or modified CDS sequence (opt3) from neuraminidase__InfluenzaA__ABI30780

SEQ ID NO: 143439 - RNA, 1410 nt, Artificial Sequence; identical to SEQ ID NO: 142762
  derived and/or modified CDS sequence (opt3) from neuraminidase__InfluenzaA__ABI30791

SEQ ID NO: 143440 - RNA, 1410 nt, Artificial Sequence; identical to SEQ ID NO: 142762
  derived and/or modified CDS sequence (opt3) from neuraminidase__InfluenzaA__ABI30802

SEQ ID NO: 143441 - RNA, 1410 nt, Artificial Sequence; identical to SEQ ID NO: 142762
  derived and/or modified CDS sequence (opt3) from neuraminidase__InfluenzaA__ABI30813

SEQ ID NO: 143442 - RNA, 1410 nt, Artificial Sequence; identical to SEQ ID NO: 142762
  derived and/or modified CDS sequence (opt3) from neuraminidase__InfluenzaA__ABI30824

SEQ ID NO: 143443 - RNA, 1410 nt, Artificial Sequence; identical to SEQ ID NO: 142762
  derived and/or modified CDS sequence (opt3) from neuraminidase__InfluenzaA__ABI30835

SEQ ID NO: 143444 - RNA, 1410 nt, Artificial Sequence; identical to SEQ ID NO: 142762
  derived and/or modified CDS sequence (opt3) from neuraminidase__InfluenzaA__ABI30846

SEQ ID NO: 143445 - RNA, 1410 nt, Artificial Sequence; identical to SEQ ID NO: 143233
  derived and/or modified CDS sequence (opt3) from neuraminidase__InfluenzaA__ABI30857

SEQ ID NO: 143446 - RNA, 1410 nt, Artificial Sequence; identical to SEQ ID NO: 143233
  derived and/or modified CDS sequence (opt3) from neuraminidase__InfluenzaA__ABI30868

SEQ ID NO: 143447 - RNA, 1350 nt, Artificial Sequence
  derived and/or modified CDS sequence (opt3) from neuraminidase__InfluenzaA__ABI36157
augaaccccaaucagaagaucauuaccauaggcagcaucugcauggccauugggacagugucccugaugcuccaaaucggaaacaugauuucuaucugggucucacacaguauacagacugguaaucagcaucaggcugagagcaucuccaacacgaauccucuuaccgaaaaagcaguugccucugugacacuggcgggcaacucgucauuguguccaauuagagggugggcuguacacagcaaggacaauaguaucaggauuggauccaaaggcgauguguucgucauccgggagccguuuauaucuugcagccauuccgaaugucgcacuuucuuuuuaacccaaggugcccugcuaaacgacaagcacucaaaugagacagugaaagaucgaaguccccaucguacccucaugagcugcccuguuggggaagcaccaucucccuacaacuccagauucgagucaguggccuggagcgcuagugcaugucacgacggaacuucuuggcugacaauuggcaucuccggcccugauaauggggccgucgcugugcuuaaguauaacggaauuaucaccgacacgaucaagagcuggaggaauaacauucugcggacucaggagucggaaugcgccuguguaaaugguucuugcuuuaccguuaugacagauggcccauccaacgggcaggcgucauacaaaauauucaagauggagaaaggaaagguggucaaaaguguggaauuggacgcacccaacuaucacuacgaggaguguagcugcuauccugaugccggcgaaaucacuugugugugccgcgacaauuggcaugguuccaacagaccaugggucucuuuuaaucagaaccucgaguaccaaauuggguauaucugcagcggaguuuucggcgauaauccgaggcccaacgacggcaccgggucauguggaccuaugaguuccaauggugcuuacggcgugaagggguuuagcuucaaguacggaaacggcguauggauaggucggacaaaaucuaccaauucacgcaguggguuugaaaugauuugggauccaaacggcuggacgggaacugacagcuccuucucugugaagcaggacaucgucgccaucacagauuggucgggcuauagcggguccuuugugcagcaccccgagcugaccggacuggacugcauucgaccuuguuucuggguugaacucaucagagguaggccaaaagagucaacuauuuggacaaguggcucuagcauauccuucugcggggucaauucagauaccgugagcuggucuuggcccgacggagcagaguuaccguuuacgaucgauaaguga

SEQ ID NO: 143448 - RNA, 1350 nt, Artificial Sequence; identical to SEQ ID NO: 143447
  derived and/or modified CDS sequence (opt3) from neuraminidase__InfluenzaA__ABI36168

SEQ ID NO: 143449 - RNA, 1350 nt, Artificial Sequence; identical to SEQ ID NO: 143447
  derived and/or modified CDS sequence (opt3) from neuraminidase__InfluenzaA__ABI36179

SEQ ID NO: 143450 - RNA, 1350 nt, Artificial Sequence; identical to SEQ ID NO: 143447
  derived and/or modified CDS sequence (opt3) from neuraminidase__InfluenzaA__ABI36189

SEQ ID NO: 143451 - RNA, 1350 nt, Artificial Sequence
  derived and/or modified CDS sequence (opt3) from neuraminidase__InfluenzaA__ABI36278
augaaccccaaucagaagaucauuaccauaggcagcaucugcauggugauugggaucgucucccugaugcuccaaauuggaaacaugaucucuauauggguuucacacaguauccagaaagguaaucagcaucaggccgagagcauuuccaacacaaauccucuuacugaaaaggcuguggcaucuguaacgcuggccggcaacucgucauuguguccaaucagagggugggcggugcacagcaaagacaauaacauuaggaucggaaguaagggcgaugucuucgugauacgggagccguuuauuuccugcucucauuuagaaugucgcaccuucuuucugacacaaggugcucuacucaaugacaaacacagcaacgggacuguuaaggaucgaucaccccaucguacccugauguccugcccugugggagaggccccaagucccuacaauagcagauucgaaucugucgcaugguccgccucagcuugucacgacggcacaagcuggcuuaccaucggcauuagugggccugauaacgaggcaguggccguacugaaguauaauggaaucaucacugacacaauuaaaucuuggaggaacaauauauugcggacccaggaguccgaaugcgcuuguguuaacgguagcugcuuuacggugaugacugauggcccaucgaacgggcaggccucuuacaagaucuucaaaauggagaagggaaaagucgugaaguccguggaacucgacgcgcccaauuaucacuacgaggaguguucaugcuauccugaugcaggcgaaauuaccugugucugccgcgacaacuggcaugguaguaauagaccauggguuagcuuuaaccagaaucuggaguaccaaaucggguauauaugcuccggaguguucggcgauaacccgaggcccaaugacggcacagggucuuguggaccuaugagcccaaacggugccuacggcguaaagggguuuucauucaaauacggaaauggcguguggauuggucggacuaagaguaccaacucccgcagcggguuugaaaugaucugggaucccaauggcuggacaggaaccgacucuucauucagugucaaacaggacaucguggcuauuacggauuggagcggcuauuccgggucuuuuguucagcacccugagcugacuggacucgacugcauccgaccauguuucuggguggaauuaauuagagguaggcccaaggagucgacaauauggaccagcggcuccucaaucaguuucugcggggucaacucugauacugugagcugguccuggccggacggagccgagcugccuuuuacaauugauaaauga

SEQ ID NO: 143452 - RNA, 1350 nt, Artificial Sequence; identical to SEQ ID NO: 143451
  derived and/or modified CDS sequence (opt3) from neuraminidase__InfluenzaA__ABI36287

SEQ ID NO: 143453 - RNA, 1350 nt, Artificial Sequence; identical to SEQ ID NO: 143451
  derived and/or modified CDS sequence (opt3) from neuraminidase__InfluenzaA__ABI36298

SEQ ID NO: 143454 - RNA, 1350 nt, Artificial Sequence
  derived and/or modified CDS sequence (opt3) from neuraminidase__InfluenzaA__ABI36314
augaaccccaaucagaagaucauuaccauaggcagcaucugcauggugauugggaucgucucccugaugcuccaaauuggaaacaugaucucuauauggguuucacacaguauccagacagguaaucagcaucaggccgagagcauuuccaacacuaauccucuuacggaaaaagcuguggcaucuguaacccuggccggcaacucgucauuguguccaaucagagggugggcggugcacagcaaggacaauaacauuaggaucggaaguaaaggcgaugucuucgugauacgggagccguuuauuuccugcucucauuuagaaugucgcacauucuuucugacucaaggugcucuacucaaugacaagcacagcaacgggaccguuaaagaucgaucaccccaucguacacugauguccugcccugugggagaggccccaagucccuacaauagcagauucgaaucugucgcaugguccgccucagcuugucacgacggcaacagcuggcuuaccaucggcauuagugggccugauaaugaggcaguggccguacugaaguauaacggaaucaucacugacacaauuaagucuuggaggaauaacauauugcggacccaggaguccgaaugcgcuuguguuaacgguagcugcuuuacggugaugacugauggcccaucgaaugggcaggccucuuacaaaaucuucaagauggagaaaggaaaggucgugaaauccguggaacucgacgcgcccaacuaucacuacgaggaguguucaugcuauccugaugcaggcgaaauuaccugugucugccgcgacaauuggcaugguaguaacagaccauggguuagcuuuaaucagaaccuggaguaccaaaucggguauauaugcuccggaguguucggcgauaauccgaggcccaacgacggcacagggucuuguggaccuaugagcccaaauggugccuacggcguaaagggguuuucauucaaguacggaaacggcguguggauuggucggacuaaaaguaccaauucccgcagcggguuugaaaugaucugggaucccaacggcuggacaggaaccgacucuucauucagugucaagcaggacaucguggcuauuacggauuggagcggcuauuccgggucuuuuguucagcacccugagcugacuggacucgacugcauccgaccauguuucuggguggaauuaauuagagguaggcccaaagagucgacaauauggaccagcggcuccucaaucaguuucugcggggucaauucugauacugugagcugguccuggccggacggagccgagcugccuuuuacaauugauaaguga

SEQ ID NO: 143455 - RNA, 1350 nt, Artificial Sequence
  derived and/or modified CDS sequence (opt3) from neuraminidase__InfluenzaA__ABI36336
augaaccccaaucagaagaucauuaccauaggcagcaucugcauggugauugggaucgucucccugaugcuccaaauuggaaacaugaucucuauauggguuucacacagugugcagacagguaaucagcaucaggccgagagcaucuccaacacuaauccucuuacggaaaaagcuguagcaucugugacccuggccggcaacucgucauuguguccaauuagagggugggcgguccacagcaaggacaauaacaucaggauuggaaguaaaggcgauguguucguuauccgggagccguuuauauccugcucucauuuagaaugucgcacauucuuucugacucaaggugcucuacucaaugacaagcacagcaacgggaccgugaaagaucgaucaccccaucguacacugauguccugcccucuuggagaggccccaagucccuacaauagcagauucgaaucugucuccuggucagcaagcgccugucacgacggcaccaguuggcugacuauuggcaucucugggccugauaacgaggcuguggcaguauugaaguauaauggaauuaucacagacaccaucaaguccuggaggaacaauauucuccggacgcaggagagcgaaugcgccuguguuaacgguucgugcuuuacugugaugaccgauggcccaucuaacgggcaggcuuccuacaaaauauucaagauggagaaaggaaaggucgugaaaucaguggaacuggacgcccccaauuaucacuacgaggaguguaguugcuauccugaugcgggcgaaaucacaugugucugccgcgacaacuggcaugguagcaauagaccauggguuuccuuuaaccagaaucuggaguaccaaauuggguauaucugcucuggaguguucggcgauaacccgaggcccaaugacggcacugggagcuguggaccuaugucaccaaacggugcauacggcguaaagggguuuaguuucaaguacggaaauggcguguggauaggucggaccaaauccacaaacagccgcucuggguuugaaaugauuugggaucccaauggcuggaccggaacggacucaaguuucagcgucaagcaggacaucguggccaucacugauugguccggcuauucugggucguuuguucagcacccugagcucacaggauuagacugcauucgaccauguuucuggguggaacugaucagagguaggcccaaagagagcaccauuuggacuuccggcucaauaaucaguuucugcggggucaacucugauacagugagcugguccuggccggacggagcugagcuuccuuuuaccauugauaaguga

SEQ ID NO: 143456 - RNA, 1350 nt, Artificial Sequence
  derived and/or modified CDS sequence (opt3) from neuraminidase__InfluenzaA__ABI36358
augaaccccaaucagaagaucauuaccauaggcagcaucugcauggugauugggaucgucucccugaugcuccaaauuggaaacaugaucucuauauggguuucacacagugugcagacagguaaucagcaucaggccgagagcaucuccaacacuaauccucuuacggaaaaagcuguagcaucugugacccuggccggcaacucgucauuguguccaauuagagggugggcgguccacagcaaggacaauaacaucaggauuggaaguaaaggcgauguguucguuauccgggagccguuuauauccugcucucauuuagaaugucgcacauucuuucugacucaaggugcucuacucaaugacaagcacagcaacgggaccgugaaagaucgaucaccccaucguacacugauguccugcccugucggagaggccccaagucccuacaauagcagauucgaaucuguggcaugguccgccucagcuugucacgacggcaccagcuggcuuacuauuggcaucagugggccugauaacgaggcaguagccguucugaaguauaauggaauuaucacagacaccaucaagucuuggaggaacaauauuuugcggacgcaggaguccgaaugcgcuugugugaacgguagcugcuuuacugucaugaccgauggcccaucgaacgggcaggccucuuacaaaauauucaagauggagaaaggaaagguggugaaauccgucgaacucgacgcgcccaauuaucacuacgaggaguguucaugcuauccugaugcaggcgaaaucacauguguuugccgcgacaacuggcaugguaguaauagaccaugggugagcuuuaaccagaaucuggaguaccaaauuggguauaucugcuccggaguauucggcgauaacccgaggcccaaugacggcacugggucuuguggaccuaugagcccaaacggugccuacggcgugaagggguuuucauucaaguacggaaauggcgucuggauaggucggaccaaaaguacaaacucccgcagcggguuugaaaugauuugggaucccaauggcuggaccggaacggacucuucauucagugugaagcaggacaucguugcuaucacugauuggagcggcuauuccgggucuuuugugcagcacccugagcugacaggacucgacugcauucgaccauguuucugggucgaauuaaucagagguaggcccaaagagucgaccauuuggacuagcggcuccucaauaaguuucugcggggugaacucugauacaguaagcugguccuggccggacggagccgagcugccuuuuaccaucgauaaguga

SEQ ID NO: 143457 - RNA, 1350 nt, Artificial Sequence; identical to SEQ ID NO: 143447
  derived and/or modified CDS sequence (opt3) from neuraminidase__InfluenzaA__ABI36369

SEQ ID NO: 143458 - RNA, 1350 nt, Artificial Sequence
  derived and/or modified CDS sequence (opt3) from neuraminidase__InfluenzaA__ABI36391
augaaccccaaucagaagaucauuaccauaggcagcaucugcauggugauugggaucgucucccugaugcuccaaauuggaaacaugaucucuauauggguuucacacaguacacagaaagguaaucagcaucaggccgagagcaucuccaacacuaauccucuuacggaaaaggcuguggcaucuguaacccuggccggcaacucgucauuguguccaauuagagggugggcggugcacagcaaagacaauaacaucaggauuggaaguaagggcgaugucuucgugauccgggagccguuuauauccugcucucauuuagaaugucgcacauucuuucugacucaaggugcucuacucaaugacaaacacagcaacgggaccguuaaggaucgaucaccccaucguacacugauguccugcccugugggagaggccccaagucccuacaauagcagauucgaaucugucgcaugguccgccucagcuugucacgacggcaccagcuggcuuacuauuggcaucagugggccugauaacgaggcaguggccguacugaaguauaauggaauuaucacagacaccaucaaaucuuggaggaacaauauuuugcggacgcaggaguccgaaugcgcuuguguuaacgguagcugcuuuacugugaugaccgauggcccaucgaacgggcaggccucuuacaagauauucaaaauggagaagggaaaagucgugaaguccguggaacucgacgcgcccaauuaucacuacgaggaguguucaugcuauccugaugcaggcgaaaucacaugugucugccgcgacaacuggcaugguaguaauagaccauggguuagcuuuaaccagaaucuggaguaccaaauuggguauaucugcuccggaauauucggcgauaacccgaggcccaaugacggcacugggucuuguggaccuauguuuccaaacggugccuacggcgugaagggguucagcuuuaaauacggaaauggcguauggauuggucggaccaagucaacaaacagucgcuccggguucgaaaugaucugggaucccaauggcuggaccggaacggacagcucuuuuucagugaaacaggacaucgucgcuauuacugauuggaguggcuauagcggguccuucgugcagcacccugagcugacaggacucgacugcauccgaccauguuucuggguugaauuaauuagagguaggcccaaggagucuaccauauggacuucgggcagcuccaucucauuuugcggggugaacagugauacagucucuuggagcuggccggacggagccgagcugccuuucaccauugauaaauga

SEQ ID NO: 143459 - RNA, 1350 nt, Artificial Sequence; identical to SEQ ID NO: 143458
  derived and/or modified CDS sequence (opt3) from neuraminidase__InfluenzaA__ABI36402

SEQ ID NO: 143460 - RNA, 1350 nt, Artificial Sequence; identical to SEQ ID NO: 143447
  derived and/or modified CDS sequence (opt3) from neuraminidase__InfluenzaA__ABI36413

SEQ ID NO: 143461 - RNA, 1350 nt, Artificial Sequence
  derived and/or modified CDS sequence (opt3) from neuraminidase__InfluenzaA__ABI36446
augaaccccaaucagaagaucauuaccauaggcagcaucugcauggugauugggaucgucucccugaugcuccaaauuggaaacaugaucucuauauggguuucacacaguauccagacagguaaucagcaucaggccgagagcauuuccaacacuaauccucuuacggaaaaagcuguggcaucuguaacccuggccggcaacucgucauuguguccaaucagagggugggcggugcacagcaaggacaauaacauuaggaucggaaguaaaggcgaugucuucgugauacgggagccguuuauuuccugcucucauuuagaaugucgcacauucuuucugacucaaggugcucuacucaaugacaagcacagcaacgggaccguuaaagaucgaucaccccaucguacacugauguccugcccugugggagaggccccaagucccuacaauagcagauucgaaucugucgcaugguccgccucagcuugucacgacggcaccagcuggcuuacuaucggcauuagugggccugauaacgaggcaguggccguacugaaguauaauggaaucaucacagacaccauuaagucuuggaggaacaauauauugcggacgcaggaguccgaaugcgcuuguguuaacgguagcugcuuuacugugaugaccgauggcccaucgaacgggcaggccucuuacaaaaucuucaagauggagaaaggaaaggucgugaaauccguggaacucgacgcgcccaauuaucacuacgaggaguguucaugcuauccugaugcaggcgaaauuacaugugucugccgcgacaacuggcaugguaguaauagaccauggaucagcuuuaaccagaaucuggaguaccaaauaggguauauuugcuccggaguuuucggcgauaacccgaggcccaaugacggcacugggucuuguggaccuaugagcccaaacggugccuacggcgugaagggguuuucauucaaguacggaaauggcguauggaucggucggaccaaaaguacaaacucccgcagcggguuugaaaugaucugggaucccaauggcuggaccggaacggacucuucauucagugugaagcaggacauugucgcuaucacugauuggagcggcuauuccgggucuuuugugcagcacccugagcugacaggacucgacugcauucgaccauguuucuggguugaauuaauaagagguaggcccaaagagucgaccaucuggacuagcggcuccucaauuaguuucugcggggugaacucugauacagucagcugguccuggccggacggagccgagcugccuuuuaccaucgauaaguga

SEQ ID NO: 143462 - RNA, 1350 nt, Artificial Sequence; identical to SEQ ID NO: 143451
  derived and/or modified CDS sequence (opt3) from neuraminidase__InfluenzaA__ABI36457

SEQ ID NO: 143463 - RNA, 1350 nt, Artificial Sequence
  derived and/or modified CDS sequence (opt3) from neuraminidase__InfluenzaA__ABI36476
augaaccccaaucagaagaucauuaccauaggcagcaucugcauggugauugggaucgucucccugaugcuccaaauuggaaacaugaucucuauauggguuucacacaguacacagaaagguaaucagcaucaggccgagagcaucuccaacacuaauccucuuacggaaaaggcuguggcaucuguaacccuggccggcaacucgucauuguguccaauuagagggugggcggugcacagcaaagacaauaacaucaggauuggaaguaagggcgaugucuucgugauccgggagccguuuauauccugcucucauuuagaaugucgcacauucuuucugacucaaggugcucuacucaaugacaaacacagcaacgggaccguuaaggaucgaucaccccaucguacacugauguccugcccugugggagaggccccaagucccuacaauagcagauucgaaucugucgcaugguccgccucagcuugucacgacggcaccagcuggcuuacuauuggcaucagugggccugauaacgaggcaguggccguacugaaguauaauggaauuaucacagacaccaucaaaucuuggaggaacaauauuuugcggacgcaggaguccgaaugcgcuuguguuaacgguagcugcuuuacugugaugaccgauggcccaucgaacgggcaggccucuuacaagauauucaaaauggagaagggaaaagucgugaaguccguggaacucgacgcgcccaauuaucacuacgaggaguguucaugcuauccugaugcaggcgaaaucacaugugucugccgcgacaacuggcaugguaguaauagaccauggguuagcuuuaaccagaaucuggaguaccaaauuggguauaucugcuccggaguguucggcgauaacccgaggcccaaugacggcacugggucuuguggaccuaugagcccaaacggugccuacggcguaaagggguuuucauucaaauacggaaauggcguguggauaggucggaccaagaguacaaacucccgcagcggguuugaaaugauuugggaucccaauggcuggaccggaacggacucuucauucagugucaaacaggacaucguggcuaucacugauuggagcggcuauuccgggucuuuuguucagcacccugagcugacaggacucgacugcauucgaccauguuucuggguggaauuaaucagagguaggcccaaggagucgaccauuuggacuagcggcuccucaauaaguuucugcggggucaacucugauacagugagcugguccuggccggacggagccgagcugccuuuuaccaucgauaaauga

SEQ ID NO: 143464 - RNA, 1350 nt, Artificial Sequence
  derived and/or modified CDS sequence (opt3) from neuraminidase__InfluenzaA__ABI49409
augaaccccaauagaaagaucauuaccauaggcagcaucugcauggugauugggauggucucccugaugcuccagaucggaaacaugauuucuaucuggguuucacacaguauacaaacagguaaucagcaucaggccgagagcaucuccaacacuaauccucuuacggaaaaagcuguggcaucuguaacccuggccggcaacucgucauuguguccaauuagggggugggcggugcacagcaaggacaauaacauccggauuggaaguaaaggcgaugucuucgugauccgcgagccguuuauauccugcucucauuuagaaugucgaacauucuuucugacucagggugcucuacucaaugacaagcacagcaacgggaccguuaaagaucguucaccccauagaacacugauguccugcccugugggagaggccccaagucccuacaauagcagguucgaaucugucgcaugguccgccucagcuugucacgacggcaccagcuggcuuacuauuggcaucagugggccugauaacgaggcaguggccguacugaaguauaauggaauuaucacagacaccaucaagucuuggcggaacaauauuuugcgcacgcaagaguccgaaugcgcuuguguuaacgguagcugcuuuacugugaugaccgauggcccaucgaacgggcaggccucuuacaaaauauucaagauggagaaaggaaaggucgugaaauccguggaacucgucgcgcccaauuaucacuacgaggaguguucaugcuauccugacgcaggcgaaaucacauguguuugcagagauaacuggcaugguaguaauaggccaugggugagcuuuaaccagaaucuggaguaccagauuggguauaucugcuccggaguauucggcgacaacccgcggcccaaugauggcacugggucuuguggaccuaugagcccaaacggugccuacggcgugaagggguuuucauucaaguacggaaauggcgucuggauaggucgcaccaaaaguacaaacucccgaagcggguuugaaaugauuugggaccccaauggcuggaccggaacggauucuucauucagugugaagcaagacaucguugcuaucacugacuggagcggcuauuccgggucuuuugugcagcacccugagcugacaggacucgauugcauuagaccauguuucugggucgaauuaaucaggggucggcccaaagagucgaccauuuggacuagcggcuccucaauaaguuucugcggggugaacucugacacagccagcugguccuggccggauggagcagagcugccuuuuaccaucgacaaguga

SEQ ID NO: 143465 - RNA, 1350 nt, Artificial Sequence
  derived and/or modified CDS sequence (opt3) from neuraminidase__InfluenzaA__ABI49417
augaaccccaaucagaagaucauuaccauaggcagcaucugcauggugauugggaucgucucccugaugcuccaaauuggaaacaugaucucuauauggguuucacacaguauccagacagguaaucagcaucaggccgagagcauuuccaacacuaauccucuuacggaaaaagcuguggcaucuguaacccuggccggcaacucgucauuguguccaaucagagggugggcggugcacagcaaggacaauaacauuaggaucggaaguaaaggcgaugucuucgugauacgggagccguuuauuuccugcucucauuuagaaugucgcacauucuuucugacucgaggugcucuacucaaugacaagcacagcaacgggaccguuaaagaucguucaccccauagaacacugauguccugcccugugggagaggccccaagucccuacaauagcagguucgaaucugucgcaugguccgccucagcuugucacgacggcaccagcuggcuuacuaucggcauuagugggccugauaacgaggcaguggccguacugaaguauaauggaaucaucacagacaccauuaagucuuggcggaacaauauauugcgcacgcaagaguccgaaugcgcuuguguuaacgguagcugcuuuacugugaugaccgauggcccaucgaacgggcaggccucuuacaaaaucuucaagauggagaaaggaaaggucgugaaauccguggaacucgacgcgcccaauuaucacuacgaggaguguucaugcuauccugaugcaggcgaaauuacaugugucugcagagacaacuggcaugguaguaauaggccauggguuagcuuuaaccagaaucuggaguaccagaucggguauauaugcuccggaguguucggcgauaacccgcggcccaaugacggcacugggucuuguggaccuaugagcccaaacggugccuacggcguaaagggguuuucauucaaguacggaaauggcguguggauuggucgcaccaaaaguacaaacucccgaagcggguuugaaaugaucugggaucccaauggcuggaccggaacggacucuucauucagugucaagcaagacaucguggcuauuacugauuggagcggcuauuccgggucuuuuguucagcacccugagcugacaggacucgacugcaucagaccauguuucuggguggaauuaauuaggggucagcccaaagagucgaccauauggacuagcggcuccucaaucaguuucugcggggucaacucugauacagugagcugguccuggccggacggagccgagcugccuuuuaccauugauaaguga

SEQ ID NO: 143466 - RNA, 1410 nt, Artificial Sequence
  derived and/or modified CDS sequence (opt3) from neuraminidase__InfluenzaA__ABI84962
augaaccccaaucagaagaucauuaccauaggcagcgugucccugacaaucgccacugucugcuuccucaugcaaauugcuauccuugcaacgaccguuacacugcacuuuaaacagcaugagugugacucuccugccucaaaccaggugaugccaugcgaaccgauuaucauagagagaaauaucacugaaauuguauacuugaacaauaccacaaucgagaaggaaauuugucccgagguggucgaguauaggaacuggaguaaaccucagugccaaaucaccggguucgcgccauuuagcaaggauaauuccauacgguuaucugcuggaggugacauuugggugacucgcgaacccuacguuucgugugauccuggcaaaugcuaucaguucgcccuggggcagggaacaacccuagacaacaagcacucaaauggcacgauccaugaucguauuccacaccgaacucuccugaugaacgagcuuggugugcccuuucaucuggggaccaagcaggucuguguggcauggagcaguuccucuugccacgacggaaaagccugguugcacguauguguuacaggcgaugacagaaaugcuacugccagcuucaucuacgauggcaggcucguggacuccaucgggucauggagucaaaacauucugcggacccaggaaagcgagugcgucuguauaaauggaacaugcaccguggugaugacggaugguucugcauccggccgcgcugacacuagaauccuguuuauuaaggaggggaaaaucguccauauaucaccucucagcggaagugcccagcacauugaagagugcucuuguuauccaagguacccggauguucggugcaucugucgcgacaacuggaagggcuccaaucgacccgugaucgacauuaacauggaagauuauagcaucgacucgucuuacguaugcuccgguuuagugggggauacaccuagaaacgacgauucaaguagcaauuccaacuguagggacccaaauaacgagcggggaaaucccggcgucaaaggcugggcguucgauaacggggacgauguguggaugggacguaccauuucuaaggacagccgcucagguuacgaaacuuuuaagguuauaggcggguggaguacaccuaauuccaaaagccaggugaacagacaagucaucguggauaauaacaauuggucuggauauucaggcauuuucaguguagaggguaagagcugcaucaacagguguuuuuacguugagcugauccgggggcgaccacaggaaacccgcgugugguggacguccaauucuauugucguguucugcggcaccucgggaacauauggcacugggagcuggcccgacggagcaaacauaaauuuuaugccgaucuga

SEQ ID NO: 143467 - RNA, 1410 nt, Artificial Sequence
  derived and/or modified CDS sequence (opt3) from neuraminidase__InfluenzaA__ABI85003
augaaccccaaucagaagaucauuaccauaggcguggucaacacaacucugagcacgaucgcccuccuuauugggguuggaaaucugguguucaacaccguaauccacgagaaaauuggugaccaucaaaucgugacacacccuacuauaaugaccccagaagucccgaauugcuccgauacaaucauuaccuacaacaauacugugaucaacaauauuacaaccacgaucauaacugaggcugaaagacccuuuaagucuccuuugccauuaugucccuucaggggcuuuuucccuuuucauaaagacaacgcaauucggcugggggagaauaaggauguuaucgugacccgcgaaccauaugucucaugcgacaacgauaauuguuggaguuucgcccuagcgcagggagcucuccugggcacaaaacacagcaacgguacuauuaaggaccgaacccccuaccguucccuuaucagauuuccuaucgggacagccccagugcugggaaauuauaaggagauuugcauagcauggucuucgucaagcuguuucgauggcaaagaguggaugcauguaugcaugaccggcaacgacaacgaugccagugcucagaucauuuacgggggaaggaugacggacuccaucaagucuuggcggaaagauauauugcgcacucaggaaagcgagugucaaugcauugacgguacauguguuguggcagucaccgauggcccggccgcuaauuccgccgaccacagaguguauuggaucagggaagggcggaucauuaaguacgagaacgugcccaaaacuaagauccagcaccucgaggaaugcucauguuaugucgacauugauguuuacugcauaugccgcgacaauuggaagggaaguaaccgaccuuggaugagaaucaauaacgagacaauucuggaaaccggcuacguguguagcaaauuucauucugauacgccaaggcccgcggacccuuccaucaugucaugcgauagcccaaguaauguaaacggugggcccggagugaagggcuucggcuuuaaagcagggaaugacgucuggcugggacggaccgugucuacauccggucguagcggcuucgagaucauuaagguuacugaaggguggauaaacucgccgaaucacgugaaaucuaucacccagacacucgucuccaacaaugauuggucaggauauaguggcagcuuuauugugaaggccaaagacuguuuccagccuugcuucuacguagaguuaauccgcgguagacccaacaagaaugaugacguuuccuggacuucuaacagcauugugaccuuuugugggcuggauaacgagccaggcucaggaaauuggccugacggcaguaacaucggguucaugcccaaguga

SEQ ID NO: 143468 - RNA, 1410 nt, Artificial Sequence; identical to SEQ ID NO: 143138
  derived and/or modified CDS sequence (opt3) from neuraminidase__InfluenzaA__ABI92294

SEQ ID NO: 143469 - RNA, 1413 nt, Artificial Sequence
  derived and/or modified CDS sequence (opt3) from neuraminidase__InfluenzaA__ABI92305
augaaccccaaucagaagaucauuaccauaggcagcaucugcauggccauugggaucauuucccugauccuccaaauaggaaacaucauuucuaucugggugucacaccuuauucagacagguagucagaaucauacuggcaucuguaaccagagaauaauuacguacgagaauagcaccugggucaaccaaacauauguuaauaucaacaauacuaacgugguagcugggaaagacaccacauccgugacccuggcaggaaauucuucguugugcccugucaggggcugggccauuuacucaaaggauaacagcauccggaucgguaguaaaggggacguguucguuauucgcgaaccauuuauauccuguucucacuuagagugccgaacuuucuuucugacacagggagcgcuacucaaugauaagcauagcaacggcaccgugaaagaccguuccccguauagagcucugaugucaugucccaucggcgaagccccuaguccauacaauagcagguucgagucugucgcaugguccgccucagcuugccacgaugggaugggauggcuuacgauugguaucagcggccccgacgauggggcaguggccguacugaaguauaacggaauaauuacugaaaccaucaagaguuggcggaaacgcaucuugagaacacaggagucugaguguguuugcauuaacggcuccuguuuuacuaucaugaccgacgguccuagcaaugggccagcuucguacaggauuuucaagauagaaaaaggaaagaucacaaaaucuauugagcucgaugcccccaacucccauuaugaagagugcucauguuacccugacaccggcacggugaugugcgucugccgggauaauuggcacggcaguaaccgcccaugggugagcuuuaaucagaaccuggacuaccaaaucggguauaucuguuccggaguguucggugauaauccgcgacccaaggacggcaaggggucuugcggaccugucacuguugacggcgcggauggugugaaaggguuuagcuacagauauggcaacggaguauggauuggcaggacaaagucaaauaguucccggaaaggguucgagaugauaugggacccaaacggauggaccgauacugacagcaauuuucuggugaagcaggaugucguggcaaugacagacuggucugguuacucaggcaguuucguucagcaccccgaacucaccggguuagauuguaugcguccuugcuuuuggguggagcugauccgcggaagaccaagggagaaaacgaccauuuggacaagcggcuccucuaucucguucuguggugucaacagcgacacugugaauugguccuggcccgauggggccgaacuuccguucaccauugacaaguga

SEQ ID NO: 143470 - RNA, 1413 nt, Artificial Sequence
  derived and/or modified CDS sequence (opt3) from neuraminidase__InfluenzaA__ABI92316
augaaccccaaucagaagaucauuaccauaggcagcaucuccauugccaucggggugauuucucugauccuccaaauaggaaacaucauuucaaucugggcuagucacagcauucagacagguucccagaaucauacuggcaucugcaaccagagaauaauuacguacgaaaauucuaccugggucaaccaaacauauguuaauaucaacaauacuaacgugguagcagggaaagacaagaccucgaugacacuugccggaaauucaagccuguguccuauuaggggcugggcgaucuacaccaaagauaacaguauccggauugguuccaagggggacguguucgucauacgcgagccauuuaucucuugcagccacuuggagugucgaacuuucuuuuuaacacagggagcucugcuaaaugauaaacauuccaacggcaccgugaaggaccguucaccguauagagcccucaugaguugcccccugggcgaagcaccuagcccauacaauucuagguucgaguccguugccuggucagcuagcgcaugucacgaugggcuuggauggcugacgauugguaucaguggccccgacaacggggccguggcugucuugaaguauaacggaauaauuacugaaaccaucaaaucuuggaagaaacggauccuccgcacacaggaguccgagugcguguguguaaauggcagcugcuuuacuauuaugaccgaugguccuucgaacggggccgcgucuuacagaaucuucaagauugaaaaaggaaggguuacaaaguccauagagcuggacgcaccaaauuaucauuacgaagaguguucaugcuaccccgauaccggcacggugaugugugucugccgggacaacuggcacggcaguaaucgcccuugggugagcuuuaaccagaaucuggauuaucaaaucggguacauuugcuccggaguguucggugacaacccacgaccgaaggauggcgaggggucuuguaaucccgucacuguugacggagccgacggcgugaaagguuuuagcuauagauacgggaacggcguauggaucggaaggacaaagucaaaucggcuccguaaaggcuucgaaaugaucugggauccuaacggguggaccgacacugauagugacuuuuccaugaagcaggauauuguggcuaugacagacuggagcggauauucugguucauucguccagcacccagaguuaaccggccuggauugcaugcgccccuguuuuuggguggaacuuguuagaggguugccuagggagaauacgaccauauggacaaguggaagcuccaucucuuucugcggcgugaacucggacacugccaauuggagcuggccagauggugcagaacugcccuucaccauugacaaauga

SEQ ID NO: 143471 - RNA, 1410 nt, Artificial Sequence; identical to SEQ ID NO: 143149
  derived and/or modified CDS sequence (opt3) from neuraminidase__InfluenzaA__ABI92327

SEQ ID NO: 143472 - RNA, 1410 nt, Artificial Sequence
  derived and/or modified CDS sequence (opt3) from neuraminidase__InfluenzaA__ABI92338
augaaccccaaucagaagaucauuaccauaggcagcgugucccugacaaucgccacuauuugcuuccucaugcaaaucgcuauucuugucacgaccguuacacugcacuuuaaacaguacgaguguaacucuccuccaaauaaccaggugauguugugcgaaccggcaaucauagagagaaauaucacugaaauuguauauuuaaccaacacaaccaucgagaaggaaauuugucccaaacuggccgaguacaggaauuggucaaagccucagugcaacaucacuggguucgcgccauuuaguaaagacaauagcauacggcuauccgcuggaggugauauuugggugacacgcgagcccuaugucucuugugacccugauaagugcuaccaauucgcccucggccaggggaccacgcugaacaauggacauucgaacgacacugugcacgaucgaaccccauaucguacacuucugaugaaugaauugggcguucccuuucaucucgguacuagacagguguguaucgcauggucaagcaguuccugccacgacgggaaggccuggcugcaugucugugugaccggagaugacgagaacgcuacagcaucuuucauuuacaauggcaggcugguagauagcaucggcuccuggaguaaaaagauccuccggacccaggaaucagagugcguuuguauuaacgggacgugcacuguggucaugacagacggaagcgccucugguaaagcugauaccaagauauuauuuaucgaggaaggcaaaauugugaacaucuccacucugucagggagcgcccaacacguggaggaaugcaguuguuauccucgcuacccaggagucagaugcguuuguagggacaauuggaagggcucuaaccggccgauaauugauaucaaugugaaggacuacuccaucguaagcucguaugugugcucuggucuugucggggacacaccccgcaaaaacgauuccuucucaaguagccacuguuuggacccuaauaacgaggaaggaggccauggcgugaaggggugggcguuugaugacggaaaugauguuuggaugggucgaaccauuuccgagaaacugagaucuggcuacgagacguucaaggugaucgaaggguggagcaaaccaaacucaaagcuacagauuaauaggcaggucauaguggagcggggaaaccguaguggcuauuccgguaucuuuagcguagaagggaaaucuugcauuaaucgcuguuucuacguugagcucaucagaggcaggaaggaagagaccgaggugugguggacaucaaacaguaucgucguguuuugcggaacuagcggcaccuaugggacaggauccuggcccgacggugcagauauuaaucugaugccuauauga

SEQ ID NO: 143473 - RNA, 1410 nt, Artificial Sequence
  derived and/or modified CDS sequence (opt3) from neuraminidase__InfluenzaA__ABI92349
augaaccccaaucagaagaucauuaccauaggcagcgugucccugacaaucgccacuauuugcuuccucaugcaaaucgcuauucuugucacgaccguuacacugcacuuuaaacaguacgaguguaacucuccuccaaauaaccaggugauguugugcgaaccgacuaucauagagagaaauaucaccgaaauuguauauuuaacaaacaccacuaucgagaaggaaauuugucccaaacuggcaaaguacaggaauuggucaaaaccucagugcaacaucacaggguucgccccauuuaguaaggacaauagcauacggcuauccgcgggaggugauauuugggugacccgcgagcccuaugucucuugugacccugauaagugcuaccaauucgcucucggccaggggacgacucugaacaauggacauucgaacgacaccgugcacgaucgaacaccauaucguacucuucugaugaaugaguugggcguucccuuucaucucgguaccagacagguguguaucgccuggucaagcaguuccugccacgacgggaaagcauggcugcaugucugugugacaggagaugacgaaaacgccaccgcuucuuucauuuacaauggcaggcugguagauagcaucggcuccuggucaaagaaaauccuccggacgcaggagagugaaugcguuuguauuaacgggacuugcacaguggucaugaccgacggaagcgcaucugguaaggccgauacuaaaauauuauuuaucgaggagggcaagauugugcacaucuccacacugucagggagcgcucaacacguggaagagugcaguuguuauccucgcuacccaggagucagaugcguuuguagggacaacuggaagggcucuaaucggccgauaguggauauuaacguaaaagacuacuccaucgugagcucguaugucugcucuggucuugugggggacacccccaggaagaaugauuccuucucaaguagccauuguuuggacccuaacaaugaagagggaggccacggcguuaaagggugggccuuugaugacggaaacgauguguggaucggucgaacgauuuccgaaaagcugagaucuggcuacgagaccuucaaagucaucgagggguggagcaagccaaauucaaaacuacagacaaaccgccaggugauuguagaacggggaaaucguaguggcuauuccgguauauuuagcguugaggggaagucuugcaucaaccgcuguuucuacguggaacucauuagaggcaggaaggaggaaacugaggucugguggaccucaaauaguaucguggucuuuugcggaacaagcggcacuuaugggaccggauccuggcccgacggugcggauaucaaccugaugccuauuuga

SEQ ID NO: 143474 - RNA, 1410 nt, Artificial Sequence; identical to SEQ ID NO: 142375
  derived and/or modified CDS sequence (opt3) from neuraminidase__InfluenzaA__ABI92360

SEQ ID NO: 143475 - RNA, 1410 nt, Artificial Sequence; identical to SEQ ID NO: 142375
  derived and/or modified CDS sequence (opt3) from neuraminidase__InfluenzaA__ABI92371

SEQ ID NO: 143476 - RNA, 1413 nt, Artificial Sequence; identical to SEQ ID NO: 142434
  derived and/or modified CDS sequence (opt3) from neuraminidase__InfluenzaA__ABI92382

SEQ ID NO: 143477 - RNA, 1410 nt, Artificial Sequence; identical to SEQ ID NO: 142762
  derived and/or modified CDS sequence (opt3) from neuraminidase__InfluenzaA__ABI92393

SEQ ID NO: 143478 - RNA, 1410 nt, Artificial Sequence; identical to SEQ ID NO: 142375
  derived and/or modified CDS sequence (opt3) from neuraminidase__InfluenzaA__ABI92404

SEQ ID NO: 143479 - RNA, 1410 nt, Artificial Sequence
  derived and/or modified CDS sequence (opt3) from neuraminidase__InfluenzaA__ABI92415
augaaccccaaucagaagaucauuaccauaggcagcgugucccugacaaucucuacuauuugcuucuuuaugcaaaucgccauucucaucacgaccgucacacuucacuucaaacaguacgaguuuaacucaccuccaaauaaccagguuaugcugugugaaccgacuauaaucgagagaaauauuaccgaaaucguguauuugacaaacaccacuauugagaaggaaaucugccccaaauuagcugaguacaggaauuggaguaagccucagugugacauaacaggguucgcaccauuuagcaaagauaacuccauucggcugucugccggaggugacaucuggguaacccgcgagcccuaugugucgugcgauccugacaaguguuaccaauucgcgcuaggccaggggacgacucucaauaacguccauucaaaugauaccgugcacgaccgaacaccauaucguacucugcuuaugaacgaacugggaguucccuuucauuugggcaccaaacaggugugcauugcuuggagcaguuccucuugucacgaugguaaggccuggcuccaugucugcgugacaggggacgauaagaaugcaaccgccagcuucaucuacaacggaagacugguagacuccaucguuucauggaguaaaaagauucugaggacgcaggagagcgaaugugugugcauaaauggcacuuguacagucgugaugaccgauggcucugcuuccgggaaagcagacacuaagauccucuuuauugaggagggaaagaucgugcacacaucaaccuuaagcgguagugcccaacacgucgaagagugcucuugcuauccucgguacccaggcguucgcugugugugcagagauaacuggaaaggguccaacaggccgauaguagacauuaauaucaaggacuacagcaucgugucgucuuaugucuguuccggacuggugggcgauacgccccggaaaaacgacucaaguagcuccucucauugccuugauccuaauaacgaagagggugggcacggaguuaagggcugggcuuucgacgauggcaaugacguguggauggggcgcaccauuagcgaaaaauugcgaucaggauacgagacauuuaaggucaucgaggguuggaguaacccaaauuccaaacugcagauuaacagacaggugauaguagauaggggcaaucggagcggguauucuggaaucuucucaguugaaggcaagaguuguauuaaccguugcuuuuacguggagcuaauccgcgguagaaaggaagagacugaaguccucuggaccagcaauuccaucguggucuucugugggacaucuggcacuuauggaaccggcucguggcccgacggggccgauauuaacuucaugccuauauga

SEQ ID NO: 143480 - RNA, 1410 nt, Artificial Sequence; identical to SEQ ID NO: 142762
  derived and/or modified CDS sequence (opt3) from neuraminidase__InfluenzaA__ABI92426

SEQ ID NO: 143481 - RNA, 1410 nt, Artificial Sequence; identical to SEQ ID NO: 142762
  derived and/or modified CDS sequence (opt3) from neuraminidase__InfluenzaA__ABI92437

SEQ ID NO: 143482 - RNA, 1410 nt, Artificial Sequence; identical to SEQ ID NO: 142762
  derived and/or modified CDS sequence (opt3) from neuraminidase__InfluenzaA__ABI92448

SEQ ID NO: 143483 - RNA, 1410 nt, Artificial Sequence; identical to SEQ ID NO: 142762
  derived and/or modified CDS sequence (opt3) from neuraminidase__InfluenzaA__ABI92459

SEQ ID NO: 143484 - RNA, 1410 nt, Artificial Sequence
  derived and/or modified CDS sequence (opt3) from neuraminidase__InfluenzaA__ABI92470
augaaccccaaucagaagaucauuaccauaggcagcgugucccugacaaucgccacuauuugcuuccucaugcaaaucgcuauucuugucacgaccguuacacugcacuuuaaacaguacgaguguaacucuccuccaaauaaccaggugauguugugcgaaccgacuaucauagagagaaauaucaccgaaauuguauauuuaacaaacaccacuaucgagaaggaaauuugucccaaacuggcagaguacaggaauuggucaaagccucagugcaacaucacaggguucgccccauuuaguaaagacaauagcauacggcuauccgcgggaggugauauuugggugacccgcgagcccuaugucucuugugacccugauaagugcuaccaauucgcucucggccaggggacgacucugaacaauggacauucgaacgacaccgugcacgaucgaacaccauaucguacucuucugaugaaugaauugggcguucccuuucaucucgguaccaaacagguguguaucgccuggucaagcaguuccugccacgacgggaaggcauggcugcaugucugugugacaggagaugacgagaacgccaccgcuucuuucauuuacaauggcagacugguagauagcaucggcuccuggucaaagaaaauccucaggacgcaggaaagugagugcguuuguauuaacgggacuugcacaguggucaugaccgacggaagcgcaucugagaaggccgauacuaaaauauuauuuaucgaagaggguaagauugugcacacauccucacugagcggcagugcucaacacguggaagagugcucuuguuauccucgguacccagggguccgcugcguuuguagagacaacuggaagggauccaauaggccgaucguggauauaaacguaaaagacuacagcauugugucgucuuaugucugcuccggccuugugggugacacgccccggaagaaugauucaaguagcuccucucauuguuuggacccuaacaaugaagaagggggacacggcguuaaaggcugggccuucgaugacgggaacgauguguggaugggacgcaccaucagcgagaagcugcgaucagguuacgagaccuuuaaagucaucgagggcuggaguaagccaaauuccaaacuacagauuaacagacaggugaucguagacagggggaaucggagcggauauucuggcauuuucucaguugaaaguaagagcugcauaaaccguuguuuuuacguggagcucauccgcgguagaaagcaggaaacagagguccuguggacuuccaauucuauuguggucuucugcgggaccucgggcacauauggaacuggcagcuggcccgauggggcggacaucaaccuuaugccuaucuga

SEQ ID NO: 143485 - RNA, 1410 nt, Artificial Sequence; identical to SEQ ID NO: 142778
  derived and/or modified CDS sequence (opt3) from neuraminidase__InfluenzaA__ABI92481

SEQ ID NO: 143486 - RNA, 1410 nt, Artificial Sequence; identical to SEQ ID NO: 142778
  derived and/or modified CDS sequence (opt3) from neuraminidase__InfluenzaA__ABI92492

SEQ ID NO: 143487 - RNA, 1410 nt, Artificial Sequence
  derived and/or modified CDS sequence (opt3) from neuraminidase__InfluenzaA__ABI92503
augaaccccaaucagaagaucauuaccauaggcagcgugucccugacaaucgccacuauuugcuuccucaugcaaaucgcuauucuugucacgaccguuacacugcacuuuaaacaguacgaguguaacucuccuccaaauaaccaggugauguugugcgaaccgacuaucauagagagaaauaucaccgaaauuguauauuuaacaaacaccacuaucgagaaggaaauuugucccaaacuggaggaguacaggaauuggucaaagccucagugcaacaucacaggguucgcaccauuuaguaaagacaauagcauacggcuauccgccggaggugauauuugggugacccgcgaacccuaugucucuugugacccugauaagugcuaccaauucgcgcucggccaggggacgacucugaacaauggacauucgaacgacaccgugcacgaucgaacaccauaucguacucuucugaugaaugaguugggcguucccuuucaucucgguaccaaacagguguguaucgcuuggucaagcaguuccugccacgacgggaaggccuggcugcaugucugugugacaggagaugacgaaaacgcaaccgccucuuucauuuacaauggcagacugguagauagcaucggcuccuggucaaagaaaauccucaggacgcaggagagugagugcguuuguauuaacgggacuugcacaguggucaugaccgacggaagcgcuucugguaaggcagauacuaaaauauuauuuaucgaagagggcaagauugugcacacauccucacugagcgggagugcccaacacguggaagagugcucuuguuauccucgguacccaggaguccgcugcguuuguagagacaacuggaagggcuccaauaggccgaucguggauauaaacguaaaagacuacagcauugugucgucuuaugucugcuccggucuugugggggacacgccccggaagaaugauucaaguagcuccucucauuguuuggacccuaacaaugaagagggaggccacggcguuaaagggugggcuuucgaugacggaaacgauguguggaugggucgcaccaucagcgagaagcugcgaucaggcuacgaaaccuuuaaagucaucgagggguggaguaagccaaauuccaaacuacagauuaacagacaggugaucguagacaggggaaaucggagcggcuauucugguauuuucucaguugaaaguaagagcugcauaaaccguuguuuuuacguggagcucauccgcgggagaaagcaggaaacagagguccuguggacuuccaauucuauuguggucuucugcggcaccucgggaacauauggcacugggagcuggcccgauggagccgacaucaaccuuaugccuaucuga

SEQ ID NO: 143488 - RNA, 1410 nt, Artificial Sequence
  derived and/or modified CDS sequence (opt3) from neuraminidase__InfluenzaA__ABI92514
augaaccccaaucagaagaucauuaccauaggcagcgugucccugacaaucgccacuauuugcuuccucguccaaaucgcuauucuuguuacgaccgugacacugcacuuuaaacaguacgaguguaacucuccuccaaauaaccagguaauguugugcgaaccgacuaucauagagagaaauaucaccgaaauuguguauuuaacaaacaccacuaucgagaaggaaauuugucccaaacuggcagaguacaggaauuggucaaagccucagugcaaaaucacaggguucgccccauuuaguaaggacaacagcauacggcuauccgcgggaggugauauuugggucacccgcgagcccuaugugucuugugacccugauaagugcuaccaauucgcucucggccaggggacgacucugaauaaccgacauucgaaugacaccguucacgaucguacaccauauagaacucuucugaugaacgaauugggagugcccuuucaucucggcaccaaacaggucuguaucgccuggucaagcaguuccugccacgacgguaaggcauggcugcauguguguguaacaggggaugacgagaaugccaccgcuucuuucauuuacgauggaaggcugguugacagcaucggcuccuggaguaaaaagauccuccggacgcaggaaucagagugcguguguauuaacggcacuugcacagucgugaugaccgaugggagcgcaucuggacgcgccgacacuaaaauauuauuuaucgaggaagguaagauugugcacacauccaagcugucaggcagcgcucaacacgucgaggaaugcaguuguuauccuagauacccagggguuaggugcgugugucgggauaauuggaaaggaucuaaccgcccgaucguagacauaaacgugaaggacuacuccauugucagcucguaugugugcucuggccuuguuggugauacccccagaaagaaugacuccucaaguagcucccauuguuuggauccuaacaaugaggaagggggacacggcgugaaaggcugggccuucgacgauggggacgaugucuggaugggacgaacgaucucugagaaaagcaggucagguuacgagaccuuuaaggugaucgaaggcuggaguaaaccaaacuccaagcugcagauuaaucggcagguaaucguugagcgugggaacaugagcggauauucuggcauuuucucaguggaagguaagaguugcauaaaucgcuguuuuuacgucgagcuaaucagagggaggaaacaggaaacagaggugugguggacuagcaacuccauugucguguucugcggcaccucuggaacauauggcacugggucguggcccgacggagcggauaucaaucucaugccuaucuga

SEQ ID NO: 143489 - RNA, 1410 nt, Artificial Sequence
  derived and/or modified CDS sequence (opt3) from neuraminidase__InfluenzaA__ABI92525
augaaccccaaucagaagaucauuaccauaggcagcgugucccugacaaucgccacuauuugcuuccucaugcaaaucgcuauucuugucacgaccguuacacugcacuuuaaacaguacgaguguaacucuccuccaaauaaccaggugauguugugcgaaccgacuaucauagagagaaauaucaccgaaauuguauauuuaacaaacaccacuaucgagaaggaaauuugucccaaacuggcagaguacaggaauuggucaaagccucagugcaacaucacaggguucgccccauuuaguaaagacaauagcauacggcuauccgcgggaggugauauuugggugacccgcgagcccuaugucucuugugacccugauaagugcuaccaauucgcucucggccaggggacgacucugaacaauggacauucgaacgacaccgugcacgaucgaacaccauaucguacucuucugaugaaugaauugggcguucccuuucaucucgguaccaaacagguguguaucgccuggucaagcaguuccugccacgacgggaaggcauggcugcaugucugugugacaggagaugacgagaacgccaccgcuucuuucauuuacaauggcagacugguagauagcaucggcuccuggucaaagaaaauccucaggacgcaggaaagugagugcguuuguauuaacgggacuugcacaguggucaugaccgacggaagcgcaucugguaaggccgauacuaaaauauuauuuaucgaggaaggcaagauugugcacaucuccacacugucagggagcgcucaacacguggaggaaugcaguuguuauccucgguacccaggaguccgcugcguuuguagagacaacuggaagggcucuaauaggccgauaguggauauuaacguaaaagacuacuccaucgugagcucguaugucugcucuggucuugugggggacacgccccggaagaaugauuccuucucaaguagccauuguuuggacccuaacaaugaggaaggaggccacggcguuaaagggugggccuuugaugacggaaacgauguguggaugggucgcaccaucuccgagaagcugcgaucuggcuacgagaccuucaaagucauugaaggguggagcaagccaaauucaaaacuacagaucaacagacaggugauuguagagaggggaaaucggaguggcuauuccgguauauuuagcguugaagggaagucuugcaucaaccguuguuucuacguggagcucauucgcggcagaaaggaagagacagaggucugguggacuucaaauaguaucguggucuuuugcggaaccagcggcacauaugggacuggauccuggcccgacggugcggauaucaaccugaugccuauuuga

SEQ ID NO: 143490 - RNA, 1410 nt, Artificial Sequence
  derived and/or modified CDS sequence (opt3) from neuraminidase__InfluenzaA__ABI92536
augaaccccaaucagaagaucauuaccauaggcagcgugucccugacaaucgccacuauuugcuuccucaugcaaaucgcuauucuugucacgaccguuacacugcacuuuaaacaguacgaguguaacucuccuccaaauaaccaggugauguugugcgaaccgacuaucauagagagaaauaucaccgaaauuguauauuuaacaaacaccacuaucgagaaggaaaaaugucccaagcuggcagaguacaggaauuggucaaaaccucagugcaacauuacaggguucgccccauuuaguaaggacaauagcauccggcuauccgcgggaggugauauaugggugacccgcgagcccuaugucucuugugacccugauaagugcuaccaauucgcucucggccaggggacgacucugaacaauggacauucgaacgacaccgugcacgaucgaacaccauaucguacucuucugaugaaugaauugggcguucccuuucaucucgguaccagacagguguguauugccuggucaagcaguuccugccacgacgggaaagcauggcugcaugucugugugacaggagaugacgagaacgccaccgcuucuuucaucuacaauggcaggcugguagauagcauuggcuccuggucaaagaaaauccuccggacgcaggaaagugagugcguuuguaucaacgggacuugcacaguggucaugaccgacggaagcgcaucugguaaggccgauacuaaaauuuuauuuauagaggaaggcaagaucgugcacauuuccacacugucagggagcgcucaacacguggaggaaugcaguuguuauccucgcuacccaggagucagaugcguuuguagggacaacuggaagggcucuaaucggccgaucguggauauaaacguaaaagacuacuccauugugagcucguaugucugcucuggucuugugggggacacccccaggaagaaugauuccuucucaaguagccauuguuuggacccuaacaaugaggaaggaggccacggcguuaaagggugggccuuugaugacggaaacgauguguggaugggucgaacgaucuccgagaagcugagaucuggcuacgagaccuucaaagucaucgaaggguggagcaagccaaauucaaaacuacagauuaaccgccaggugaucguagagcggggaaaucguaguggcuauuccgguauuuuuagcguugaagggaagucuugcauaaaccgcuguuucuacguggagcucaucagaggcaggaaggaagagacagaggucugguggacuucaaauaguauuguggucuuuugcggaaccagcggcacauauggggcgggauccuggcccgacggugcagauaucaaccugaugccuaucuga

SEQ ID NO: 143491 - RNA, 1410 nt, Artificial Sequence
  derived and/or modified CDS sequence (opt3) from neuraminidase__InfluenzaA__ABI92547
augaaccccaaucagaagaucauuaccauaggcagcgugucccugacaaucgccacuauuugcuuccucaugcaaaucgcuauucuugucacgaccguuacacugcacuuuaaacaguacgaguguaacucuccuccaaauaaccaggugauguugugcgaaccgacuaucauagagagaaauaucaccgaaauuguauauuuaacaaacaccacuaucgagaaggaaaugugucccaaacuggcagaguacaggaauuggucaaagccucagugcaacauuacaggguucgccccauuuaguaaagacaauagcauccggcuauccgcgggaggugauauaugggugacccgcgagcccuaugucucuugugacccugauaagugcuaccaauucgcucucggccaggggacgacucugaacaauggacauucgaacgacaccgugcacgaucgaacaccauaucguacucuucugaugaaugaauugggcguucccuuucaucucgguaccagacagguguguauugccuggucaagcaguuccugccacgacgggaaggcauggcugcaugucugugugacaggagaugacgagaacgccaccgcuucuuucaucuacaauggcaggcugguagauagcauuggcuccuggaguaaaaagauccuccggacgcaggaaucagagugcguuuguaucaacgggacuugcacaguggucaugaccgacggaagcgcaucugguaaagccgauacuaagauuuuauuuauagaggaaggcaaaaucgugcacauuuccacacugucagggagcgcucaacacguggaggaaugcaguuguuauccucgcuacccaggagucagaugcguuuguagggacaacuggaagggcucuaaucggccgaucguggauauaaacguaaaggacuacuccauugugagcucguaugucugcucuggucuugugggggacacccccaggaaaaaugauuccuucucaaguagccauuguuuggacccuaacaaugaggaaggaggccacggcguuaaggggugggccuuugaugacggaaacgauguguggaugggucgaacgaucuccgagaaacugagaucuggcuacgagaccuucaaggucaucgaaggguggagcaaaccaaauucaaagcuacagauuaaccgccaggugaucguagagcggggaaaucguaguggcuauuccgguauuuuuagcguugaagggaaaucuugcauaaaccgcuguuucuacguggagcucaucagaggcaggaaggaagagacagaggucugguggacuucaaauaguauuguggucuuuugcggaaccagcggcacauauggggcgggauccuggcccgacggugcagauaucaaccugaugccuaucuga

SEQ ID NO: 143492 - RNA, 1410 nt, Artificial Sequence
  derived and/or modified CDS sequence (opt3) from neuraminidase__InfluenzaA__ABI92558
augaaccccaaucagaagaucauuaccauaggcagcgugucccugacaaucgccacuauuugcuuccucaugcaaaucgcuauucuugucacgaccguuacacugcacuuuaaacaguacgaguguaacucuccuccaaauaaccaggugauguugugcgaaccgacuaucauagagagaaauaucaccgaaauuguauauuuaacaaacaccacuaucgagaaggaaauuugucccaaacuggcagaguacaggaauuggucacggccucagugcaacaucacaggguucgccccauuuaguaaggacaauagcauacgccuauccgcgggaggugauauuugggugacccgagagcccuaugucucuugugacccugauaaaugcuaccaauucgcucucggccaggggacgacucugaacaauggacauucgaacgacaccgugcacgaucguacaccauauagaacucuucugaugaaugaauugggcguucccuuucaucucgguacccgacagguguguaucgccuggucaagcaguuccugccacgacgggaaggcauggcugcaugucugugugacaggagaugacgagaacgccaccgcuucuuucauuuacaauggccggcugguagauagcaucggcuccuggucaaagaaaauccuccgcacgcaggaaagugagugcguuuguauuaacgggacuugcacaguggucaugaccgacggaagcgcaucugguaaggccgauacuaaaauauuauuuaucgaggaaggcaagauugugcacaucuccacacugucagggagcgcucaacacguggaggaaugcaguuguuauccuagauacccaggagucaggugcguuugucgggacaacuggaaaggcucuaaucgcccgauaguggauauuaacguaaaggacuacuccaucgugagcucguaugucugcucuggucuugugggggacacccccaggaagaaugauuccuucucaaguagccauuguuuggacccuaacaaugaggaaggaggccacggcguuaaagggugggccuuugaugacggaaacgauguguggauggguagaacgaucuccgagaagcugaggucuggcuacgagaccuucaaagucauugaaggguggagcaagccaaauucaaaacuacagaucaaccgucaggugauuguagagcggggaaaucgcaguggcuauuccgguauauuuagcguugaagggaagucuugcaucaacagauguuucuacguggagcucauuaggggccggaaagaagagacagaggucugguggacuucaaauaguaucguggucuuuugcggaaccagcggcacauaugggacuggauccuggcccgacggugcggauaucaaccugaugccuauuuga

SEQ ID NO: 143493 - RNA, 1410 nt, Artificial Sequence
  derived and/or modified CDS sequence (opt3) from neuraminidase__InfluenzaA__ABI92569
augaaccccaaucagaagaucauuaccauaggcagcgugucccugacaaucgccacuauuugcuuccucaugcaaaucgcuauucuugucacgaccguuacacugcacuuuaaacaguacgaguguaacucuccuccaaauaaccaggugauguugugcgaaccgacuaucauagagagaaauaucaccgaaauuguauauuuaacaaacaccacuaucgagaaggaaauuugucccaaacuggcagaguacaggaauuggucaaagccucagugcaacaucacaggguucgccccauuuaguaaagacaauagcauacggcuauccgcgggaggugauauuugggugacccgcgagcccuaugucucuugugacccugauaagugcuaccaauucgcucucggccaggggacgacucugaacaauggacauucgaacgacaccgugcacgaucgaacaccauaucguacucuucugaugaaugaauugggcguucccuuucaucucgguaccagacagguguguaucgccuggucaagcaguuccugccacgacgggaaggcauggcugcaugucugugugacaggagaugacgagaacgccaccgcuucuuucauuuacaauggcaaacugguagauagcaucggcuccuggucaaagaaaauccucaggacgcaggaaagugagugcguuuguauuaacgggacuugcgcaguggucaugacagacggaagcgccucugguaaggcugauaccaaaauauuauuuaucgaggaaggcaagauugugcacaucuccacucugucagggagcgcccaacacguggaggaaugcaguuguuauccucgguacccaggaguccgcugcguuuguagagacaacuggaagggcucuaauaggccgauaguggauauuaacguaaaagacuacuccaucgugagcucguaugucugcucuggucuugugggggacacaccccggaagaaugauuccuucucaaguagccauuguuuggacccuaacaaugaggaaggaggccacggcguuaaagggugggcguuugaugacggaaacgauguguggaugggucgcaccaucuccgagaagcugcgaucuggcuacgagacguucaaagucauugaaggguggagcaagccaaauucaaaacuacagaccaacagacaggugaucguagagaggggaaaucggaguggcuauuccgguauuuuuagcguugaagggaagucuugcauaaaccguuguuucuacguggagcucauccgcggcagaaaggaagagacagaggucugguggacuucaaauaguauuguggucuuuugcggaaccagcggcacauaugggacuggauccuggcccgacggugcagauaucaaccugaugccuaucuga

SEQ ID NO: 143494 - RNA, 1410 nt, Artificial Sequence
  derived and/or modified CDS sequence (opt3) from neuraminidase__InfluenzaA__ABI92580
augaaccccaaucagaagaucauuaccauaggcagcgugucccugacaaucgccacuauuugcuuccucaugcaaaucgcuauucuugucacgaccguuacacugcacuuuaaacaguacgaguguaacucuccuccaaauaacaaggugauguugugcgaaccgacuaucauagagagaaauaucaccgaaauuguauauuuaacaaacaccacuaucgagaaagaaauuugucccaagcuggcagaguacaggaauuggucaaaaccucagugcaacaucacaggguucgccccauuuaguaaggacaauagcauacggcuauccgcgggaggugauauuugggugacccgcgagcccuaugucucuugugacccugauaagugcuaccaguucgcucucggccaagggacgacucugaacaauggacauucgaacgacaccgugcacgaucgaacaccauaucguacucuucugaugaaugaauugggcguucccuuucaucucgguaccagacagguguguaucgccuggucaagcaguuccugccacgacgggaaagcauggcugcaugucugugugacaggagaugacgagaacgccaccgcuucuuucauuuacaauggcaggcugguagauagcaucggcuccuggucaaagaaaauccuccggacgcaggaaagugagugcguuuguauuaacgggacuugcacaguggucaugaccgacggaagcgcaucugguaaggccgauacuaaaauauuauuuaucgaggaaggcaagauugugcacaucuccacacugucagggagcgcucagcacguggaggaaugcaguuguuauccucgcuacccaggagucagaugcguuuguagggacaacuggaagggcucuaaucggccgauaguggauauuaacguaaaagacuacuccaucgugagcucguaugucugcucuggucuugugggggacacccccaggaagaaugauuccuucucaaguagccauuguuuggacccuaacaaugaggaaggaggccacggcguuaaagggugggccuuugaugacggaaacgauguguggaugggucgaacgaucuccgagaagcugagaucuggcuacgagaccuucaaagucauugaaggguggagcaagccaaauucaaaacuacaaaucaaccgccaggugauuguagagcggggaaaucguaguggcuauuccgguauauuuagcguugaagggaagggcugcaucaaccgcuguuucuacguggagcucauuagaggaaggaaggaagagacagaggucugguggacuucuaauucaaucguggucuuuugcggcaccagugggacauauggaacugguagcuggcccgacggcgcggauaucaaccugaugccuauuuga

SEQ ID NO: 143495 - RNA, 1410 nt, Artificial Sequence
  derived and/or modified CDS sequence (opt3) from neuraminidase__InfluenzaA__ABI92591
augaaccccaaucagaagaucauuaccauaggcagcgugucccugacaaucgccacuauuugcuuccucaugcaaaucgcuauucuugucacgaccguuacacugcacuuuaaacaguacgaguguaacucuccuccaaauaaccaggugauguugugcgaaccgacuaucauagagagaaauaucaccgaaauuguauauuuaacaaacaccacuaucgagaaggaaauuugucccaaacuggcagaguacaggaauuggucaaagccucagugcaacaucacaggguucgccccauuuaguaaagacaauagcauacggcuauccgcgggaggugauauuugggugacccgcgagcccuaugucucuugugacccugauaagugcuaccaauucgcucucggccaggggacgacucugaacaauggacauucgaacgacaccgugcacgaucgaacaccauaucguacucuucugaugaaugaauugggcguucccuuucaucucagaacccgacagguguguaucgccuggucaagcaguuccugccacgacgguaaggcauggcugcaugucugugugacaggggaugacgagaacgccaccgcuucuuucauuuacaauggacggcugguagauagcaucggcuccuggaguaaaaagauccuccgcacgcaggaaucagagugcguuuguauuaacggcacuugcacaguggucaugaccgacgggagcgcaucuggaaaagccgauacuaagauauuauuuaucgaggaagguaaaauugugcacaucuccacacugucaggcagcgcucaacacguggaggaaugcaguuguuauccuagauacccaggggucaggugcguuugucgggacaacuggaagggaucuaaucgcccgauaguggauauuaacguaaaggacuacuccaucgugagcucguaugucugcucuggccuugugggugacacccccaggaaaaaugauuccuugucaaguagccauugucuggacccuaacaaugaggaagggggacacggcguuaagggcugggccuucgaugacgggaacgauguguggaugggaagaacgaucuccgagaaacuaaggucugguuacgagaccuuuaaggucauugaaggcuggagcaaaccaaauucaaagcuccagaucaaccgucaggugauuguagagcgggggaaucgcaguggauauuccggcauauucagcguugaagguaaagggugcaucaacagauguuuuuacguggagcugauuaggggccggaaggaagagacagaggucugguggacuucuaauucaaucguggucuucugcggaaccaguggcacauaugggacuggaagcuggcccgacggugcggauaucaaccuuaugccuauuuga

SEQ ID NO: 143496 - RNA, 1410 nt, Artificial Sequence
  derived and/or modified CDS sequence (opt3) from neuraminidase__InfluenzaA__ABI92602
augaaccccaaucagaagaucauuaccauaggcagcgugucccugacaaucgccacuauuugcuuccucaugcaaaucgcuauucuugucacgaccguuacacugcacuuuaaacaguacgaguguaacucuccuccaaauaaccaggugauguugugcgaaccgacuaucauagagagaaauaucaccgaaauuguauauuuaacaaacaccacuaucgagaaggaaauuugucccaaacuggcagaguacaggaauuggucaaagccucagugcaacaucacaggguucgccccauuuaguaaagacaauagcauacggcuauccgcgggaggugauauuugggugacccgcgagcccuaugucucuugugacccugauaagugcuaccaauucgcucucggccaggggacgacucugaacaauggacauucgaacgacaccgugcacgaucgaacaccauaucguacucuucugaugaaugaauugggcguucccuuucaucucgguaccagacagguguguaucgccuggucaagcaguuccugccacgacgggaaggcauggcugcaugucugugugacaggagaugacgagaacgccaccgcuucucugauuuacaauggcaggcucguagauagcaucggcuccuggaguaaaaagaucuuacggacgcaggaaucagagugcguuuguauuaacgggacuugcacaguggucaugaccgacggaagcgcaucugguaaagccgauacuaagauacuguucaucgaggaaggcaaaauugugcacaucuccacacuuucagggagcgcucaacacguggaggaaugcaguuguuauccucgcuacccaggagucagaugcguuuguagggacaacuggaagggcucuaaucggccgauaguggauauuaacguaaaggacuacuccaucgugagcucguaugucugcucugguuuggugggggacacgccccgcaaaaaugauuccuuuucaaguagccauugucuggacccuaacaaugaggaaggaggccacggcguuaaggggugggccuucgaugacggaaacgauguguggaugggucgaaccaucuccgagaaacuaagaucuggcuacgagaccuuuaaggucauugaaggguggagcaaaccaaauucaaagcuccaggugaacaggcagguaaucguugagcggggaaaucguaguggcuauuccgguauuuucagcguggaagggaaaucuugcauaaaccgcuguuuuuacgucgagcugaucagaggcaggaaggaagagacagaggugugguggacuucaaauaguauugucguguucugcggaaccagcggcacauaugggacuggauccuggcccgacggugcggauaucaaccuuaugccuaucuga

SEQ ID NO: 143497 - RNA, 1410 nt, Artificial Sequence
  derived and/or modified CDS sequence (opt3) from neuraminidase__InfluenzaA__ABI92613
augaaccccaaucagaagaucauuaccauaggcagcgugucccugacaaucgccacuauuugcuuccucaugcaaaucgcuauucuugucacgaccguuacacugcacuuuaaacaguacgaguguaacucuccuccaaauaaccaggugauguugugcgaaccgacuaucauagagagaaauaucaccgaaauuguauauuuaacaaacaccacuaucgagaaggaaauuugucccaaacuggcagaguacaggaauuggucaaagccucagugcaacaucacaggguucgccccauuuaguaaagacaauagcauacggcuauccgcgggaggugauauuugggugacccgcgagcccuaugucucuugugacccugauaagugcuaccaauucgcucucggccaggggacgacucugaacaauggacauucgaacgacaccgugcacgaucgaacaccauaucguacucuucugaugaaugaauugggcguucccuuucaucucgguaccagacagguguguaucgccuggucaagcaguuccugccacgacgggaaggcauggcugcaugucugugugacaggagauaacgagaaugccaccgcuucuuucauuuacaacggcaaacugguagacagcaucggcuccuggucaaagaaaauccucaggacgcaggaaagugagugcguuuguauuaacgggacuugcgcaguggucaugacagauggaagcgccucugguaaggcugacaccaaaauauuauuuaucgaggaaggcaagauugugcacaucuccacucugucagggagcgcccaacacguggaggaaugcaguuguuauccucgguacccaggaguccgcugcguuuguagagauaauuggaagggcucuaacaggccgauaguggacauuaauguaaaagauuacuccaucgugagcucguaugucugcucuggucuugugggggacacaccccggaagaacgacuccuucucaaguagccauuguuuggauccuaauaacgaggaaggaggccacggcguuaaagggugggcguuugacgauggaaaugacguguggaugggucgcaccaucuccgagaagcugcgaucuggcuacgagacguucaaagucauugaaggguggagcaagccaaacucaaaacuacagaccaauagacaggugaucguagagaggggaaaccggaguggcuauuccgguauuuuuagcguugaagggaagucuugcauaaaucguuguuucuacguggagcucauccgcggcagaaaggaagagacagaggucugguggacuucaaacaguauuguggucuuuugcggaaccagcggcacauaugggacuggauccuggcccgauggugcagacaucaaucugaugccuaucuga

SEQ ID NO: 143498 - RNA, 1410 nt, Artificial Sequence
  derived and/or modified CDS sequence (opt3) from neuraminidase__InfluenzaA__ABI92624
augaaccccaaucagaagaucauuaccauaggcagcgugucccugacaaucgccacuauuugcuuccucaugcagaucgcuauucuugucacgaccguuacacugcacuuuaaacaguacgaguguaacucuccuccaaauaaccaggugauguugugcgaaccgacuaucauagagagaaauaucaccgaaauuguauauuuaacaaacaccacuaucgagaaggaaauuugucccaaacuggcagaguacaggaauuggucaaagccucagugcaacaucacaggguucgccccauuuaguaaagacaauagcauacggcuauccgcgggaggugauauuugggugauccgcgagcccuaugucucuugugacccugauaagugcuaccaauucgcucucggccaggggaccacgcugaacaauggacauucgaacgacacugugcacgaucgaaccccauaucguacacuucugaugaaugaauugggcguucccuuucaucucgguacuagacagguguguauugccuggucaagcaguuccugccacgacgggaaggcauggcugcaugucugugugaccggagaugacgagaacgccacagcuucuuucaucuacaauggcaggcugguagauagcaucggcuccuggaguaaaaagauucuccggacccaggaaucagagugcguuuguauaaacgggacgugcacuguggucaugacagacggaagcgcaucugguaaagccgauaccaagaucuuauuuauugaggaaggcaaaaucgugcacauauccacucugucagggagcgcucaacacguggaggaaugcaguuguuauccucgcuacccaggagucagaugcguuuguagggacaacuggaagggcucuaaucggccgauuguggauaucaacguaaaggaccauuccaucgugagcucguacgucugcucuggucuugugggggacacaccccgcaaaaaugauuccuucucaaguagccacuguuuggacccuaacaaugaggaaggaggccauggcguuaaggggugggccuuugaugacggaaacgauguguggaugggucgaaccauuuccgagaaacugagaucuggcuaugagacguucaaggucaucgaaggguggagcaaaccaaauucaaagcuacagauuaacaggcaagugauaguagagcggggaaaucguaguggcuacuccgguaucuuuagcguugaagggaaaucuugcauuaaccgcuguuucuauguggagcucaucagaggcaggaaggaagagaccgaggucugguggacaucaaauaguaucguggucuuuugcggaacuagcggcaccuacgggacaggauccuggcccgacggugcggauauuaaccugaugccuauauga

SEQ ID NO: 143499 - RNA, 1410 nt, Artificial Sequence
  derived and/or modified CDS sequence (opt3) from neuraminidase__InfluenzaA__ABI92635
augaaccccaaucagaagaucauuaccauaggcagcgugucccugacaaucgccacuauuugcuuccucaugcagaucgcuauucuugucacgaccguuacacugcacuuuaaacaguacgaguguaacccuccaccgaauaaccaggugauguugugcgaacccacuaucauagagagaaauaucaccgaaauuguauauuuaacaaacaccacuaucgagaaggaaauuuguccuaaacuggcagaguacaggaauuggucuaagccacagugcaaccuaacaggguucgcccccuuuucaaaagacaauaguauccggcucagcgcgggaggugauauaugggugacccgcgagccuuaugucuccugugacccagauaagugcuaccaauucgcucugggccaggggacgacucuuaacaauggacauucuaacgacaccgugcacgaucgaacacccuaucguacucuguugaugaaugaacucggcguuccuuuucaucuggguaccagacagguguguauugccuggucgucaagcaguugccacgacgggaaggcauggcugcaugucugugugacaggagaugacgagaacgccaccgcuuccuucaucuacaauggcaggcucguagauucuauuggcagcugguccaaaaagaucuuacggacgcaggaaucagagugcguuuguaucaacgggacuugcacaguggucaugaccgacggaagugcaagcgguaaagccgauacuaagauuauauuuaucgaggaaggcaaaauugugcacacaucuacccuguccgggucagcucaacacguggaggaaugcagcuguuauccacgcuacccgggagucagaugcguuuguagggacaacuggaagggcaguaaucggcccaucguggauauaaacguaaaggacuacucuauuguguccagcuaugucugcucgggucuugugggggacacgccucgcaaaaaugauucuuucuccucaagucauuguuuggacccaaacaaugaggaaggaggccacggcguuaaggggugggccuuugaugacggaaacgauguguggaugggucgaaccaucagcgagaaacugagauccggcuacgagacauucaaggucaucgaaggguggucuaaacccaauagcaagcuacagacuaacaggcaagugauuguagagcggggaaaucguucaggcuauagugguaucuuuuccguugaagggaaaagcugcauuaaccgcuguuucuacguggagcucauaagaggcaggaaggaagagaccgaggucugguggacaucuaauucaaucguggucuuuugcggaaccaguggcacuuaugggacaggaagcuggccugacggugcggauauuaaccugaugccaaucuga

SEQ ID NO: 143500 - RNA, 1410 nt, Artificial Sequence; identical to SEQ ID NO: 142193
  derived and/or modified CDS sequence (opt3) from neuraminidase__InfluenzaA__ABI92646

SEQ ID NO: 143501 - RNA, 1410 nt, Artificial Sequence; identical to SEQ ID NO: 142193
  derived and/or modified CDS sequence (opt3) from neuraminidase__InfluenzaA__ABI92657

SEQ ID NO: 143502 - RNA, 1410 nt, Artificial Sequence
  derived and/or modified CDS sequence (opt3) from neuraminidase__InfluenzaA__ABI92668
augaaccccaaucagaagaucauuaccauaggcagcgugucccugacaaucgccacuauuugcuuccucaugcaaaucgcuauucuugucacgaccguuacacugcacuuuaaacagcaugaguguaacucuccuccaaauaaccaggugauguugugcgaaccgacuaucauagagagaaauaucaccgaaauuguauacuuaacaaacaccacuaucgagaaggaaauuugucccaaacuggcagaguauaggaauuggucaaagccucagugcaacaucacaggguucgccccauuuaguaaagacaauagcauacggcuauccgcgggaggugauauuugggugacccgcgagcccuacgucucuuguggcccugacaagugcuaucaauucgcucucgggcagggaacgacucugaacaauggccacucgaacgauaccgugcaugaccgaacaccauaccguacucuucugaugaaugaauuggguguucccuuucaccucgggaccagacagguguguaucgccuggucaagcaguuccugccaugauggaaaggcauggcugcacgucugugugacaggcgacgauaaaaacgccaccgcuucuuucauuuauaauggcaggcugguagacagcaucggguccuggucaaagaaaauccuccggacgcaggagagugaaugcguuuguauuaacggaacuugcacaguggucaugaccgaugguagcgcaucuggcaaggccgacacuaaaauauuauuuaucgaggaggggaagauugugcacaucuccacacugucaggaagcgcucaacauguggaagagugcaguuguuacccucgcuauccaggcgucagaugcguuuguagggauaacuggaaggguucuaaucggccgauaguggacauuaacguaaaagauuacuccaucgugagcucguacgucugcucugggcuugugggagacacccccaggaagaaugacuccuucucaaguagccacuguuuggauccuaacaaugaagagggcggccaugggguuaaaggaugggccuuugacgaugguaacgacguguggaugggccgaacgaucuccgaaaagcugagaucuggguaugagaccuucaaagucauugagggauggagcaagccaaauucaaaacuacagaucaaccgccaggugauuguagaacggggcaaucguagugguuacuccgggauauuuagcguugagggcaagucuugcaucaaccgcuguuucuauguggaacucauuagaggaaggaaggaggaaacagaggucugguggacuucaaauaguaucguggucuuuugcggcaccagcgggacauacggaacugguuccuggcccgauggcgcggacaucaaccugaugccuauuuga

SEQ ID NO: 143503 - RNA, 1410 nt, Artificial Sequence; identical to SEQ ID NO: 142639
  derived and/or modified CDS sequence (opt3) from neuraminidase__InfluenzaA__ABI92679

SEQ ID NO: 143504 - RNA, 1410 nt, Artificial Sequence; identical to SEQ ID NO: 142193
  derived and/or modified CDS sequence (opt3) from neuraminidase__InfluenzaA__ABI92701

SEQ ID NO: 143505 - RNA, 1410 nt, Artificial Sequence
  derived and/or modified CDS sequence (opt3) from neuraminidase__InfluenzaA__ABI92712
augaaccccaaucagaagaucauuaccauaggcagcgugucccugacaaucgccacuauuugcuuccucaugcagaucgcuauucuugucacgaccguuacacugcacuuuaaacagcaugaguguaacucuccuccaaauaaccaggcaauguugugcgaaccgacuaccacagagagaaauaccacugaaaucguguacuuaacaaacaccacgauagagaaggaaaucugucccaaacugguagaguauaggaauuggucaaagccucagugcaacauuacuggguucgccccauuuaguaaagacaauagcauccggcuauccgcgggaggugauauuugggugacccgcgagcccuacgucucuugugacccugauaagugcuaucaauucgcucucggccaggggacaacucugaacaauggacacucgaacgacaccgugcaugaucgaacaccauaccguacccuucugaugaaugaauugggcguucccuuucaccucgguacgagacagguguguaucgccuggucaagcaguuccugccaugacgggaaggcauggcugcacgucugugugacuggagaugacaaaaacgccacagcuucuuucauauauaauggcaggcugguagauagcauuggcuccuggucaaagaaaauccuccggacccaggagagugaaugcguuuguauuaacgggacuugcacaguggucaugaccgacggaagcgcaucugguaaggccgauacgaaaaucuuauuuaucgaggagggcaagauugugcacauauccacccugucagggagcgcucaacauguggaagagugcaguuguuacccucgcuauccaggagucagaugcguuuguagggacaacuggaagggcucuaaucggccgaucguggauauuaacguaaaagacuacuccaucgugagcucguacgucugcucuggucuugugggggacacaccccgcaagaaugauuccuucucaaguagccacuguuuggacccuaacaaugaagagggaggccauggcguuaaagggugggccuuugaugacggaaacgauguguggaugggucgaacuauauccgaaaagcugagaucuggcuaugagaccuucaaagucauugagggguggagcaagccaaauucaaaacuacagaucaacaggcaagugaucguagaacggggaaaucguaguggcuacuccgguauuuuuagcguugaggggaagucuugcaucaaccgcuguuucuauguggaacucauuagaggcaggaaggaggaaacagaggucugguggacuucaaauaguauaguggucuuuugcggaaccagcggcacauacgggaccggauccuggcccgacggugcggauaucaaccugaugccuauuuga

SEQ ID NO: 143506 - RNA, 1410 nt, Artificial Sequence
  derived and/or modified CDS sequence (opt3) from neuraminidase__InfluenzaA__ABI92723
augaaccccaaucagaagaucauuaccauaggcagcgugucccugacaaucgccacuauuugcuuccucaugcaaaucgcuauucuugucacgaccguuacacugcacuuuaaacagcaugaguguaacucuccuccaaauaaccaggugauguugugcgaaccgacuaucauagagagaaauaucaccgaaauuguauacuuaacaaacaccacuaucgagaaggaaauuugucccaaacugguggaguauaggaauuggucaaagccucagugcaacaucacaggguucgcaccauuuaguaaagacaauagcauacggcuauccgccggaggugauauuugggucacccgcgagcccuacgugucuugugacccugauaagugcuaucaauucgcgcucggccaggggacgacucugaacaauggacacucgaacgacaccguucaugaucgaacaccauaccguacucuucugaugaaugaauugggcgugcccuuucaccucgguaccaagcaggucuguaucgcuuggucaagcaguuccugccaugacgggaaagccuggcugcacguguguguaacaggagaugacaagaacgcaaccgccucuuucauuuauaauggcagacugguugauagcaucggcuccuggaguaaaaagauccucaggacgcaggagucagaaugcguguguauuaacgggacuugcacagucgugaugaccgacggaagcgcuucugguaaagcagauacuaagauauuauuuaucgaggagggcaagauugugcacaucuccacacugucagggagcgcccaacaugucgaagagugcaguuguuacccucgguauccaggaguucgcugcguguguagagacaacuggaaaggcucuaauaggccgauaguagauauuaacgugaaggacuacuccaucgucagcucguacgugugcucuggucuuguuggggacacgccccggaaaaaugauuccuucucaaguagccacuguuuggacccuaacaaugaagagggaggccauggcgugaaggggugggcuuuugaugacggaaacgaugucuggaugggucgcaccaucuccgaaaaacugcgaucuggcuaugagaccuucaaggugauugagggguggagcaaaccaaauucaaagcuacagaucaacagacagguaauuguugaaaggggaaaucggaguggcuacuccgguauauuuagcguggaggggaagucuugcaucaaccguuguuucuaugucgaacucauucgcggcagaaaagaggaaacagaggugugguggacuucaaauaguaucgucguguuuugcggaaccagcggcacauacgggacuggauccuggcccgacggugccgauaucaaccugaugccuauuuga

SEQ ID NO: 143507 - RNA, 1410 nt, Artificial Sequence; identical to SEQ ID NO: 142193
  derived and/or modified CDS sequence (opt3) from neuraminidase__InfluenzaA__ABI92734

SEQ ID NO: 143508 - RNA, 1410 nt, Artificial Sequence; identical to SEQ ID NO: 142639
  derived and/or modified CDS sequence (opt3) from neuraminidase__InfluenzaA__ABI92745

SEQ ID NO: 143509 - RNA, 1410 nt, Artificial Sequence
  derived and/or modified CDS sequence (opt3) from neuraminidase__InfluenzaA__ABI92756
augaaccccaaucagaagaucauuaccauaggcagcgugucccugacaaucgccacuauuugcuuccucaugcaaaucgcuauucuugucacgaccguuacacugcacuuuaaacagcaugaguguaacucuccuccaaauaaccaggugaucuugugcgaaccgacuauaaucgagagaaauauuaccgaaaucguauacuuaacaaacaccacuauugagaaggaaaucugucccaaacuggcagaguauaggaauuggucaaagccucagugcaacauaacaggguucgccccauuuaguaaagacaauagcauucggcuauccgcgggaggugauaucugggugacccgcgagcccuacgucucuugugacccugauaagugcuaucaauucgcucucggccaggggacgacucugaacaauggacacucgaacgacaccgugcaugaucgaacaccauaccguacucuucugaugaaugaauugggcguucccuuucaccucgguaccagacagguguguauugccuggucaagcaguuccugccaugacgggaaggcauggcugcacgucugugugacaggagaugacaaaaacgccaccgcuucuuucaucuauaauggcaggcugguagauagcaucggcuccuggucaaagaaaauucuccggacgcaggagagugaaugcguuuguauaaacgggacuugcacaguggucaugaccgacggaagcgcaucugguaaggccgauacuaaaaucuuauuuauugaggagggcaagaucgugcacauauccacacugucagggagcgcucaacauguggaagagugcaguuguuacccucgcuauccaggagucagaugcguuuguagggacaacuggaagggcucuaaucggccgauuguggauaucaacguaaaagacuacuccaucgugagcucguacgucugcucuggucuugugggggacacccccaggaagaaugauuccuucucaaguagccacuguuuggacccuaacaaugaagagggaggccauggcguuaaagggugggccuuugaugacggaaacgauguguggaugggucgaacgauuuccgaaaagcugagaucuggcuaugagaccuucaaagucaucgagggguggagcaagccaaauucaaaacuacagauuaaccgccaggugauaguagaacggggaaaucguaguggcuacuccgguaucuuuagcguugaggggaagucuugcauuaaccgcuguuucuauguggaacucaucagaggcaggaaggaggaaacagaggucugguggacuucaaauaguaucguggucuuuugcggaaccagcggcacauacgggacuggauccuggcccgacggugcggauauuaaccugaugccuauauga

SEQ ID NO: 143510 - RNA, 1410 nt, Artificial Sequence
  derived and/or modified CDS sequence (opt3) from neuraminidase__InfluenzaA__ABI92767
augaaccccaaucagaagaucauuaccauaggcagcgugucccugacaaucgccacuauuugcuuccucaugcaaaucgcuauucuugucacgaccguuacacugcacuuuaaacagcaugaguguaacucuccuccaaauaaccaggugauguugugcgaaccgacuaucauagagagaaauaucaccgaaauuguauacuuaacaaacaccacuaucgagaaggaaauuugucccaaacuggcagaguauaggaauuggucaaagccucagugcaacaucacaggguucgccccauuuaguaaagacaauagcauacggcuauccgcgggaggugauauuugggugacccgcgagcccuacgucucuugugacccugauaagugcuaucaauucgcucucggccaggggacgacucugaacaauggacacucgaacgacaccgugcaugaucgaacaccauaccguacucuucugaugaaugaauugggcguucccuuucaccucgguaccagacagguguguaucgccuggucaagcaguuccugccaugacgggaaggcauggcugcacgucugugugacaggagaugacaaaaacgccaccgcuucuuucauuuauaauggcaggcugguagauagcaucggcuccuggucaaagaaaauccuccggacgcaggagagugaaugcguuuguauuaacgggacuugcacaguggucaugaccgacggaagcgcaucugguaaggccgauacuaaaauauuauuuaucgaggagggcaagauugugcacaucuccacacugucagggagcgcucaacauguggaagagugcaguuguuacccucgcuauccaggagucagaugcguuuguagggacaacuggaagggcucuaaucggccgauaguggauauuaacguaaaagacuacuccaucgugagcucguacgucugcucuggucuugugggggacacccccaggaagaaugauuccuucucaaguagccacuguuuggacccuaacaaugaagagggaggccauggcguuaaagggugggccuuugaugacggaaacgauguguggaugggucgaacgaucuccgaaaagcugagaucuggcuaugagaccuucaaagucauugagggguggagcaagccaaauucaaaacuacagaucaaccgccaggugauuguagaacggggaaaucguaguggcuacuccgguauauuuagcguugaggggaagucuugcaucaaccgcuguuucuauguggaacucauuagaggcaggaaggagaaaacagaagucugguggacuucaaauaguaucguggucuuuugcggaaccagcggcacauacgggacuggauccuggcccgacggugcggauaucaaccugaugccuauuuga

SEQ ID NO: 143511 - RNA, 1410 nt, Artificial Sequence; identical to SEQ ID NO: 142193
  derived and/or modified CDS sequence (opt3) from neuraminidase__InfluenzaA__ABI92778

SEQ ID NO: 143512 - RNA, 1410 nt, Artificial Sequence; identical to SEQ ID NO: 142375
  derived and/or modified CDS sequence (opt3) from neuraminidase__InfluenzaA__ABI92789

SEQ ID NO: 143513 - RNA, 1410 nt, Artificial Sequence; identical to SEQ ID NO: 142375
  derived and/or modified CDS sequence (opt3) from neuraminidase__InfluenzaA__ABI92800

SEQ ID NO: 143514 - RNA, 1410 nt, Artificial Sequence; identical to SEQ ID NO: 142375
  derived and/or modified CDS sequence (opt3) from neuraminidase__InfluenzaA__ABI92811

SEQ ID NO: 143515 - RNA, 1410 nt, Artificial Sequence; identical to SEQ ID NO: 142375
  derived and/or modified CDS sequence (opt3) from neuraminidase__InfluenzaA__ABI92822

SEQ ID NO: 143516 - RNA, 1410 nt, Artificial Sequence; identical to SEQ ID NO: 142375
  derived and/or modified CDS sequence (opt3) from neuraminidase__InfluenzaA__ABI92844

SEQ ID NO: 143517 - RNA, 1410 nt, Artificial Sequence; identical to SEQ ID NO: 142375
  derived and/or modified CDS sequence (opt3) from neuraminidase__InfluenzaA__ABI92855

SEQ ID NO: 143518 - RNA, 1410 nt, Artificial Sequence
  derived and/or modified CDS sequence (opt3) from neuraminidase__InfluenzaA__ABI92866
augaaccccaaucagaagaucauuaccauaggcagcgccucccugacaaucgcuacuauuugcuuccucauccagauugcaauccuugugacgaccgucacacugcacuuuaaacagcaugaguguaacucuuugccuaauaaccagguuauguuaugcgaaccaacuauaaucgagagaaauauuaccgaaaucguguaccugacaaacaccacuauugagaaggaaaucuguccgaaacuagccgaguauaggaauuggucaaagccccagugcaacauaacaggguucgcgccuuuuaguaaagacaauagcauucggcucuccgcuggaggugauaucuggguaacccgcgagccauacgugucuugugaccccgauaagugcuaucaauucgcccugggccaggggacgacucuuaacaauggacacucgaacgacaccguccaugaucgaacaccuuaccguacucuguugaugaaugaacucggcgugccauuucaccuggguaccagacagguuuguauugcauggucaagcaguuccugccaugacgggaaggccuggcugcacgugugugucacaggagaugacaaaaacgcuaccgcaucuuucaucuauaauggcaggcucguggauagcaucuccucauggaguaagaaaauuuuacggacgcaggagagcgaaugcguauguauaaacggcacuugcacaguugugaugaccgacgggucugccuccggaaaggcugauacuaaaauccuguuuauugaggaggguaagaucauacacauuucaacacuuagcggcagugcccaacaugucgaagagugcucuuguuacccccgcuauccuggggugagaugcguguguagggacaacuggaagggauccaaucggccaaucgucgauaucaacguuaaagacuacagcauugugucgucuuacguaugcuccggcuuggugggugacaccccgcgcaagaaugauucauucaguagcucccacugucuggaccccaacaaugaagaagggggacauggcgucaaaggcugggcguuugaugacgggaacgauguguggaugggacgaacgaucucugagaagcuaagaagcgguuaugagaccuucaaaguuauugagggcuggucaaauccuaacaguaagcuccagauaaauaggcaagugaucgucgaacgggggaaccguuccggauacagcggcauuuuuaguguggaggguaaaucaugcaucaaucgcuguuucuauguagaacugaucagagggaggaaggaggaaacagagguuugguggacuucuaacagcauuguggucuuuugcggcaccuccggaacauacggcacugggucuuggccagacggagcagauauaaaucuuaugcccaucuga

SEQ ID NO: 143519 - RNA, 1410 nt, Artificial Sequence; identical to SEQ ID NO: 142375
  derived and/or modified CDS sequence (opt3) from neuraminidase__InfluenzaA__ABI92877

SEQ ID NO: 143520 - RNA, 1410 nt, Artificial Sequence; identical to SEQ ID NO: 142375
  derived and/or modified CDS sequence (opt3) from neuraminidase__InfluenzaA__ABI92888

SEQ ID NO: 143521 - RNA, 1410 nt, Artificial Sequence; identical to SEQ ID NO: 142375
  derived and/or modified CDS sequence (opt3) from neuraminidase__InfluenzaA__ABI92899

SEQ ID NO: 143522 - RNA, 1410 nt, Artificial Sequence; identical to SEQ ID NO: 142375
  derived and/or modified CDS sequence (opt3) from neuraminidase__InfluenzaA__ABI92910

SEQ ID NO: 143523 - RNA, 1410 nt, Artificial Sequence; identical to SEQ ID NO: 142375
  derived and/or modified CDS sequence (opt3) from neuraminidase__InfluenzaA__ABI92921

SEQ ID NO: 143524 - RNA, 1410 nt, Artificial Sequence; identical to SEQ ID NO: 142375
  derived and/or modified CDS sequence (opt3) from neuraminidase__InfluenzaA__ABI92932

SEQ ID NO: 143525 - RNA, 1410 nt, Artificial Sequence; identical to SEQ ID NO: 142762
  derived and/or modified CDS sequence (opt3) from neuraminidase__InfluenzaA__ABI92943

SEQ ID NO: 143526 - RNA, 1410 nt, Artificial Sequence; identical to SEQ ID NO: 142762
  derived and/or modified CDS sequence (opt3) from neuraminidase__InfluenzaA__ABI92954

SEQ ID NO: 143527 - RNA, 1410 nt, Artificial Sequence
  derived and/or modified CDS sequence (opt3) from neuraminidase__InfluenzaA__ABI92965
augaaccccaaucagaagaucauuaccauaggcagcgugucccugacaaucucuacuauuugcuucuuuaugcagaucgccauucucaucacgaccgucacacuucacuucaaacaguacgaguuuaacucaccuccaaauaaccagguuaugcugugugaaccgacuauaaucgagagaaauauuaccgaaaucguguauuugacaaacaccacuauugagaaggaaaucugccccaaauuagcugaguacaggaauuggaguaagccucagugugacauaacaggguucgcaccauuuagcaaagauaacuccauucggcugucugccggaggugacaucuggguaacccgcgagcccuaugugucgugcgauccugacaaguguuaccaauucgcgcuaggccaggggacgacucucaauaacguccauucaaaugauaccgugcacgaccgaacaccauaucguacucugcuuaugaacgaacugggaguucccuuucauuugggcaccaaacaggugugcauugcuuggagcaguuccucuugucacgaugguaaggccuggcuccaugucugcgugacaggggacgauaagaaugcaaccgccagcuucaucuacaacggaagacugguagacuccaucguuucauggaguaaaaagauucugaggacgcaggagagcgaaugugugugcauaaauggcacuuguacagucgugaugaccgauggcucugcuuccgggaaagcagacacuaagauccucuuuauugaggagggaaagaucgugcacacaucaaccuuaagcgguagugcccaacacgucgaagagugcucuugcuauccucgguacccaggcguucgcugugugugcagagauaacuggaaaggguccaacaggccgauaguagacauuaauaucaaggacuacagcaucgugucgucuuaugucuguuccggacuggugggcgauacgccccggaaaaacgaccgcucaaguagcucccauugccuugauccuaauaacgaagagggugggcacggaguuaagggcugggcuuucgacgauggcaaugacguguggauggggcgaaccauuucugaaaaauugagaagcggauacgagacauuuaaggucaucgaggguuggucaaacccaaauaguaaacugcagauuaacaggcaagugauaguagaucggggcaaucguuccggguauagcggaaucuucucuguugaaggcaagucauguauuaaccgcugcuuuuacguggagcuaaucagagguaggaaggaagagacugaaguccucuggaccaguaauagcaucguggucuucugugggacauccggcacuuauggaaccggcucuuggcccgacggggccgauauuaaccugaugccuauauga

SEQ ID NO: 143528 - RNA, 1410 nt, Artificial Sequence; identical to SEQ ID NO: 142762
  derived and/or modified CDS sequence (opt3) from neuraminidase__InfluenzaA__ABI92976

SEQ ID NO: 143529 - RNA, 1410 nt, Artificial Sequence; identical to SEQ ID NO: 142762
  derived and/or modified CDS sequence (opt3) from neuraminidase__InfluenzaA__ABI92987

SEQ ID NO: 143530 - RNA, 1410 nt, Artificial Sequence; identical to SEQ ID NO: 142762
  derived and/or modified CDS sequence (opt3) from neuraminidase__InfluenzaA__ABI92998

SEQ ID NO: 143531 - RNA, 1410 nt, Artificial Sequence; identical to SEQ ID NO: 142966
  derived and/or modified CDS sequence (opt3) from neuraminidase__InfluenzaA__ABI93009

SEQ ID NO: 143532 - RNA, 1410 nt, Artificial Sequence; identical to SEQ ID NO: 142762
  derived and/or modified CDS sequence (opt3) from neuraminidase__InfluenzaA__ABI93020

SEQ ID NO: 143533 - RNA, 1413 nt, Artificial Sequence; identical to SEQ ID NO: 143404
  derived and/or modified CDS sequence (opt3) from neuraminidase__InfluenzaA__ABI93031

SEQ ID NO: 143534 - RNA, 1410 nt, Artificial Sequence; identical to SEQ ID NO: 143159
  derived and/or modified CDS sequence (opt3) from neuraminidase__InfluenzaA__ABI93042

SEQ ID NO: 143535 - RNA, 1410 nt, Artificial Sequence; identical to SEQ ID NO: 142332
  derived and/or modified CDS sequence (opt3) from neuraminidase__InfluenzaA__ABI93053

SEQ ID NO: 143536 - RNA, 1410 nt, Artificial Sequence
  derived and/or modified CDS sequence (opt3) from neuraminidase__InfluenzaA__ABI93064
augaaccccaaucagaagaucauuaccauaggcagcgugucccugacaaucgccacuauuugcuuccucaugcaaaucgcuauucuugucacgaccguuacacugcacuuuaaacaguacgaguguaacucuccuccaaauaaccaggugauguugugcgaaccgacuaucauagagagaaauaucaccgaaauuguauauuuaacaaacaccacuaucgagaaggaaauuugucccaaacuggcagaguacaggaauuggucaaagccucagugcaaaaucacaggguucgccccauuuaguaaggacaacagcauacggcuauccgcgggaggugauauuugggugacccgcgagcccuaugucucuugugacccugauaagugcuaccaauucgcucucggccaggggacgacucugaauaaccgacauucgaaugacaccgugcacgaucguacaccauauagaacucuucugaugaacgaauugggaguucccuuucaucucggcaccaaacagguguguaucgccuggucaagcaguuccugccacgacgguaaggcauggcugcaugucugugugacagggcacgaugagaaugccaccgcuucuuucauuuacgacggaaggcugguagauagcaucggcuccuggaguaaaaagauccuccggacgcaggaaucagagugcguuuguauuaacggcacuugcacaguggucaugaccgacgggagcgcaucuggacgcgccgauacuaaaauauuauuuaucgaggaagguaagauugugcacacauccaagcugucaggcagcgcucaacauguggaggaaugcaguuguuauccuagauacccaggggucaggugcguuugucgggacaauuggaaaggaucuaaccgcccgaucguggauauaaacguaaaggacuacuccauugugagcucguaugucugcucuggccuugugggugacacgccccggaaaaaugauuccucaaguagcucccacuguuuggacccuaacaaugaggaagggggacauggcguuaagggcugggccuucgaugacgggaacgauguguggaugggaagaaccaucucugagaaaagcaggucagguuacgagaccuuuaaggucaucgaaggcuggaguaaaccaaauuccaagcugcagauuaaccgacaggugaucguagagcgugggaaucgcagcggauauucuggcauuuucucaguugaagguaagaguugcauaaacagauguuuuuacguggagcuaaucagggggcggaaacaggaaacagaggucugguggacuagcaauuccauuguggucuucugcggcaccucuggaacauauggcacugggucguggcccgacggagcggauaucaaccucaugccuaucuga

SEQ ID NO: 143537 - RNA, 1410 nt, Artificial Sequence; identical to SEQ ID NO: 142778
  derived and/or modified CDS sequence (opt3) from neuraminidase__InfluenzaA__ABI93075

SEQ ID NO: 143538 - RNA, 1410 nt, Artificial Sequence; identical to SEQ ID NO: 142778
  derived and/or modified CDS sequence (opt3) from neuraminidase__InfluenzaA__ABI93086

SEQ ID NO: 143539 - RNA, 1410 nt, Artificial Sequence; identical to SEQ ID NO: 142778
  derived and/or modified CDS sequence (opt3) from neuraminidase__InfluenzaA__ABI93097

SEQ ID NO: 143540 - RNA, 1410 nt, Artificial Sequence
  derived and/or modified CDS sequence (opt3) from neuraminidase__InfluenzaA__ABI93108
augaaccccaaucagaagaucauuaccauaggcagcgugucccugacaaucgccacuauuugcuuccucaugcaaaucgcuauucuugucacgaccguuacacugcacuuuaaacaguacgaguguaacucuccuccaaauaaccaggugauguugugcgaaccgacuaucauagagagaaauaucaccgaaauuguauauuuaacaaacaccacuaucgagaaggaaauuugucccaaacuggcagaguacaggaauuggucaaagccucagugcaacaucacaggguucgccccauuuaguaaagacaauagcauacggcuauccgcgggaggugauauuugggugacccgcgagcccuaugucucuugugacccugauaagugcuaccaauucgcucucggccaggggacgacucugaacaauggacauucgaacgacaccgugcacgaucgaacaccauaucguacucuucugaugaaugaauugggcguucccuuucaucucgguaccaaacagguguguaucgccuggucaagcaguuccugccacgacgggaaggcauggcugcaugucugugugacaggagaugacgagaacgccaccgcuucuuucauuuacaauggcagacugguagauagcaucggcuccuggucaaagaaaauccucaggacgcaggaaagugagugcguuuguauuaacgggacuugcacaguggucaugaccgacggaagcgcaucugguaaggccgauacuaaaauauuauuuaucgaggaaggcaagauugugcacacauccucacugagcgggagugcucaacacguggaggaaugcucuuguuauccucgguacccaggaguccgcugcguuuguagagacaacuggaagggcuccaauaggccgaucguggauauaaacguaaaugacuacagcauugugucgucuuaugucugcuccggucuugugggggacacgccccggaaaaacgauucaaguagcuccucucauuguuuggacccuaauaacgaggaaggaggccacggcguuaaggggugggccuucgaugacggaaaugauguguggaugggucgcaccaucagcgagaaacugcgaucaggcuacgagaccuuuaaggucaucgaaggguggaguaaaccaaacuccaagcuacagauuaauagacaggugaucguagacaggggaaaccggagcggcuauucugguauuuucucaguugagaguaaaagcugcauaaaucguuguuuuuacguggaacucauccgcgggagaaagcaggagacagaaguccuguggacuuccaacucuauuguggucuucugcggcaccucgggaacauauggcacugggagcuggcccgauggagcggacaucaaucuuaugccuaucuga

SEQ ID NO: 143541 - RNA, 1410 nt, Artificial Sequence
  derived and/or modified CDS sequence (opt3) from neuraminidase__InfluenzaA__ABI93119
augaaccccaaucagaagaucauuaccauaggcagcgugucccugacaaucgccacuauuugcuuccucaugcaaaucgcuauucuugucacgaccguuacacugcacuuuaaacaguacgaguguaacucuccuccaaauaaccaggugauguugugcgaaccgacuaucauagagagaaauaucaccgaaauuguauauuuaacaaacaccacuaucgagaaggaaauuugucccaaacuggcagaguacaggaauuggucaaagccucagugcaacaucacaggguucgccccauuuaguaaagacaauagcauacggcuauccgcgggaggugauauuugggugacccgcgagcccuaugucucuugugacccugauaagugcuaccaauucgcucucggccaggggacgacucugaacaauggacauucgaacgacaccgugcacgaucgaacaccauaucguacucuucugaugaaugaauugggcguucccuuucaucucgguaccaaacagguguguaucgccuggucaagcaguuccugccacgacgggaaggcauggcugcaugucugugugacaggagaugacgagaacgccaccgcuucuuucauuuacaauggcagacugguagauagcaucggcuccuggucaaagaaaauccucaggacgcaggaaagugagugcguuuguauuaacgggacuugcacaguggucaugaccgacggaagcgcaucugguaaggccgauacuaaaauauuauuuaucgaggaaggcaagauugugcacacauccucacugagcgggagugcucaacacguggaggaaugcucuuguuauccucgguacccaggaguccgcugcguuuguagagacaacuggaagggcuccaauaggccgaucguggauauaaacguaaaagacuacagcauugugucgucuuaugucugcuccggucuugugggggacacgccccggaagaaugauaacucaaguagcucccauuguuuggacccuaauaacgaggaaggaggccacggcguuaaagggugggccuucgaugacggaaaugauguguggaugggucgcaccaucucugagaagcugcgaagcggcuacgagaccuuuaaagucaucgaaggguggucaaagccaaacaguaaacuacagauuaauagacaggugaucguagacagguccaaccggagcggauauucuggcauuuucucaguugagaguaagagcugcauaaaucguuguuuuuacguggaacucauccgcgguagaaagcaggagacagaaguccuguggacuuccaacucuauuguggucuucugcgggaccucgggcacauauggaacuggcagcuggcccgauggggcggacaucaaucuuaugccuaucuga

SEQ ID NO: 143542 - RNA, 1416 nt, Artificial Sequence
  derived and/or modified CDS sequence (opt3) from neuraminidase__InfluenzaA__ABI94584
augaaccccaaucagaagcuguucgcccucagcggcguggcuaucgcacuuuccguccugaacuuguuaauugggauaucuaauguuggacugaacgugucacuacaccucaaagagaaggguccuaaacaagaagagaaucugaccugcacaacuaucaaccagaauaacacgaccguaguggaaaauacauacgucaacaauacuaccauuaucacaaagggcaccgaccuuaaaacuccaaguuaucuguugcucaacaagagccuguguaauguggagggguggguugugauugccaaggauaacgcggucagauuuggagaauccgagcagaucauagugacaagggagccguacguaucuugcgaccccaccggcuguaaaauguaugcucugcaucaggguacgacuauccggaauaagcacucgaacgggaccauucaugaucgcacagccuuccgaggacucaucucaacuccuuuaggcaccccacccacaguuagcaacagugacuuuaugugcgugggcugguccucuaccacgugucacgaugggauugcacguaugacuaucugcauacaaggaaauaacgacaaugccacagcuaccgucuacuauaacagaaggcugacuacaaccauuaaaacgugggcacggaauauccuucgcacccaggaaagcgagugugugugccauaacgguacaugugccguggucaugacugauggcuccgcuucaagucaggccuacaccaagguuauguauuuccacaaaggguuggugguaaaggaagaggagcugagaggaagcgcgaggcacauugaagagugcucuuguuacggccauaaucagaaggugacaugcgucugccgggacaacuggcaaggugcaaaucgcccuaucaucgaaauugauauguccacucuagagcacaccucacgauacguguguacagggauacucaccgacacuagcagaccaggagauaaaaguucuggcgacugcuccaaccccaucacgggcagcccugggguuccaggagugaaggguuuuggcuuccugaauggggauaacacauggcuuggaaggaccauuucgccgcggucucguuccggcuuugaaaugcugaaaauccccaaugccgguacugacccuaacucacgcauagcugagagacaggagauugucgacaauaacaacuggaguggguauagcggcuccuucaucgauuacuggaaugacaacucugaauguuauaauccaugcuuuuacguggaguugaucaggggacggcccgaagaggccaaguauguauggugggcaagcaacucacucauugcucuguguggcaguccuuucccaguuggguccgguagcuuucccgauggagcccagauccaguacuucucuuga

SEQ ID NO: 143543 - RNA, 1413 nt, Artificial Sequence; identical to SEQ ID NO: 142876
  derived and/or modified CDS sequence (opt3) from neuraminidase__InfluenzaA__ABI95220

SEQ ID NO: 143544 - RNA, 1410 nt, Artificial Sequence
  derived and/or modified CDS sequence (opt3) from neuraminidase__InfluenzaA__ABI95242
augaaccccaaucagaagaucauuaccauaggcagcgugucccugacaaucucuacuauuugcuucuuuaugcaaaucgccauucucaucacgaccgucacacuucacuucaaacaguacgaguuuaacucaccuccaaauaaccagguuaugcugugugaaccgacuauaaucgagagaaauauuaccgaaaucguguauuugacaaacaccacuauugagaaggaaaucugccccaaauuagcugaguacaggaauuggaguaagccucagugugacauaacaggguucgcaccauuuagcaaagauaacuccauucggcugucugccggaggugacaucuggguaacccgcgagcccuaugugucgugcgauccugacaaguguuaccaauucgcgcuaggccaggggacgacucucaauaacguccauucaaaugauaccgugcacggacgaacaccauaucguacucugcuuaugaacgaacugggcguucccuuucauuuggguaccaaacaggugugcauugcuuggagcaguuccucuugucacgacgggaaggccuggcuccaugucugcgugacaggagaugacaagaaugcaaccgccagcuucaucuacaacggcagacugguagauuccaucguuucauggaguaaagagauucugaggacgcaggaaagcgagugugugugcauaaauggcacuuguacagucgugaugaccgacgggucugcuuccggagaggcagauacuaagauccucuuuauugaagaggguaaaaucgugcacacaucaaccuuaagcggcagugcccaacacgucgaagagugcucuugcuauccucgguacccagggguucgcugugugugcagagacaacuggaagggauccaacaggccgauaguagauauuaauaucaaggacuacagcaucgugucgucuuaugucuguuccggccuggugggugacacgccccggaaaaacgauucaaguagcuccucucauugccuugacccuaauaacgaagaagggggacacggcguuaagggcugggcuuucgaugacgggaaugauguguggaugggacgcaccauuagcgagaaauugcgaucagguuacgagacauuuaaggucaucgagggcuggaguaacccaaauuccaaacugcagauuaacagacaggugauaguagacagggggaaucggagcggauauucuggcaucuucucaguugaagguaagaguuguauuaaccguugcuuuuacguggagcuaauccgcgggagaaaagaagagacugagguccucuggaccagcaauuccaucguggucuucuguggcacaucuggaacuuauggcaccgggucguggcccgauggagccgacauuaaccugaugccuauauga

SEQ ID NO: 143545 - RNA, 1413 nt, Artificial Sequence
  derived and/or modified CDS sequence (opt3) from neuraminidase__InfluenzaA__ABI95253
augaaccccaaucagaagaucauuaccauaggcagcaucuccauugccaucgggauuaucucuauaaugcugcaaaucggaaacauuaucucaauuugggcuagucacagcauccagacagguucccagaaucauacuggcauaugcaaccagagaauuaucacguacgaaaauucuaccugggugaaccacacauaugucaauauuaacaauacuaacguuguggcagggaaagacaagaccucgguaacacucgccggaaauucaagccuuuguaguaucuccggcugggcgaucuacaccaaagauaacucuauuaggauagguagcaagggggacguguucgucauccgggagccuuuuauuuccugcucacaucuggagugucgcacuuucuuuuugacacaaggagcuuuacugaaugauaaacacaguaacggcaccgugaaggaccgaagcccauaucgugcccuaaugucuugcccgcucggcgaagcacccuccccuuacaauucaaaguucgagagcguugccuggagugcuucugcaugucaugaugggaugggauggcugacgaucgguauauccggcccagacaacggggccguggcuguccuuaaauauaacggaauuaucacugaaaccaucaagagcuggaaaaagaggauucugagaacacaggagucggagugcguguguguaaauggcucuugcuuuacuaucaugaccgauggucccuccgacggggccgcgucauacaaaauuuucaagauagaaaagggaaaaguuacaaagaguaucgaguugaacgcaccuaauagccacuaugaagaguguuccugcuacccagauaccggcacggugaugugugucugccgggacaacuggcacggcucuaaucgccccugggugagcuuuaaccagaaucucgauuaccagauuggguauaucugcucaggaguguucggugacaacccuagaccaaaagauggcgaggggaguuguaauccggucacuguugacggagccgacggcgugaaggguuuuuccuacaaauaugggaacggcguauggaucggaaggacaaagagcaaucggcugcgcaaaggcuucgaaaugauuugggaucccaacggguggaccgacacugauucugacuuuucagugaagcaagaugucguggcuauaacagacuggaguggauacagcgguuccuucguucagcauccugagcugaccggccucgauugcauccgaccauguuuuuggguggaauuagucagagggaggccccgggagaauacgaccauuuggacaucuggaucgagcaucuccuucugcggcgugaacucagacacugccaauuggaguuggccugauggugcagaacugccauucaccauugacaaguga

SEQ ID NO: 143546 - RNA, 1413 nt, Artificial Sequence; identical to SEQ ID NO: 143404
  derived and/or modified CDS sequence (opt3) from neuraminidase__InfluenzaA__ABI95264

SEQ ID NO: 143547 - RNA, 1413 nt, Artificial Sequence; identical to SEQ ID NO: 143404
  derived and/or modified CDS sequence (opt3) from neuraminidase__InfluenzaA__ABI95275

SEQ ID NO: 143548 - RNA, 1413 nt, Artificial Sequence; identical to SEQ ID NO: 143404
  derived and/or modified CDS sequence (opt3) from neuraminidase__InfluenzaA__ABI95286

SEQ ID NO: 143549 - RNA, 1413 nt, Artificial Sequence
  derived and/or modified CDS sequence (opt3) from neuraminidase__InfluenzaA__ABI95297
augaaccccaaucagaagaucauuaccauaggcagcaucuccauugccaucgggauuaucucucugaugcuccaaauaggaaacaucauuucaaucugggcuagucacagcauucagacagguucccagaaucauacuggcgugugcaaccagagaaucauaacguacgaaaauucuaccugggucaaccacacauauguuaauauuaacaauacuaacgugaucgcagggaaagacaagaccucgguaacacuugccggaaauucaagccuguguaguauuuccggcugggcgaucuacaccaaagauaacucuaucaggauugguagcaagggggacguguucgucauacgggagccuuuuaucuccugcucacauuuggagugucgcacuuucuuuuuaacacaaggagcucugcuaaaugauaaacacaguaacggcaccgugaagaaucgaagcccauaucgugcccucaugucuugcccgcugggcgaagcacccuccccuuacaacucaaaguucgagagcguugccuggagugcuucugcaugucaugacgggaugggauggcuuacgauugguaucuccggcccagauaacggggccguggcuguccugaaauauaauggaauaauuacugaaaccaucaagagcuggaaaaagcagaucuugagaacacaggagucggagugcguguguguaaacggcucuugcuuuacuauuaugaccgacggucccuccaauggggccgcgucauacaaaaucuucaagauugaaaagggaaaaguuacaaagaguauagagcucaacgcaccuaauuuucacuaugaagaguguagcugcuacccagauaccggcacggugaugugugucugcagggacaacuggcacggcuccaaucggcccugggugucuuucaaccagaaucuggauuaccaaaucggguauauuugcagcggaguguuuggugacaacccucgcccaaaagauggcgaggggucauguaauccggucacuguugacggagccaacggcgugaaggguuucaguuacaaauaugggaauggcguauggaucggaagaacaaaguccaacaggcugcggaaaggcuuugaaaugaucugggaucccaauggguggaccgacacugacagcgauuucucugugaagcaggacgucguggcuauuacagauuggucaggauacagugguagcuuuguucagcauccugagcucaccggcuuagacugcauacgcccauguuucuggguggaacugguccgagggcuucccaaggagaacacgaccaucuggacauccggaucuucgauuagcuucugcggcgugaacuccgauacugccaauuggucauggccugacggugcagaauugccauuuaccaucgauaaauga

SEQ ID NO: 143550 - RNA, 1410 nt, Artificial Sequence; identical to SEQ ID NO: 142778
  derived and/or modified CDS sequence (opt3) from neuraminidase__InfluenzaA__ABI95308

SEQ ID NO: 143551 - RNA, 1413 nt, Artificial Sequence; identical to SEQ ID NO: 142434
  derived and/or modified CDS sequence (opt3) from neuraminidase__InfluenzaA__ABI96131

SEQ ID NO: 143552 - RNA, 1413 nt, Artificial Sequence; identical to SEQ ID NO: 142434
  derived and/or modified CDS sequence (opt3) from neuraminidase__InfluenzaA__ABI96133

SEQ ID NO: 143553 - RNA, 1413 nt, Artificial Sequence; identical to SEQ ID NO: 142434
  derived and/or modified CDS sequence (opt3) from neuraminidase__InfluenzaA__ABI96136

SEQ ID NO: 143554 - RNA, 1410 nt, Artificial Sequence
  derived and/or modified CDS sequence (opt3) from neuraminidase__InfluenzaA__ABJ09110
augaaccccaaucagaagaucauuaccauaggcagcgugucccugacaaucgccacuauuugcuuccucaugcaaaucgcuauucuugucacgaccguuacacugcacuuuaaacaguacgaguguaacucuccuccaaauaaccaggugauguugugcgaaccgacuaucauagagagaaauaucaccgaaauuguauauuuaacaaacaccacuaucgagaaggaaauuugucccaaacuggcagaguacaggaauuggucaaagccucagugcaacaucacaggguucgccccauuuaguaaagacaauagcauacggcuauccgcgggaggugauauuugggugacccgcgagcccuaugucucuugugacccugauaagugcuaccaauucgcucucggccaggggacgacucugaacaauggacauucgaacgacaccgugcacgaucgaacaccauaucguacucuucugaugaaugaauugggcguucccuuucaucucgguaccaaacagguguguaucgccuggucaagcaguuccugccacgacgggaaggcauggcugcaugucugugugacaggagaugacgagaacgccaccgcuucuuucauuuacaauggcagacugguagauagcaucggcuccuggucaaagaaaauccucaggacgcaggaaagugagugcguuuguauuaacgggacuugcacaguggucaugaccgacggaagcgcaucugguaaggccgauacuaaaauauuauuuaucgaggaaggcaagauuauccacacauccucacugagcgggagugcucaacacguggaggaaugcucuuguuauccucgguacccaggagugcgcugcgucuguagagacaacuggaagggcuccaauaggccgauaguugauauuaacgugaaagacuacagcaucguaucgucuuaugugugcuccggucuugucggggacacgccccggaagaaugauucaaguagcuccucucauuguuuggacccuaacaaugaggaaggaggccacggcgugaaagggugggccuucgaugacggaaacgauguuuggaugggucgcaccaucagcgagaagcugcgaucaggcuacgagaccuuuaaagugauugaaggguggaguaagccaaauuccaaacuacagaucaacagacaggucauuguggacaggggaaaucggagcggcuauucugguauauucucaguagagaguaagagcugcaucaaccguuguuuuuacguugaacucauucgcgggagaaagcaggagacagaagugcuguggacuuccaauucuaucgucguguucugcggcaccucgggaacauauggcacugggagcuggcccgauggagcggacaucaaccuuaugccuauuuga

SEQ ID NO: 143555 - RNA, 1410 nt, Artificial Sequence; identical to SEQ ID NO: 143149
  derived and/or modified CDS sequence (opt3) from neuraminidase__InfluenzaA__ABJ09143

SEQ ID NO: 143556 - RNA, 1413 nt, Artificial Sequence; identical to SEQ ID NO: 142973
  derived and/or modified CDS sequence (opt3) from neuraminidase__InfluenzaA__ABJ09154

SEQ ID NO: 143557 - RNA, 1410 nt, Artificial Sequence; identical to SEQ ID NO: 142375
  derived and/or modified CDS sequence (opt3) from neuraminidase__InfluenzaA__ABJ09165

SEQ ID NO: 143558 - RNA, 1410 nt, Artificial Sequence; identical to SEQ ID NO: 142375
  derived and/or modified CDS sequence (opt3) from neuraminidase__InfluenzaA__ABJ09176

SEQ ID NO: 143559 - RNA, 1410 nt, Artificial Sequence; identical to SEQ ID NO: 142762
  derived and/or modified CDS sequence (opt3) from neuraminidase__InfluenzaA__ABJ09198

SEQ ID NO: 143560 - RNA, 1410 nt, Artificial Sequence; identical to SEQ ID NO: 142762
  derived and/or modified CDS sequence (opt3) from neuraminidase__InfluenzaA__ABJ09209

SEQ ID NO: 143561 - RNA, 1410 nt, Artificial Sequence
  derived and/or modified CDS sequence (opt3) from neuraminidase__InfluenzaA__ABJ09220
augaaccccaaucagaagaucauuaccauaggcagcgugucccugacaaucgccacuauuugcuuccucaugcaaaucgcuauucuugucacgaccguuacacugcacuuuaaacaguacgaguguaacucuccuccaaauaaccaggugauguugugcgaaccgacuaucauagagagaaauaucaccgaaauuguauauuuaacaaacaccacuaucgagaaggaaauuugucccaaacuggcaaaguacaggaauuggucaaaaccucagugcaagaucacaggguucgccccauuuaguaaggacaacagcauacggcuauccgcgggaggugauauuugggugacccgcgagcccuaugucucuugugacccuggcaaaugcuaccaauucgcucucgggcgaggaacgacucugaauaaccgucauucgaaugauaccgugcacgacagaacaccauauaggacucuucugaugaacgaguugggcguucccuuucaucucgguaccaaacagguguguaucgccuggucaagcaguuccugccacgaugggaaggcauggcugcaugucugugugacaggacacgacgaaaaugccaccgcuucuuucauuuacgauggccggcugguagacagcaucggcuccuggucaaagaacauccuccgcacgcaggagagugaaugcguuuguauuaaugggacuugcacaguggucaugaccgauggaagcgcaucugagagagccgacacuaaaauauuauuuaucgaggaagguaagauugugcacaucuccccucugucaggcagcgcucagcauguggaggaaugcaguuguuauccaagguacccggggguccggugcguuugucgcgauaacuggaagggaucuaaccgacccauaguggacauuaauguaaaagauuacuccaucgugagcucguaugucugcucuggccuugugggugacacaccuagaaagaacgacuccucaaguagcuccuacuguaggaauccaaacaaugagaaagggucucacggaguuaagggcugggccuucgaugacggcaacgauguguggauggggcggaccaucagcgaagaguugcguucaggauaugagacguuuaaagucauugguggcuggaguaagcccaauuccaaacugcaaaucaaccgccaggugauuguagacagagggaauaggagcggauacucuggcauauucucaguugaagguaagaguugcaucaaccgguguuuuuauguggagcuaauucgagggcgcaagcaggaaaccgaggucugguggacaagcaauuccaucguggucuucugcggcacuucuggaaccuacggcacagggucguggccugauggagcggacaucaaccucaugccaauuuga

SEQ ID NO: 143562 - RNA, 1410 nt, Artificial Sequence; identical to SEQ ID NO: 142778
  derived and/or modified CDS sequence (opt3) from neuraminidase__InfluenzaA__ABJ09231

SEQ ID NO: 143563 - RNA, 1410 nt, Artificial Sequence; identical to SEQ ID NO: 142778
  derived and/or modified CDS sequence (opt3) from neuraminidase__InfluenzaA__ABJ09242

SEQ ID NO: 143564 - RNA, 1410 nt, Artificial Sequence; identical to SEQ ID NO: 142332
  derived and/or modified CDS sequence (opt3) from neuraminidase__InfluenzaA__ABJ09253

SEQ ID NO: 143565 - RNA, 1410 nt, Artificial Sequence
  derived and/or modified CDS sequence (opt3) from neuraminidase__InfluenzaA__ABJ09264
augaaccccaaucagaagaucauuaccauaggcagcgugucccugacaaucgccacuauuugcuuccucaugcagaucgcuauucuugucacgaccguuacacugcacuuuaaacaguacgaguguaacucuccuccaaauaaccaggugauguugugcgaaccgacuaucauagagagaaauaucaccgaaauuguauauaugacaaacaccacuaucgagaaggaaauuugucccaaauuagcagaguacaggaauuggucaaagccucagugcaacaucacaggguucgccccauuuaguaaagacaauagcauacggcuguccgcgggaggugauauuugggugacccgcgagcccuaugucucuugugacccugauaagugcuaccaauucgcucuaggccaggggacgacucucaacaaucgacauucgaacgacaccgugcacgaucguacaccauauagaacucugcuuaugaaugaacugggaguucccuuucauuugggcaccaaacagguguguaucgccuggucaagcaguuccugccacgacgguaaggcauggcuccaugucugugugacagggcacgaugagaacgccaccgcuucuuucauuuacaauggaaggcugguagacagcaucggcuccuggucaaagaaaauccugcggacgcaggaaagugagugcguuuguauuaacggcacuugcacaguggucaugaccgaugggagcgcaucuggaaaggccgacacuaaaauacucuuuaucgaggaagguaagauugugcacaucuccccuuuaucaggcagcgcucaacauguggaggaaugcaguuguuauccacgcuacccgggggucagaugcguuuguagggauaacuggaagggaucuaaucggcccauaguggacauuaacguaaaagauuacuccaucgugagcucguaugucugcucuggccuggugggugacacaccucgcaagaaugacuccucaaguagcucccacugucuuaacccaaauaacgaggaagggggacauggcguuaaaggcugggccuucgaugacgggaaugauguguggaugggacgaaccaucucugagaaguugagaagcgguuacgagacguuuaaagucauugaaggcuggucaaagcccaacaguaaacugcagaucaauaggcaagugauuguagaccgggggaacuccagcggauauucuggcauauucucaguugaggguaagaguugcaucaaucguuguuuuuacguggaacuaauucgcgggagaaagcaggagaccgaagucugguggacaagcaacuccaucgugguccucugcggcacuucuggaaccuauggcacagggucguggccugauggagcggacaucaaucugaugccaauuuga

SEQ ID NO: 143566 - RNA, 1410 nt, Artificial Sequence
  derived and/or modified CDS sequence (opt3) from neuraminidase__InfluenzaA__ABJ09286
augaaccccaaucagaagaucauuaccauaggcagcgugucccugacaaucgccacuauuugcuuccucaugcaaaucgcuauucuugucacgaccguuacacugcacuuuaaacaguacgaguguaacucuccuccaaauaaccaggugauguugugcgaaccgacuaucauagagagaaauaucaccgaaauuguauauuuaacaaacaccacuaucgagaaggaaauuugucccaaacuggcagaguacaggaauuggucaaagccucagugcaacaucacaggguucgccccauuuaguaaagacaauagcauacggcuauccgcgggaggugauauuugggugacccgcgagcccuaugucucuugugacccugauaagugcuaccaauucgcucucggccaggggacgacucugaacaauggacauucgaacgacaccgugcacgaucgaacaccauaucguacucuucugaugaaugaauugggcguucccuuucaucucgguaccaaacagguguguaucgccuggucaagcaguuccugccacgacgggaaggcauggcugcaugucugugugacaggagaugacgagaacgccaccgcuucuuucauuuacaauggcagacugguagauagcaucggcuccuggucaaagaaaauccucaggacgcaggaaagugagugcguuuguauuaacgggacuugcacaguggucaugaccgacggaagcgcaucugguaaggccgauacuaaaauauuauuuaucgaggaaggcaagauugugcacacauccccucugucagggagcgcucaacacguggaggaaugcaguuguuauccacgguacccgggaguccgcugcguuuguagagacaacuggaagggcucuaauaggcccaucguggauauaaacguaaaagacuacuccauugugagcucguaugucugcucuggucuugugggggacaccccucggaagaaugauuccucaaguagcucccauuguuuggacccaaacaaugaggaaggaggccacggcguuaaagggugggccuucgaugacggaaacgauguguggaugggucgcacgaucucugagaagcugcgaagcggcuacgagaccuuuaaagucaucgaaggguggucaaagcccaauaguaaacuacagauuaacaaacaggugaucguagacagaggaaauagguccggcuauagcgguauuuucucuguugaggggaagucaugcauaaaccgguguuuuuacguggaacucauccguggccgcaagcaggagacagaaguccuguggaccaguaauagcauuguggucuucugcggaacuuccggcacauaugggacuggaucuuggccugauggugcggacaucaaccuuaugccaaucuga

SEQ ID NO: 143567 - RNA, 1410 nt, Artificial Sequence; identical to SEQ ID NO: 142332
  derived and/or modified CDS sequence (opt3) from neuraminidase__InfluenzaA__ABJ09308

SEQ ID NO: 143568 - RNA, 1410 nt, Artificial Sequence; identical to SEQ ID NO: 143536
  derived and/or modified CDS sequence (opt3) from neuraminidase__InfluenzaA__ABJ09319

SEQ ID NO: 143569 - RNA, 1413 nt, Artificial Sequence; identical to SEQ ID NO: 143001
  derived and/or modified CDS sequence (opt3) from neuraminidase__InfluenzaA__ABJ09330

SEQ ID NO: 143570 - RNA, 1410 nt, Artificial Sequence
  derived and/or modified CDS sequence (opt3) from neuraminidase__InfluenzaA__ABJ09341
augaaccccaaucagaagaucauuaccauaggcagcgugucccugacaaucgccacuauuugcuuccucaugcaaaucgcuauucuugucacgaccguuacacugcacuuuaaacaguacgaguguaacucuccuccaaauaaccaggugauguugugcgaaccgacuaucauagagagaaauaucaccgaaauuguauauuuaacaaacaccacuaucgagaaggaaauuugucccaaacuggcagaguacaggaauuggucaaagccucagugcaacaucacaggguucgccccauuuaguaaagacaauagcauacggcuauccgcgggaggugauauuugggugacccgcgagcccuaugucucuugugacccugauaagugcuaccaauucgcucucggccaggggacgacucugaacaauggacauucgaacgacaccgugcacgaucgaacaccauaucguacucuucugaugaaugaauugggcguucccuuucaucucgguaccaaacagguguguaucgccuggucaagcaguuccugccacgacgggaaggcauggcugcaugucugugugacaggagaugacgagaacgccaccgcuucuuucauuuacaauggcagacugguagauagcaucggcuccuggucaaagaaaauccucaggacgcaggaaagugagugcguuuguauuaacgggacuugcacaguggucaugaccgacggaagcgcaucugguaaggccgauacuaaaauauuauuuaucgaggaaggcaagauugugcacacauccucacugcuugggagcgcucaacacguggaggaaugcaguuguuauccucgguacccaggaguccgcugcguuuguagagacaacuggaagggcucuaauaggccgaucguggauauaaacguaaaagacuacuccauugugagcucguaugucugcucugguuuggugggggacacgccccggaagaaugauuccucaaguagcucccauugucuggacccuaacaaugaggaaggaggccacggcguuaaagggugggccuucgaugacggaaacgauguguggaugggucgcaccaucucugagaagcuacgaagcggcuacgagaccuuuaaagucaucgaaggguggucaaagccaaauaguaaacuccagauuaacagacaggugaucguagacaggggaaaucgguccggcuauagcgguauuuucucuguugagucaaagaguugcauaaaccguuguuuuuacguggaacugauccgcgggagaaagcaggagacagaaguccuuuggacuagcaauuccauuguggucuucugcggcaccucuggaacauauggcacugggucguggcccgauggagcggacaucaaccugaugccuaucuga

SEQ ID NO: 143571 - RNA, 1410 nt, Artificial Sequence
  derived and/or modified CDS sequence (opt3) from neuraminidase__InfluenzaA__ABJ09352
augaaccccaaucagaagaucauuaccauaggcagcgugucccugacaaucgccacuauuugcuuccucaugcaaaucgcuauucuugucacgaccguuacacugcacuuuaaacaguacgaguguaacucuccuccaaauaaccaggugauguugugcgaaccgacuaucauagagagaaauaucaccgaaauuguauauuuaacaaacaccacuaucgagaaggaaauuugucccaaacuggcagaguacaggaauuggucaaagccucagugcaacaucacaggguucgccccauuuaguaaagacaauagcauacggcuauccgcgggaggugauauuugggugacccgcgagcccuaugucucuugugacccugauaagugcuaccaauucgcucucggccaggggacgacucugaacaauggacauucgaacgacaccgugcacggccgaacaccauaucguacucuucugaugaaugaauuggguguucccuuucaucucgggaccaaacagguguguaucgccuggucaagcaguuccugccacgauggaaaggcauggcugcaugucugugugacaggcgacgaugagaacgccaccgcuucuuucauuuacaauggcagacugguagacagcaucggguccuggucaaagaaaauccucaggacgcaggaaagugagugcguuuguauuaacggaacuugcacaguggucaugaccgaugguagcgcaucuggcaaggccgacacuaaaauauuauuuaucgaggaagggaagauugugcacacauccucacugagcggaagugcucaacacguggaggaaugcucuuguuauccucgguacccaggcguccgcugcguuuguagagauaacuggaaggguuccaauaggccgaucguggacauaaacguaaaagauuacagcauugugucgucuuaugucugcuccgggcuugugggagacacgccccggaagaaugacucaaguagcuccucucauuguuuggauccuaacaaugaggaaggcggccacgggguuaaaggaugggccuucgacgaugguaacgacguguggaugggccgcaccaucagcgagaagcugcgaucaggguacgagaccuuuaaagucaucgaaggauggaguaagccaaauuccaaacuacagauuaacagacaggugaucguagauaggggcaaucggagcgguuauucugggauuuucucaguugagaguaagagcugcauaaaccguuguuuuuacguggaacucauccgcggcagaaagcaggagacagaaguccuguggacuuccaauucuauuguggucuucugcggaaccucgggcacauaugggacuggaagcuggcccgacggugcggauaucaaccuuaugccuaucuga

SEQ ID NO: 143572 - RNA, 1407 nt, Artificial Sequence
  derived and/or modified CDS sequence (opt3) from neuraminidase__InfluenzaA__ABJ09374
augauccagagcaagauuauaaccaucggcuccgugucucugacaauuucaacuaucugcuucuuuaugcaaauugccauccucauaacgaccgucacacuucacuucaaacaguacgaguuuaacagucccccuaauaaccagguuaugcugugugaaccaacuaucauugagagaaauaucaccgaaauuguguauuugacaaacaccacuaucgagaaggaaauaugcccgaaauuagcugaguacaggaauuggagcaagccccagugugacauuacaggguucgcaccuuuuuccaaagauaacucuauccggcugucggccggaggugacauuuggguaacccgcgagccauaugugucaugcgaucccgacaaguguuaccaauucgcgcuaggccaggggacgacucucaauaacguccauagcaaugauaccgugcacgaccgaacaccuuaucguacucugcuuaugaacgaacugggaguuccauuucauuugggcaccaaacaggugugcaucgcuuggaguuccucuagcugucacgaugguaaggccuggcuccaugucugcgugacaggggacgauaagaaugcaaccgccuccuucaucuacaacggaagacugguagacucaauuguuaguuggagcaaaaagauacugaggacgcaggagucugaaugugugugcaucaauggcacuuguacagucgugaugaccgauggcuccgcuucagggaaagcagacacuaagauucucuuuaucgaggagggaaagauagugcacacaagcaccuuaagugguucugcccaacacgucgaagagugcuccugcuauccccgguacccuggcguucgcugugugugcagagauaacuggaaagggagcaauaggccaauuguagacaucaacaucaaggacuacucgauugugucuuccuaugucuguucaggacuggugggcgauacgccgcggaaaaacgacaguagcuccucuagccauugccuugaucccaauaacgaagagggugggcacggaguuaagggcugggcuuucgacgauggcaaugacguguggauggggcgcaccaucucagaaaaauugcgaaguggauacgagacauuuaaggucauugaggguugguccaacccuaauagcaaacugcagauaaacagacaggugaucguagauaggggcaaucggucuggguauucaggaauuuucaguguugaaggcaagagcuguaucaaccguugcuuuuacguggagcuaauccgcgguaagaaagaagagacugaaguccucuggaccuccaauucuauuguggucuucugugggacaucgggcacuuauggaaccggcagcuggccagacggggccgauauaaaccugaugcccaucuga

SEQ ID NO: 143573 - RNA, 1410 nt, Artificial Sequence; identical to SEQ ID NO: 142762
  derived and/or modified CDS sequence (opt3) from neuraminidase__InfluenzaA__ABJ09385

SEQ ID NO: 143574 - RNA, 1410 nt, Artificial Sequence; identical to SEQ ID NO: 142301
  derived and/or modified CDS sequence (opt3) from neuraminidase__InfluenzaA__ABJ16590

SEQ ID NO: 143575 - RNA, 1410 nt, Artificial Sequence; identical to SEQ ID NO: 143566
  derived and/or modified CDS sequence (opt3) from neuraminidase__InfluenzaA__ABJ16601

SEQ ID NO: 143576 - RNA, 1413 nt, Artificial Sequence
  derived and/or modified CDS sequence (opt3) from neuraminidase__InfluenzaA__ABJ16612
augaaccccaaucagaagaucauuaccauaggcagcaucuccauugccaucgggauuaucucucugaugcuccaaauaggaaacaucauuucaaucugggcuagucacagcauucagacagguucccagaaucauacuggcgugugcaaccagagaaucauaacguacgagaauagcaccugggucaaccacacauauguuaauauuaacaauacuaacgugguagcagggaaagacaagaccucggugacacuugccggaaauucaagccuguguaguaucuccggcugggcgauuuacaccaaagauaacucuaucaggaucgguagcaagggggacgucuucgugauucgggaaccuuuuauauccugcucacauuuggagugucgcacuuucuuuuuaacacaaggagcucugcuaaaugauaaacacaguaacggcaccguuaaggaccgaagcccauaucgugcccucaugucuugcccgcugggcgaagcacccuccccuuacaauucaaaguucgagagcguggccuggagugcuucugcaugucaugaugggaugggauggcuuacggucgguaucuccggcccagacaacggggccguggcuguacugaaauauaacggaauuaucacugaaaccauaaagagcuggaaaaagagaauuuugaggacacaggagucggagugcguuugugugaauggcucuugcuuuacuaucaugaccgauggucccuccaacggggccgcgucauacaaaaucuucaagauugaaaagggaaaagucacaaagaguaucgagcucaaugcaccuaacuuucacuaugaagaguguagcugcuacccagacaccggcacggugaugugugugugccgggauaauuggcacggcuccaaccgccccugggucucuuucaaucagaaccuggacuaccagauuggguauauaugcagcggaguuuuuggugauaauccuagaccaaaagacggcgaggggucauguaacccggugacuguagauggagccgacggcgugaaggguuucaguuacaaauaugggaauggcgucuggaucggaaggacaaaguccaaccggcugcgcaaaggcuuugaaaugauuugggaccccaauggguggaccgauacugacagcgauuucucugugaagcaagacguuguggcuaucacagauuggucaggauacagugguagcuuuguccagcauccugagcucaccggcuuagacugcauccgaccauguuucuggguggaacugguaagagggcuucccagggagaacacgaccauuuggacauccggaucuucgauaucuuucugcggcguuaauuccgauacugccaacuggucauggccugacggugcagaauugccauuuaccaucgauaaguga

SEQ ID NO: 143577 - RNA, 1410 nt, Artificial Sequence; identical to SEQ ID NO: 143566
  derived and/or modified CDS sequence (opt3) from neuraminidase__InfluenzaA__ABJ16623

SEQ ID NO: 143578 - RNA, 1410 nt, Artificial Sequence
  derived and/or modified CDS sequence (opt3) from neuraminidase__InfluenzaA__ABJ16634
augaaccccaaucagaagaucauuaccauaggcagcgugucccugacaaucucuacuauuugcuucuuuaugcaaaucgccauucucaucacgaccgucacacuucacuucaaacaguacgaguuuaacucaccuccaaauaaccagguuaugcugugugaaccgacuauaaucgagagaaauauuaccgaaaucguguauuugacaaacauuaccaucgagaaggaaauaugccccaaauuagcugaguacaggaauuggaguaagccucagugugacauuacuggguucgcaccauuuagcaaagauaacuccauccggcugucugccggaggugacauuuggguaacacgcgagcccuaugugucgugcgauccugacaaguguuaccaauucgcgcuaggccaggggaccacgcucaauaacguccauucaaaugauacugugcacgaccgaaccccauaucguacacugcuuaugaacgaacugggaguucccuuucauuugggcacuaaacaggugugcaucgcuuggagcaguuccucuugucacgaugguaaggccuggcuccaugucugcgugaccggggacgauaagaaugcaacagccagcuucaucuacaacggaagacugguagacuccauuguuucauggaguaaaaagauacugaggacccaggagagcgaaugugugugcaucaauggcacguguacugucgugaugacagauggcucugcuuccgggaaagcagacaccaagauucucuuuaucgaggagggaaagauagugcacacuucaacauuaagcgguagugcccaacacgucgaagagugcucuugcuauccucgguacccaggcguucgcugugugugcagagauaacuggaaaggguccaacaggccgauuguagacaucaauaucaaggacuacagcauugugucgucuuaugucuguuccggacuggugggcgauacgccccggaaaaacgacucaaguagcuccucucauugccuugauccuaauaacgaagagggugggcacggaguuaagggcugggcuuucgacgauggcaaugacguguggauggggcgcaccaucagcgaaaaauugcgaucaggauacgagaccuuuaaggucauugaggguuggaguaacccaaauuccaaacugcagauaaacagacaggugaucguagauaggggcaaucggagcggguauucuggaauuuucucaguugaaggcaagaguuguaucaaccguugcuuuuacguggagcuaauccgcgguagaaaggaagagacagaaguccucuggacuagcaauuccauuguggucuucugugggaccucuggcacauauggaacuggcucguggcccgacggggccgauauaaaccugaugccuaucuga

SEQ ID NO: 143579 - RNA, 1413 nt, Artificial Sequence; identical to SEQ ID NO: 142434
  derived and/or modified CDS sequence (opt3) from neuraminidase__InfluenzaA__ABJ16656

SEQ ID NO: 143580 - RNA, 1413 nt, Artificial Sequence; identical to SEQ ID NO: 142434
  derived and/or modified CDS sequence (opt3) from neuraminidase__InfluenzaA__ABJ16667

SEQ ID NO: 143581 - RNA, 1413 nt, Artificial Sequence
  derived and/or modified CDS sequence (opt3) from neuraminidase__InfluenzaA__ABJ16678
augaaccccaaucagaagaucauuaccauaggcagcaucuccauugccaucgggauuaucucucugaugcuccaaauaggaaacaucauuucaaucugggcuagucacagcauucagacagguucccagaaucauacuggcaucugcaaccagagaauaauuacguacgaaaauucuaccugggugaaccacacauaugucaauaucaacaauacuaacguuguggcagggaaagacaagaccucgguaacacuugccggaaauucaagccuguguaguauuuccggcugggcgaucuacaccaaagauaacucuaucaggauugguagcaagggggacguguucgucauacgggagccuuuuaucuccugcucacauuuggagugucgcacuuucuuuuuaacacaaggagcucugcuaaaugauaaacacaguaacggcaccgugaaggaccgaagcccauaucgugcccucaugucuugcccgcugggcgaagcacccuccccuuacaauucaaaguucgagagcguugccuggagugcuucugcaugucaugaugggaugggauggcuuacgauugguaucuccggcccagacaacggggccguggcuguccugaaauauaacggaauaauuacugaaaccaucaagagcuggaaaaagagaaucuugaggacacaggagucggagugcguguguguaaauggcucuugcuuuacuauuaugaccgauggucccuccaacggggccgcgucauacaaaaucuucaagauugaaaagggaaaaguuacaaagaguauagagcucaaugcaccuaacuuucacuaugaagaguguagcugcuacccagacaccggcacggugaugugugucugccgggauaauuggcacggcuccaaccgccccugggugucuuucaaucagaaccuggacuaccagaucggguauauuugcagcggaguguuuggugauaauccuagaccaaaagacggcaaggggucauguaacccggucacuguugauggagccgacggcgugaaagguuucaguuacaaguaugggaauggcguauggaucggaaggacaaaauccaaccggcugcgcaagggcuuugagaugaucugggaccccaauggguggaccgauacugacagcgauuuccucgugaagcaagacgucguggcuauuacagauuggucuggauacucagguaguuuuguucagcauccugaauuaaccggccuggacugcauacgaccauguuucuggguggagcuugucagaggguugcccagggaaaacacgaccaucuggacaagcggauccucuauuucguucugcggcguggauagcgacacugccaauugguccuggccugauggugcagagcugccauuuaccaucgacaaauga

SEQ ID NO: 143582 - RNA, 1413 nt, Artificial Sequence; identical to SEQ ID NO: 142434
  derived and/or modified CDS sequence (opt3) from neuraminidase__InfluenzaA__ABJ16689

SEQ ID NO: 143583 - RNA, 1410 nt, Artificial Sequence
  derived and/or modified CDS sequence (opt3) from neuraminidase__InfluenzaA__ABJ16700
augaaccccaaucagaagaucauuaccauaggcagcgugucccugacaaucgccacuauuugcuuccucaugcaaaucgcuauucuugucacgaccguuacacugcacuuuaaacaguacgaguguaacucuccuccaaauaaccaggugauguugugcgaaccgacuaucauagagagaaauaucaccgaaauuguauauuuaacaaacaccacuaucgagaaggaaauuugucccaaacuggcagaguacaggaauuggucaaagccucagugcaacaucacaggguucgccccauuuaguaaagacaauagcauacggcuauccgcgggaggugauauuugggugacccgcgagcccuaugucucuugugacccugauaagugcuaccaauucgcucucggccaggggacgacucugaacaauggacauucgaacgacaccgugcacgaucgaacaccauaucguacucuucugaugaaugaauugggcguucccuuucaucucgguaccaaacagguguguaucgccuggucaagcaguuccugccacgacgggaaggcauggcugcaugucugugugacaggagaugacgagaacgccaccgcuucuuucauuuacaauggcagacugguagauagcaucggcuccuggucaaagaaaauccucaggacgcaggaaagugagugcguuuguauuaacgggacuugcacaguggucaugaccgacggaagcgcaucugguaaggccgauacuaaaauauuauuuaucgaggaaggcaagauugugcacacauccucacugagcgggagugcucaacacguggaggaaugcucuuguuauccucgguacccaggaguccgcugcguuuguagagacaacuggaagggcuccaauaggccgaucguggauauaaacguaaaagacuacagcauugugucgucuuaugucugcuccggucuugugggggacacgccccggaagaaugauucaaguagcuccucucauuguuuggacccuaacaaugaggaaggaggccacggcguuaaagggugggccuucgaugacggaaacgauguguggaugggucgcaccaucagcgagaagcugcgaucaggcuacgagaccuuuaaagucaucgaaggguggaguaagccaaauuccaaacuacagauuaacagacaggugaucguagacaggggaaaucggagcggcuauucugguauuuucucaguugagaguaagagcugcauaaaccguuguuuuuacguggaacucauccgcgggaagaaacaggagacagaaguccuguggacuuccaauucuauuguggucuucugcggcaccucgggaacauauggcacugggagcuggcccgauggagcggacaucaaccuuaugccuaucuga

SEQ ID NO: 143584 - RNA, 1410 nt, Artificial Sequence
  derived and/or modified CDS sequence (opt3) from neuraminidase__InfluenzaA__ABJ16711
augaaccccaaucagaagaucauuaccauaggcagcgugucccugacaaucgccacuauuugcuuccucaugcaaaucgcuauucuugucacgaccguuacacugcacuuuaaacaguacgaguguaacucuccuccaaauaaccaggugauguugugcgaaccgacuaucauagagagaaauaucaccgaaauuguauauuuaacaaacaccacuaucgagaaggaaauuugucccaaacuggcagaguacaggaauuggucaaagccucagugcaacaucacaggguucgccccauuuaguaaagacaauagcauacggcuauccgcgggaggugauauuugggugacccgcgagcccuaugucucuugugacccugauaagugcuaccaauucgcucucggccaggggacgacucugaacaauggacauucgaacgacaccgugcacgaucgaacaccauaucguacucuucugaugaaugaauugggcguucccuuucaucucgguaccaaacagguguguaucgccuggucaagcaguuccugccacgacgggaaggcauggcugcaugucugugugacaggagaugacgagaacgccaccgcuucuuucauuuacaauggcagacugguagauagcaucggcuccuggucaaagaaaauccucaggacgcaggaaagugagugcguuuguauuaacgggacuugcacaguggucaugaccgacggaagcgcaucugguaaggccgauacuaaaauauuauuuaucgaggaaggcaagauugugcacacauccucacugagcgggagugcucaacacguggaggaaugcucuuguuauccucgguacccaggaguccgcugcguuuguagagacaacuggaagggcuccaauaggccgaucguggauauaaacauuaaagacuacagcaucguaucgucuuaugugugcuccggucuugucggggacacgccccggaagaaugauucaaguagcuccucucauuguuuggacccuaacaaugaggaaggaggccacggcgugaaagggugggccuucgaugacggaaacgaugcguggaugggucgcaccaucagcgagaagcugcgaucaggcuacgagaccuuuaaaguuauugaaggguggaguaaguccaauagcaaacuacagaucaacagacaggugauugucgacaggggaaaucggucuggcuauucagguauauucaguguggagggcaagagcugcaucaaccguuguuuuuacguagaacucauucgcgggagaaagcaggagacagaaguucuguggacuuccaauucuaucguggucuucugcggaaccucgggcacauaugggacuggaagcuggccagauggugcagacaucaaccuuaugcccauuuga

SEQ ID NO: 143585 - RNA, 1413 nt, Artificial Sequence
  derived and/or modified CDS sequence (opt3) from neuraminidase__InfluenzaA__ABJ16733
augaaccccaaucagaagaucauuaccauaggcagcaucuccguggccauugggaucauuaaccugauccuccaaauaggaaauaucauuucuaucugggcuucacacaguauucagacagguagccagaacuacacuggcaucugcaaucagagaauaauuacguaugagaacaggaccugggucaaucaaacauacguuaacaucaauaacacuaaugugguagcagggaaagacaagaccuccaugacacuugccggaaacucuucgcuguguccuauucggggcugggcgaucuauaccaaagauaauucaauccgcauugguagcaagggggacauauucgugauccgagaaccauuuauuaguugcucccauuuggagugucguacuuucuuuuuaacacagggagcucugcuaaacgauaaacacucuaauggcaccaucaaggacagaagcccguucagggcccucauguccugcccccugggcgaagcaccuucaccauacaacagucgguuugagagcgucgccuggucugcuuccgcaugucaugaugggcuuggauggcugacgauagguauuucaggccccgacaacggggccguggcuguuuugaaguauaauggaaucaucacugaaaccauuaaaagcuggaagaaacagauccuccgcacacaggagagugagugcgugugugucaacggcucuugcuucacuauuaugaccgaugguccuuccaauagagccgcgagcuacaggauauuuaagaucgaaaaagggcgggugacaaagucgauugagcuggacgcaccaaacuaucacuacgaagaguguucuugcuaccccgauaccggaacgguaauguguguuugccgcgacaauuggcauggcuccaaccgaccuugggugucauucaaucaaaaccuggauuaucagaucggcuacaucugcaguggggucuuuggagacaauccaagaccgaaggauggugagggcagcuguaaccccgugacuguggacggggccgacggagucaaaggcuucuccuauagguacgguaaugggguuuggauuggccggacaaagucuaaccgucuccgcaaaggauuugaaaugauaugggauccuaauggcuggaccgacacugauagcgacuucucaaugaagcaggaugugguagcuaugacagacuggaguggguauuccgguagcuuugugcagcacccagaguuaaccggacuggauugcaugagacccuguuucugggucgaacuugugaggggcuugccucgggagaacacgaccaucuggacaucugggucaaguauuagcuucugcggaguuaauuccgaaacugccaacuggucuuggccagacggcgcagagcugcccuuuaccaucgauaaauga

SEQ ID NO: 143586 - RNA, 1410 nt, Artificial Sequence; identical to SEQ ID NO: 142778
  derived and/or modified CDS sequence (opt3) from neuraminidase__InfluenzaA__ABJ16744

SEQ ID NO: 143587 - RNA, 1410 nt, Artificial Sequence; identical to SEQ ID NO: 142778
  derived and/or modified CDS sequence (opt3) from neuraminidase__InfluenzaA__ABJ16755

SEQ ID NO: 143588 - RNA, 1410 nt, Artificial Sequence; identical to SEQ ID NO: 142778
  derived and/or modified CDS sequence (opt3) from neuraminidase__InfluenzaA__ABJ16766

SEQ ID NO: 143589 - RNA, 1410 nt, Artificial Sequence
  derived and/or modified CDS sequence (opt3) from neuraminidase__InfluenzaA__ABJ16777
augaaccccaaucagaagaucauuaccauaggcagcgugucccugacaaucgccacuauuugcuuccucaugcaaaucgcuauucuugucacgaccguuacacugcacuuuaaacaguacgaguguaacucuccuccaaauaaccaggugauguugugcgaaccgacuaucauagagagaaauaucaccgaaauuguauauuuaacaaacaccacuaucgagaaggaaauuugucccaaacuggcagaguacaggaauuggucaaagccucagugcaacaucacaggguucgccccauuuaguaaagacaauagcauacggcuauccgcgggaggugauauuugggugacccgcgagcccuaugucucuugugacccugauaagugcuaccaauucgcucucggccaggggacgacucugaacaauggacauucgaacgacaccgugcacgaucgaacaccauaucguacucuucugaugaaugaauugggcguucccuuucaucucgguaccaaacagguguguaucgccuggucaagcaguuccugccacgacgggaaggcauggcugcaugucugugugacaggagaugacgagaacgccaccgcuucuuucauuuacaauggcagacugguagauagcaucggcuccuggucaaagaaaauccucaggacgcaggaaagugagugcguuuguauuaacgggacuugcacaguggucaugaccgacggaagcgcaucugguaaggccgauacuaaaauauuauuuaucgaggaaggcaagauugugcacacauccucacugagcgggagugcucaacacguggaggaaugcucuuguuauccucgguacccaggaguccgcugcguuuguagagacaacuggaagggcuccaauaggccgaucguggauauaaacauuaaagacuacagcaucguaucgucuuaugugugcuccggucuugucggggacacgccccggaagaaugauucaaguagcuccucucauuguuuggacccuaacaaugaggaaggaggccacggcgugaaagggugggccuucgaugacggaaacgauguuuggaugggucgcaccaucagcgagaagcugcgaucaggcuacgagaccuuuaaagugauugaaggguggaguaagccaaauuccaaacuacagaucaacagacaggucauuguggacaggggaaaucggagcggcuauucugguauauucucaguagaggggaagaguugcaucaaccguuguuuuuacguugaacucauucgcggcagaaagcaggagacagaagugcuguggacuagcaauuccaucgucguguucugcggaaccucuggcacauaugggacuggaucguggcccgauggugcggacaucaaccuuaugccuauuuga

SEQ ID NO: 143590 - RNA, 1410 nt, Artificial Sequence; identical to SEQ ID NO: 142778
  derived and/or modified CDS sequence (opt3) from neuraminidase__InfluenzaA__ABJ16788

SEQ ID NO: 143591 - RNA, 1413 nt, Artificial Sequence; identical to SEQ ID NO: 143016
  derived and/or modified CDS sequence (opt3) from neuraminidase__InfluenzaA__ABJ53441

SEQ ID NO: 143592 - RNA, 1413 nt, Artificial Sequence
  derived and/or modified CDS sequence (opt3) from neuraminidase__InfluenzaA__ABJ53452
augaaccccaaucagaagaucauuaccauaggcagcaucuccauugccaucgggauuaucucucugaugcuccaaauaggaaacaucauuucaaucugggcuagucacagcauucagacagguucccagaaucauacuggcaucugcaaccagagaauaauuacguacgaaaauucuaccugggugaaccacacauaugucaauaucaacaauacuaacguuauugcagggaaagacaagaccucggugacacuugccggaaauucaagccuguguaguaucuccggcugggcgaucuacaccaaagauaacucuauuaggauagguagcaagggggacguauucgugauccgggagccuuuuauuuccugcucacauuuggagugucgcacuuucuuuuuaacacaaggagcucugcuaaaugauaaacacaguaacggcaccgucaaggaccgaagcccauaucgugcccucaugucuugcccgcugggcgaagcacccuccccuuacaauucaaaguucgagagcguggccuggagugcuucugcaugucaugaugggaugggauggcuuacgaucgguauauccggcccagacaacggggccguugcugugcugaaauauaacggaauuaucacugaaaccaucaagagcuggaaaaagagaauuuugaggacacaggagucggagugcgucugugugaauggcucuugcuuuacuaucaugaccgauggucccuccaacggggccgcgucauacaaaauuuucaagauagaaaagggaaaaguaacaaagaguaucgagcucaaugcaccuaacuuucacuaugaagaguguagcugcuacccagacaccggcacgguuaugugugugugccgggauaauuggcacggcuccaaccgccccugggucucuuucaaucagaaccuggacuaccagauuggguauaucugcagcggaguguuuggugauaauccuagaccaaaagacggcgaggggucauguaacccggugacugucgauggagccgacggcguuaaggguuucaguuacaaauaugggaauggcguguggaucggaaggacaaaguccaaccggcugcgcaaaggcuuugaaaugauuugggaccccaauggguggaccgauacugacagcaacuucucuguaaagcaagauguggucgcuauaacagacuggucaggauacagugguagcuuugugcagcauccugagcucaccggcuuagauugcauccgaccauguuucuggguugaacuggugagagggcuucccagggagaauacgaccauuuggacauccggaucuucgaucagcuucugcggcgucaacuccgacacugccaacuggucauggccugauggugcagaauugccauuuaccauugacaaguga

SEQ ID NO: 143593 - RNA, 1410 nt, Artificial Sequence; identical to SEQ ID NO: 142760
  derived and/or modified CDS sequence (opt3) from neuraminidase__InfluenzaA__ABJ53463

SEQ ID NO: 143594 - RNA, 1410 nt, Artificial Sequence; identical to SEQ ID NO: 142760
  derived and/or modified CDS sequence (opt3) from neuraminidase__InfluenzaA__ABJ53474

SEQ ID NO: 143595 - RNA, 1410 nt, Artificial Sequence
  derived and/or modified CDS sequence (opt3) from neuraminidase__InfluenzaA__ABJ53485
augaaccccaaucagaagaucauuaccauaggcagcgugucccugacaaucucuacuauuugcuucuuuaugcaaaucgccauucucaucacgaccgucacacuucacuucaaacaguacgaguuuaacucaccuccaaauaaccagguuaugcugugugaaccgacuauaaucgagagaaauauuaccgaaaucguguauuugacaaacaccacuauugagaaggaaaucugccccaaauuagcugaguacaggaauuggaguaagccucaguguaacauaacaggguucgcaccauuuagcaaagacaauuccauucggcugucugccggaggugauaucuggguaacccgcgagcccuaugugucgugcgacccugauaaguguuaccaauucgcgcuaggccaggggacgacucucaacaauguccauucaaacgacaccgugcacgaucgaacaccauaucguacucugcuuaugaaugaacugggaguucccuuucauuugggcaccaaacaggugugcauugcuuggagcaguuccucuugucacgacgguaaggccuggcuccaugucugcgugacaggggaugacaagaacgcaaccgccagcuucaucuacaauggaagacugguagauuccaucguuucauggaguaaagagauucugaggacgcaggaaagcgagugugugugcauaaacggcacuuguacagucgugaugaccgacggcucugcuuccgggaaggcagauacuaaaauccucuuuauugaggaaggaaagaucgugcacacaucaaccuuaagcgguagugcccaacacgucgaggaaugcucuugcuauccucgguacccaggcguucgcugugugugcagagacaacuggaagggguccaauaggccgauaguagauauuaacaucaaagacuacagcaucgugucgucuuaugucuguuccggacuggugggcgacacgccccggaagaaugauucaaguagcuccucucauugccuugacccuaacaaugaggaaggugggcacggaguuaaaggcugggcuuucgaugacggcaacgauguguggauggggcgcaccauuagcgagaaguugcgacugggauacgagacauuuaaagucaucgaagguuggucaaauaguaacuccaagcuacagacuaauagacaggugauuguagacaggggcaaccggagcggguauucuggaauauucucaguugagggcaaaaguuguaucaaucguugcuuuuacguggaacucauucgcgguagaaaggaggaaaccgagguccuguggacaagcaacuccaucguggucuucugugggacuucuggcaccuauggaacaggcucguggccagauggggccgacaucaaucuuaugcccauuuga

SEQ ID NO: 143596 - RNA, 1413 nt, Artificial Sequence; identical to SEQ ID NO: 143404
  derived and/or modified CDS sequence (opt3) from neuraminidase__InfluenzaA__ABJ53496

SEQ ID NO: 143597 - RNA, 1413 nt, Artificial Sequence; identical to SEQ ID NO: 143404
  derived and/or modified CDS sequence (opt3) from neuraminidase__InfluenzaA__ABJ53507

SEQ ID NO: 143598 - RNA, 1413 nt, Artificial Sequence
  derived and/or modified CDS sequence (opt3) from neuraminidase__InfluenzaA__ABJ53518
augaaccccaaucagaagaucauuaccauaggcagcaucuccguggccauugggaucauuaaccugauccuccaaauaggaaauaucauuucuaucugggcuucacacaguauucagacagguagccagaacuacacuggcaucugcaaucagagaauaauuacguaugagaacaggaccugggucaaucaaacauacguuaacaucaauaacacuaaugugguagcagggaaagacaagaccuccaugacacuugccggaaaccugucuuuguguccuauucggggcugggcgaucuauaccaaagauaauucgauccgcauugguucaaagggggacguguucgucauacgagaaccauuuaucagcugcagucauuuagagugucguacuuucuuucugacacagggagcucuacucaacgauaaacacuccaauggcaccauuaaggacagaucuccguucagggcccugaugagcugcccccuuggcgaagcaccuuccccauacaacucacgguuugagaguguggccuggagcgcuucugcaugucaugaugggcugggaugguugacgaucgguauauccggccccgacaacggggccguugcugugcucaaguauaauggaauuaucacugaaaccaucaaaucauggaagaaacagauucugcgcacacaggagagcgagugcgucugugugaacggcaguugcuucacuaucaugaccgaugguccuucuaauagagccgcguccuacaggauuuuuaagauagaaaaagggcggguaacaaagagcaucgagcuggacgcaccaaacuaucacuacgaagaguguucgugcuaccccgauaccggaacgguuaugugugugugccgcgacaauuggcauggcucuaaccgaccuugggucuccuucaaucaaaaccucgauuaucagauuggcuacaucugcucagggguguuuggagacaauccaagaccgaaggauggugagggcaguuguaaccccgugacugucgacggggccgacggaguuaaaggcuucagcuauagguacgguaaugggguguggaucggccggacaaaguccaaccguuuacgcaaaggauuugaaaugauuugggauccuaauggcuggaccgacacugauucugacuucagcaugaagcaggauguaguggcuaugacagacuggucaggguauaguggauccuuuguccagcacccagagcugaccggucuugauugcaugagacccuguuucuggguggaauugguuaggggccugccucgggagaacacgaccauauggacaagcgggucuucaaucaguuucugcggagugaauagcgaaacugccaacugguccuggccagacggcgcagagcuacccuuuaccauugauaaauga

SEQ ID NO: 143599 - RNA, 1410 nt, Artificial Sequence; identical to SEQ ID NO: 142202
  derived and/or modified CDS sequence (opt3) from neuraminidase__InfluenzaA__ABK39965

SEQ ID NO: 143600 - RNA, 1410 nt, Artificial Sequence
  derived and/or modified CDS sequence (opt3) from neuraminidase__InfluenzaA__ABK39976
augaaccccaaucagaagaucauuaccauaggcagcgugucccugacaaucucuacuacgugcuucuuuaugcaaauugccauccucauuaccacagucacucuucacuucaaacaguacgaguuuaacucaccuccaaauaaccagguuaugcugugugaaccgaccaucauagagagaaauaucacagaaauuguguauuugaccaacacuacaaucgagaaggaaauuugccccaaauuagcugaguacaggaauuggaguaagccucaguguaacaucaccggguucgcaccauuuagcaaagacaauuccauacggcugucugccggaggugauauuuggguaacgcgcgagcccuaugugucgugcgacccugauaaguguuaccaauucgcgcuaggccaggggacuacccucaacaauguccauucaaacgacacagugcacgaucgaacuccauaucguacccugcuuaugaaugaacugggaguucccuuucauuugggcacaaaacaggugugcaucgcuuggagcaguuccucuugucacgacgguaaggccuggcuccaugucugcgugaccggggaugacaagaacgcaacggccagcuucauuuacaauggaagacugguagauuccaucguuucauggaguaaagagauccugaggacucaggaaagcgagugugugugcauuaacggcacaugugcugucgugaugaccgacggcucugcauccgggaaggccgauacuaaaauacucuuuaucgaggaaggaaagauugugcacacaucaaccuuaagcgguagugcucaacacgucgaggaaugcucuugcuauccucgguacccaggcguucgcugugugugcagagacaacuggaagggguccaauaggccgaucguagauauaaacauuaaagacuacagcaucgugucgucuuaugucuguuccggacuggugggcgacacgccccggaagaaugauucaaguagcuccucucauugccuugacccuaacaaugaggaaggugggcacggaguuaaaggcugggccuucgaugacggcaacgauguguggauggggcgcaccaucagcgagaaguugcgaucaggauacgagacauuuaaagucauugaagguuggaguaauccaaacuccaagcugcagaucaauagacaggugauuguagacaggggcaaccggagcggguauucuggaauauucucaguugagggcaaaaguuguaucaaucguugcuuuuacguggaacuaauucgcgguagaaaggaggaaacugagguccucuggaccagcaacuccaucguggucuucugugggacaucuggcacuuauggaaccggcucguggcccgauggggcggacaucaaucugaugccuauuuga

SEQ ID NO: 143601 - RNA, 1410 nt, Artificial Sequence; identical to SEQ ID NO: 142760
  derived and/or modified CDS sequence (opt3) from neuraminidase__InfluenzaA__ABK39987

SEQ ID NO: 143602 - RNA, 1410 nt, Artificial Sequence; identical to SEQ ID NO: 142430
  derived and/or modified CDS sequence (opt3) from neuraminidase__InfluenzaA__ABK39998

SEQ ID NO: 143603 - RNA, 1410 nt, Artificial Sequence; identical to SEQ ID NO: 142375
  derived and/or modified CDS sequence (opt3) from neuraminidase__InfluenzaA__ABK40020

SEQ ID NO: 143604 - RNA, 1413 nt, Artificial Sequence
  derived and/or modified CDS sequence (opt3) from neuraminidase__InfluenzaA__ABK40031
augaaccccaaucagaagaucauuaccauaggcagcaucuccguggccauugggaucauuaaccugauccuccaaauaggaaauaucauuucuaucugggcuucacacaguauucagacagguagccagaacuacacuggcaucugcaaucagagaauaauuacguaugagaacaggaccugggucaaucaaacauacguuaacaucaauaacacuaaugugguagcagggaaagacaagaccuccaugacacuugccggaaacucuucgcuguguccuauucggggcugggcgaucuauaccaaagauaauucaauccgcauugguagcaagggggacguguucgucauacgagaaccauuuaucaguugcucccauuuggagugucguacuuucuuuuuaacacagggagcucugcuaaacgauaaacacucuaauggcaccauuaaggacagaagcccguucagggcccucauguccugcccccugggcgaagcaccuucaccauacaacagucgguuugagagcguggccuggucugcuuccgcaugucaugaugggcuuggauggcugacgaucgguauaucaggccccgacaacggggccguugcuguguugaaguauaauggaauuaucacugaaaccaucaaaagcuggaagaaacagauucuccgcacacaggagagugagugcgucugugugaacggcucuugcuucacuaucaugaccgaugguccuuccaauagagccgcgagcuacaggauuuuuaagauagaaaaagggcggguaacaaagucgaucgagcuggacgcaccaaacuaucacuacgaagaguguucuugcuaccccgauaccggaacgguuaugugugugugccgcgacaauuggcauggcuccaaccgaccuugggucucauucaaucaaaaccuggauuaucagauuggcuacaucugcagugggguguuuggagacaauccaagaccgaaggauggugagggcagcuguaaccccgugacugucgacggggccgacggaguuaaaggcuucuccuauagguacgguaaugggguguggaucggccggacaaagucuaaccgucuccgcaaaggauuugaaaugauuugggauccuaauggcuggaccgacacugauagcgacuucucaaugaagcaggauguaguggcuaugacagacuggaguggguauuccggauccuuuguccagcacccagaguuaaccggucuggauugcaugagacccuguuucuggguggaacuuguuaggggcuugccucgggagaacacgaccauauggacaucugggucaaguaucagcuucugcggagugaauagcgaaacugccaacuggucuuggccagacggcgcagagcugcccuuuaccauugauaaauga

SEQ ID NO: 143605 - RNA, 1413 nt, Artificial Sequence; identical to SEQ ID NO: 143604
  derived and/or modified CDS sequence (opt3) from neuraminidase__InfluenzaA__ABK40042

SEQ ID NO: 143606 - RNA, 1413 nt, Artificial Sequence; identical to SEQ ID NO: 143604
  derived and/or modified CDS sequence (opt3) from neuraminidase__InfluenzaA__ABK40053

SEQ ID NO: 143607 - RNA, 1410 nt, Artificial Sequence; identical to SEQ ID NO: 142778
  derived and/or modified CDS sequence (opt3) from neuraminidase__InfluenzaA__ABK40064

SEQ ID NO: 143608 - RNA, 1410 nt, Artificial Sequence; identical to SEQ ID NO: 142778
  derived and/or modified CDS sequence (opt3) from neuraminidase__InfluenzaA__ABK40078

SEQ ID NO: 143609 - RNA, 1413 nt, Artificial Sequence; identical to SEQ ID NO: 143107
  derived and/or modified CDS sequence (opt3) from neuraminidase__InfluenzaA__ABK40513

SEQ ID NO: 143610 - RNA, 1413 nt, Artificial Sequence; identical to SEQ ID NO: 143107
  derived and/or modified CDS sequence (opt3) from neuraminidase__InfluenzaA__ABK40538

SEQ ID NO: 143611 - RNA, 1413 nt, Artificial Sequence
  derived and/or modified CDS sequence (opt3) from neuraminidase__InfluenzaA__ABK40549
augaaccccaaucagaagaucauuaccauaggcagcaucugcaugacaauugggaucauuucccugauccuccaaauaggaaacaucauuucuaucugggugucacacaguauucagacugguagccagaaucauacgggcaucuguaaccagagaauaauuaccuacgaaaauuccacaugggucaaccaaacuuauguuaauaucaacaauaccaacgugguagccgggaaagacacaaccucugugacucuugcuggaaauucgucacugugcccuauuaggggcugggcaaucuacagcaaggauaacaguauccggauugguuccaaaggggacgucuucgugauacgcgagccauuuaucucuuguagccacuuggagugccgaacauucuuuuuaacccagggagcccugcuaaaugauaagcauuccaacggcacgguuaaagaccguucaccguauagagcgcucaugaguugucccauuggcgaagcuccuagcccauacaauucuagguucgaguccguggccuggucagcaagcgccugccacgaugggaugggauggcugacuaucgguauaaguggccccgacgauggggcugucgcagugcuuaaguauaacggaauuaucaccgaaacaaucaagucuuggcggaaacgcauucugagaacucaggaguccgaguguguaugcguuaacggcagcuguuuuaccaucaugacagacgguccuucgaaugggccagccucuuacaggauuuucaagauagaaaaaggaaagaucaccaaauccauugaguuggaugcucccaacucacauuaugaagagugcaguuguuacccugacacgggcacugugaugugcgucugccgggauaauuggcacggcagcaaccgcccauggguguccuuuaaucagaaccucgacuacaagaucggguauaucuguucuggaguguucggugauaauccgcgacccaaggacggcaaagggagcugcgacccugucacaguugauggagccgacggcgugaaggguuuuucauacagauaugggaacggcguauggauuggaaggaccaaaaguaauuccagccggaagggcuucgagaugauaugggauccaaacggguggacugacacagauucuaauuuucuggugaaacaagacgucguggcgaugaccgauuggucaggauacagugguagcuucguucagcaccccgaacugacgggccucgacuguaugcguccuugcuuuuggguggaguuaauccgcgggagaccaagggaaaagaccacaauuuggacuuccggaucuucgaucagcuucuguggcgucaacuccgauaccgcaaauuggucauggcccgacggugccgagcugccguucacaauugauaaauga

SEQ ID NO: 143612 - RNA, 1413 nt, Artificial Sequence; identical to SEQ ID NO: 143107
  derived and/or modified CDS sequence (opt3) from neuraminidase__InfluenzaA__ABK40560

SEQ ID NO: 143613 - RNA, 1413 nt, Artificial Sequence; identical to SEQ ID NO: 143107
  derived and/or modified CDS sequence (opt3) from neuraminidase__InfluenzaA__ABK40571

SEQ ID NO: 143614 - RNA, 1413 nt, Artificial Sequence; identical to SEQ ID NO: 143107
  derived and/or modified CDS sequence (opt3) from neuraminidase__InfluenzaA__ABK40582

SEQ ID NO: 143615 - RNA, 1413 nt, Artificial Sequence
  derived and/or modified CDS sequence (opt3) from neuraminidase__InfluenzaA__ABK40593
augaaccccaaucagaagaucauuaccauaggcagcaucugcaugacaauugggaucauuucccugauccuccaaauaggaaacaucauuucuaucugggugucacacaguauucagacugguagccagaaucauacgggcaucuguaaccagagaauaauuaccuacgaaaauuccacaugggucaaccaaacuuauguuaauaucaacaauaccaacgugguagccgggaaagacacaaccucugugacucuugcuggaaauucgucacugugcccuauuaggggcugggcaaucuacagcaaggauaacaguauccggauugguuccaaaggggacgucuucgugauacgcgagccauuuaucucuuguagccacuuggagugccgaacauucuuuuuaacccagggagcccugcuaaaugauaagcauuccaacggcacgguuaaagaccguucaccguauagagcgcucaugaguugucccauuggcgaagcuccuagcccauacaauucuagguucgaguccguggccuggucagcaagcgccugccacgaugggaugggauggcugacuaucgguauaaguggccccgacgauggggcugucgcagugcuuaaguauaacggaauuaucaccgaaacaaucaagucuuggcggaaacgcauucugagaacucaggaguccgaguguguaugcguuaacggcagcuguuuuaccaucaugacagacgguccuucgaaugggccagccucucauaggauuuucaagauagaaaaaggaaagaucaccaaauccauugaguuggaugcucccaacucacacuacgaagagugcaguuguuauccugacacgggcacugugaugugcgucugccgggauaauuggcacggcagcaaccgcccauggguguccuuuaaucagaaccucgacuacaagaucggguacaucuguucuggaguguucggugauaauccgcgacccaaggacggcaaagggagcugcgacccugucacaguugauggagccgacggcgugaaggguuuuucauauagauacgggaacggcguauggauuggaaggaccaaaaguaauuccagccggaagggcuucgagaugauaugggauccaaacggguggacugacacagauucuaauuuucuggugaaacaagacgucguggcgaugaccgauuggucaggauauagugguagcuucguucagcaucccgaacugacgggccucgacuguaugcguccuugcuuuuggguggaguuaauccgcgggagaccaagggaaaagaccacaauuuggacuuccggaucuucgaucagcuucuguggcgucaacuccgauaccgcaaauuggucauggcccgacggugccgagcugccguucacaauugauaaauga

SEQ ID NO: 143616 - RNA, 1413 nt, Artificial Sequence; identical to SEQ ID NO: 143107
  derived and/or modified CDS sequence (opt3) from neuraminidase__InfluenzaA__ABK40604

SEQ ID NO: 143617 - RNA, 1410 nt, Artificial Sequence; identical to SEQ ID NO: 142778
  derived and/or modified CDS sequence (opt3) from neuraminidase__InfluenzaA__ABK40615

SEQ ID NO: 143618 - RNA, 1410 nt, Artificial Sequence; identical to SEQ ID NO: 142109
  derived and/or modified CDS sequence (opt3) from neuraminidase__InfluenzaA__ABK40626

SEQ ID NO: 143619 - RNA, 1410 nt, Artificial Sequence
  derived and/or modified CDS sequence (opt3) from neuraminidase__InfluenzaA__ABK40648
augaaccccaaucagaagaucauuaccauaggcagcgugucccugacaaucgccacuauuugcuuccucaugcaaaucgcuauucuugucacgaccguuacacugcacuuuaaacaguacgaguguaacucuccuccaaauaaccaggugauguugugcgaaccgacuaucauagagagaaauaucaccgaaauuguauauuuaacaaacaccacuaucgagaaggaaauuugucccaaacuggcagaguacaggaauuggucaaagccucagugcaaaaucacaggguucgccccauuuaguaaggacaacagcauacggcuauccgcgggaggugauauuugggugacccgcgagcccuaugucucuugugacccuggcaagugcuaccaauucgcucucgggcagggaacgacucugaauaaccgacauucgaaugauaccgugcacgaccguacaccauauagaacucuucugaugaacgaauugggcauccccuuucaucucgguaccaaacagguuuguauugccuggucaagcaguuccugccacgaugggaaggcauggcugcaugugugugucacaggacacgacgagaaugccaccgcuucuuucaucuacgauggcaggcugguggacagcaucggcuccuggaguaaaaacauucuccggacgcaggaaucagagugcguauguauaaaugggacuugcacaguugugaugaccgauggaagcgcaucugaccgcgccgauacuaagaucuuauuuauugaggaagguaaaaucguccacauauccccucugucaggcagcgcucaacauguggaggaaugcaguuguuauccaagauacccgggggugaggugcgucugucgggacaacuggaagggaucuaaccgccccauuguugauaucaaugugaaggacuacuccaucguaagcucguaugugugcucuggccuugucggugacacaccucgaaagaacgauuccucaaguagcuccuacuguuggaauccaaacaaugagaaagggggacacggcgugaaaggcugggccuucgacgaugggaacgacguuuggaugggaagaaccauuucugaagagagcaggucagguuaugagacguuuaaggugaucggcggguggaguaaacccaauuccaaguugcagauuaaccggcaggucauaguggaucguggaaaucgcagcggcuacucugguaucuucucaguagaagggaaaaguugcauuaacagauguuuuuauguugagcugaucaggggccggaagcaggaaaccgaggugugguggacaagcaauuccaucgucguguucugcggaacuucuggcaccuacgggacaggaucguggccugacggugcggauauuaaccuaaugccaauauga

SEQ ID NO: 143620 - RNA, 1410 nt, Artificial Sequence; identical to SEQ ID NO: 143161
  derived and/or modified CDS sequence (opt3) from neuraminidase__InfluenzaA__ABK40659

SEQ ID NO: 143621 - RNA, 1410 nt, Artificial Sequence; identical to SEQ ID NO: 143149
  derived and/or modified CDS sequence (opt3) from neuraminidase__InfluenzaA__ABK40681

SEQ ID NO: 143622 - RNA, 1413 nt, Artificial Sequence
  derived and/or modified CDS sequence (opt3) from neuraminidase__InfluenzaA__ABK40692
augaaccccaaucagaagaucauuaccauaggcagcaucuccauugccaucgggauuaucucucugaugcuccaaauaggaaacaucauuucaaucugggcuagucacagcauucagacagguucccagaaucauacuggcaucugcaaccagagaauaauuacguacgaaaauucuaccugggugaaccacacauaugucaauaucaacaauacuaacguuguggcagggaaagacaagaccucgguaacacuugccggaaauucaagccuguguaguauuuccggcugggcgaucuacaccaaagauaacucuaucaggauugguagcaagggggacguguucgucauacgggagccuuuuaucuccugcucacauuuggagugucgcacuuucuuuuuaacacaaggagcucugcuaaaugauaaacacaguaacggcaccgugaaggaccgaagcccauaucgugcccucaugucuugcccgcugggcgaagcacccuccccuuacaauucaaaguucgagagcguugccuggagugcuucugcaugucaugaugggaugggauggcuuacgauugguaucuccggcccagacaacggggccguggcuguccugaaauauaacggaauaauuacugaaaccaucaagagcugggagaaaagaaucuugaggacacaggagucggaaugcguguguguaaauggcucuugcuuuacuauuaugaccgauggucccuccaacggggccgcgucauacaagaucuucaaaauugagaagggaaagguuacaaaaaguguggaacucaaugcaccuaacuuucacuaugaggaguguagcugcuacccagacaccggcacggucaugugugugugccgggauaauuggcacggcuccaaccgccccugggugucuuucaaucagaaccuggacuaccagauaggguauaucugcagcggagucuuuggugauaauccuagaccaaaggacggcaaagggucauguaacccgguuacuguggauggagccgacggcguaaaggguuucaguuacaaauaugggaauggcguguggauuggaaggacaaaguccaaccggcugcgcaaaggcuuugaaaugaucugggaccccaauggguggaccgauacugacagcgauuucucugucaagcaagacgugguugcuaucacagauuggucaggauacagugguagcuuugugcagcauccugagcucaccggcuuagacugcauucgaccauguuucugggucgaacuggugagagggcuucccagggagaacacgaccauauggacauccggaucuucgaucagcuucugcggcguagauuccgacacugccaauuggucauggccugauggugcagaauugccauuuaccauugacaaguga

SEQ ID NO: 143623 - RNA, 1410 nt, Artificial Sequence; identical to SEQ ID NO: 142778
  derived and/or modified CDS sequence (opt3) from neuraminidase__InfluenzaA__ABK40703

SEQ ID NO: 143624 - RNA, 1410 nt, Artificial Sequence; identical to SEQ ID NO: 142778
  derived and/or modified CDS sequence (opt3) from neuraminidase__InfluenzaA__ABK40714

SEQ ID NO: 143625 - RNA, 1410 nt, Artificial Sequence; identical to SEQ ID NO: 142778
  derived and/or modified CDS sequence (opt3) from neuraminidase__InfluenzaA__ABK40725

SEQ ID NO: 143626 - RNA, 1410 nt, Artificial Sequence; identical to SEQ ID NO: 142778
  derived and/or modified CDS sequence (opt3) from neuraminidase__InfluenzaA__ABK40736

SEQ ID NO: 143627 - RNA, 1410 nt, Artificial Sequence; identical to SEQ ID NO: 143493
  derived and/or modified CDS sequence (opt3) from neuraminidase__InfluenzaA__ABK40747

SEQ ID NO: 143628 - RNA, 1413 nt, Artificial Sequence; identical to SEQ ID NO: 142999
  derived and/or modified CDS sequence (opt3) from neuraminidase__InfluenzaA__ABK79951

SEQ ID NO: 143629 - RNA, 1413 nt, Artificial Sequence; identical to SEQ ID NO: 143604
  derived and/or modified CDS sequence (opt3) from neuraminidase__InfluenzaA__ABK79973

SEQ ID NO: 143630 - RNA, 1410 nt, Artificial Sequence; identical to SEQ ID NO: 142778
  derived and/or modified CDS sequence (opt3) from neuraminidase__InfluenzaA__ABK79984

SEQ ID NO: 143631 - RNA, 1410 nt, Artificial Sequence; identical to SEQ ID NO: 142778
  derived and/or modified CDS sequence (opt3) from neuraminidase__InfluenzaA__ABK79995

SEQ ID NO: 143632 - RNA, 1413 nt, Artificial Sequence; identical to SEQ ID NO: 143107
  derived and/or modified CDS sequence (opt3) from neuraminidase__InfluenzaA__ABK80028

SEQ ID NO: 143633 - RNA, 1413 nt, Artificial Sequence; identical to SEQ ID NO: 143107
  derived and/or modified CDS sequence (opt3) from neuraminidase__InfluenzaA__ABK80039

SEQ ID NO: 143634 - RNA, 1413 nt, Artificial Sequence; identical to SEQ ID NO: 143107
  derived and/or modified CDS sequence (opt3) from neuraminidase__InfluenzaA__ABK80050

SEQ ID NO: 143635 - RNA, 1410 nt, Artificial Sequence
  derived and/or modified CDS sequence (opt3) from neuraminidase__InfluenzaA__ABK80061
augaaccccaaucagaagaucauuaccauaggcagcgugucccugacaaucgccacuauuugcuuccucaugcaaaucgcuauucuugucacgaccguuacacugcacuuuaaacaguacgaguguaacucuccuccaaauaaccaggugauguugugcgaaccgacuaucauagagagaaauaucaccgaaauuguauauuuaacaaacaccacuaucgagaaggaaauuugucccaaacuggcagaguacaggaauuggucaaagccucagugcaacaucacaggguucgccccauuuaguaaagacaauagcauacggcuauccgcgggaggugauauuugggugacccgcgagcccuaugucucuugugacccugauaagugcuaccaauucgcucucggccaggggacgacucugaacaauggacauucgaacgacaccgugcacgaucgaacaccauaucguacucuucugaugaaugaauugggcguucccuuucaucucgguaccaaacagguguguaucgccuggucaagcaguuccugccacgacgggaaggcauggcugcaugucugugugacaggagaugacgagaacgccaccgcuucuuucauuuacaauggcagacugguagauagcaucggcuccuggucaaagaaaauccucaggacgcaggaaagugagugcguuuguauuaacgggacuugcacaguggucaugaccgacggaagcgcaucugguaaggccgauacuaaaauauuauuuaucgaggaaggcaagauugugcacacauccucacugagcgggagugcucaacacguggaggaaugcucuuguuauccucgguacccaggaguccgcugcguuuguagagacaacuggaagggcuccaauaggccgaucguggauauaaacguaaaagacuacagcauugugucgucuuaugucugcuccggucuugugggggacacgccccggaagaaugauucaaguagcuccucucauuguuuggacccuaacaaugaggaaggaggccacggcguuaaagggugggccuucgaugacggaaacgauguguggaugggucgcaccaucagcgagaagucacgaaguggcuacgagaccuuuaaagucaucgaagggugguccaagccaaauagcaaacugcagauuaacagacaggugaucguagacaggggaaaucggucuggcuauucagguauuuucaguguugagggcaagagcugcauaaaccguuguuuuuacguggaacuaauccgcgggagaaagcaggagacagaaguccucuggacuuccaauucuauuguggucuucugcggaaccucgggcacauaugggacuggaagcuggcccgauggugcggacaucaaccugaugccuaucuga

SEQ ID NO: 143636 - RNA, 1410 nt, Artificial Sequence; identical to SEQ ID NO: 142109
  derived and/or modified CDS sequence (opt3) from neuraminidase__InfluenzaA__ABK80072

SEQ ID NO: 143637 - RNA, 1410 nt, Artificial Sequence
  derived and/or modified CDS sequence (opt3) from neuraminidase__InfluenzaA__ABK80083
augaaccccaaucagaagaucauuaccauaggcagcgugucccugacaaucgccacuauuugcuuccucaugcaaaucgcuauucuugucacgaccguuacacugcacuuuaaacaguacgaguguucuucaccuccaaacaaucaggugauguugugcgaaccgacuaucauagagagaaacaucaccgaaauuguauauuuaacaaauaccacuaucgagaaggaaauuugucccaaacuggcagaguacaggaacuggaguaagccucagugcaauaucacaggguucgccccauuuagcaaagacaacuccauacggcuaucugcgggaggugauauuugggugacccgcgagcccuaugucucgugugacccugauaagugcuaccaauucgcucucggccaggggacgacucugaauaacggacauucaaaugacaccgugcacgaucgaacaccauaucguacucuucugaugaacgaauugggcguucccuuucaucucgguaccaaacagguguguaucgccuggagcaguuccucuugccacgacgggaaggcauggcugcaugucugugugacaggagaugacgagaaugccaccgcuagcuucauuuacaacggcagacugguagauuccaucggcucauggaguaagaaaauccucaggacgcaggaaagcgagugcguuuguauuaaugggacuugcacaguggucaugaccgacggaucugcauccgguaaggccgauacuaaaauauuauuuaucgaggaaggcaagauugugcacacaucacugcuuagcgggagugcucaacacguggaggaaugcucuuguuauccucgguacccaggaguccgcugcguuuguagagacaacuggaagggcuccaacaggccgaucguggauauaaauguaaaagacuacagcauugugucgucuuaugucugcuccgguuuggugggggacacgccccggaagaacgauucaaguagcuccucucauugucuggacccuaauaacgaggaaggaggccacggcguuaaagggugggccuucgaugacggaaaugauguguggaugggucgcaccaucagcgagaagcuacgaucaggcuacgagaccuuuaaagucaucgaaggguggaguaagccaaacuccaaacuccagauuaauagacaggugaucguagacaggggaaaccggagcggcuauucugguauuuucucaguugaggggaagaguugcauaaaucguuguuuuuacguggaacugauccgcggcagaaagcaggagacagaaguccuuuggacuagcaacuccauuguggucuucugcggaaccucuggcacauaugggacuggaucguggcccgauggugcggacaucaaucugaugccuaucuga

SEQ ID NO: 143638 - RNA, 1410 nt, Artificial Sequence
  derived and/or modified CDS sequence (opt3) from neuraminidase__InfluenzaA__ABK80094
augaaccccaaucagaagaucauuaccauaggcagcgugucccugaucauugccacaaucugcuuccucaugcaaauugcuauccuugucacuacgguuacccugcacuuuaaacaguacgaguguaacucuccuccaaauaaccaggugauguugugcgaaccgacaauaaucgagagaaauauuacugaaaucguauauuuaaccaacacaaccauugagaaggaaaucugucccaaacuggcagaguacaggaauuggucaaagccucagugcaacauaacuggguucgccccauuuaguaaagacaauagcauucggcuauccgcgggaggugauaucugggugacacgcgagcccuaugucucuugugacccugauaagugcuaccaauucgcucucggccaggggaccacgcugaacaauggacauucgaacgacacugugcacgaucgaaccccauaucguacacuucugaugaaugaauugggcguucccuuucaucucgguacuaaacagguguguauugccuggucaagcaguuccugccacgacgggaaggcauggcugcaugucugugugaccggagaugacgagaacgccacagcuucuuucaucuacaauggcagacugguagauagcaucggcuccuggucaaagaaaauucucaggacccaggaaagugagugcguuuguauaaacgggacgugcacuguggucaugacagacggaagcgcaucugguaaggccgauaccaaaaucuuauuuauugaggaaggcaagaucgugcacacuuccucacugagcgggagugcucaacacguggaggaaugcucuuguuauccucgguacccaggaguccgcugcguuuguagagacaacuggaagggcuccaauaggccgauaguggauauuaacguaaaagacuacagcaucgugucgucuuaugucugcuccggucuugugggggacacaccccggaagaaugauucaaguagcuccucucauuguuuggacccuaacaaugaggaaggaggccacggcguuaaagggugggccuucgaugacggaaacgauguguggaugggucgcaccaucagcgagaagcugcgaucaggcuacgagacguuuaaagucauugaaggguggaguaagccaaauuccaaacuacagaucaacagacaggugauuguagacaggggaaaucggagcggcuauucugguauauucucaguugagaguaagagcugcaucaaccguuguuuuuacguggaacucauucgcgggagaaagcaggagaccgaaguccuguggacauccaauucuaucguggucuucugcggcacuucgggaaccuauggcacagggagcuggcccgauggagcggacaucaaccuuaugccuauuuga

SEQ ID NO: 143639 - RNA, 1410 nt, Artificial Sequence; identical to SEQ ID NO: 142778
  derived and/or modified CDS sequence (opt3) from neuraminidase__InfluenzaA__ABK80105

SEQ ID NO: 143640 - RNA, 1410 nt, Artificial Sequence
  derived and/or modified CDS sequence (opt3) from neuraminidase__InfluenzaA__ABK80138
augaaccccaaucagaagaucauuaccauaggcagcgugucccugacaaucgccacuauuugcuuccucaugcagacggcuauccuugucaccacaguuacucugcacuuuaaacaguacgaguguaacucuccuccaaauaaccaggugauguugugcgaaccgaccauuaucgagagaaauauaacagaaaucguauauuuaaccaacacuacaauugagaaggaaaucugucccaaacuggcagaguacaggaauuggucaaagccucagugcaacauuaccggguucgccccauuuaguaaagacaauagcauccggcuauccgcgggaggugauauaugggugacgcgcgagcccuaugucucuugugacccugauaagugcuaccaauucgcucucggccaggggacuacccugaacaauggacauucgaacgacacagugcacgaucgaacuccauaucguacccuucugaugaaugaauugggcguucccuuucaucucgguacaagacagguguguauugccuggucaagcaguuccugccacgacgggaaggcauggcugcaugucugugugaccggagaugacgagaacgccacggcuucuuucaucuacaauggcaggcugguagauagcauuggcuccuggaguaaaaagauccuccggacucaggaaucagagugcguuuguaucaacgggacaugcaccguggucaugacugacggaagcgcaucugguaaagccgauacaaagauuuuauuuauagaggaaggcaaaaucgugcacauuuccacccugucagggagcgcucaacacguggaggaaugcaguuguuauccucgcuacccaggagucagaugcguuuguagggacaacuggaagggcucuaaucggccgaucguggauauaaacguaaaggacuacuccauugugagcucguaugucugcucuggucuugugggggacacgccccgcaaaaaugauuccuucucaaguagccauuguuuggacccuaacaaugaggaaggaggccacggcguuaaggggugggccuuugaugacggaaacgauguguggaugggucgaaccaucuccgagaaacugagaucuggcuacgagacauucaaggucaucgaaggguggagcaaaccaaauucaaagcuacagauuaacaggcaagugaucguagagcggggaaaucguaguggcuauuccgguauuuuuagcguugaagggaaaucuugcauaaaccgcuguuucuacguggagcucaucagaggcaggaaggaagagacugaggucugguggaccucaaauaguauuguggucuuuugcggaacaagcggcacuuaugggaccggauccuggcccgacggugcggauaucaaccugaugccuaucuga

SEQ ID NO: 143641 - RNA, 1410 nt, Artificial Sequence
  derived and/or modified CDS sequence (opt3) from neuraminidase__InfluenzaA__ABK80149
augaaccccaaucagaagaucauuaccauaggcagcgugucccugacaaucgccacuauuugcuuccucaugcaaaucgcuauucuugucacgaccguuacacugcacuuuaaacaguacgaguguaacucuccuccaaauaaccaggcaauguuguaugaaccgacuaucauagagagaaauaucaccgaaauuguguacuuaacaaacaccacuaucgagaaggaaauuugccccaaacuggccgaguauaggaauuggucaaagccucaguguaacaucacaggguucgcgccauuuaguaaagacaauagcauacggcuauccgcuggaggugauauuuggguaacccgcgagcccuacgugucuugcgacccugauaaguguuaucaauucgcccucggccaggggacgacucugaacaauggacauucgaacgacaccguccacgaucgaacaccauaccguacucuucugaugaaugaauugggcgugcccuuucaucucgguaccagacagguuugcaucgcauggucaagcaguuccugucacgacgggaaggccuggcugcaugugugcgucacaggagaugacgagaacgcuaccgcaucuuucauuuauaauggcaggcugguggauagcaucggcuccuggaguaaaaagauccuccggacgcaggaaucagaguguguaugcauuaacgggacuuguacaguugugaugaccgacggaagcgccucugguaaagcugauacuaagauauuauuuaucgaggaaggcaaaauuguccacaucuccacacugucagggagcgcccaacacguggaggaaugcaguugcuacccucgcuacccaggagugagaugugucugcagggacaacuggaagggcucuaaucggccgauaguugauauuaacgugaaggacuauuccaucguaagcucguacguguguucuggucuugucggggacacgccccgcaaaaaugauuccuucucaaguagccauugcuuggacccuaacaaugaggaaggaggccacggcgugaaggggugggcguuugaugacggaaacgauguuuggaugggucgaaccaucuccgagaaacugagaucuggcuaugagaccuucaaggugauugaaggguggagcaaaccaaauucaaagcuacagaucaacaggcaggucauuguggagcggggaaaucguaguggcuacuccgguauauuuagcguagaagggaaaucuuguaucaaccgcugcuucuauguugagcucauuagaggcaggaaggaagagacagaggugugguggacuucaaauaguaucgucguguuuuguggaaccagcggcacauacgggacuggauccuggcccgacggugcagauaucaaccugaugccuauuuga

SEQ ID NO: 143642 - RNA, 1410 nt, Artificial Sequence; identical to SEQ ID NO: 143641
  derived and/or modified CDS sequence (opt3) from neuraminidase__InfluenzaA__ABK80160

SEQ ID NO: 143643 - RNA, 1410 nt, Artificial Sequence
  derived and/or modified CDS sequence (opt3) from neuraminidase__InfluenzaA__ABK80171
augaaccccaaucagaagaucauuaccauaggcagcgugucccugacaaucgccacuauuugcuuccucaugcaaaucgcuauucuugucacgaccguuacacugcacuuuaaacaguacgaguguaacccuccaccgaauaaccaggugauguugugcgaacccacuaucauagagagaaauaucaccgaaauuguauauuuaacaaacaccacuaucgagaaggaaauuuguccuaaacuggcagaguacaggaauuggucuaagccacagugcaacaucacaggguucgcccccuuuucaaaagacaauaguauacggcuaagcgcgggaggugauauuugggugacccgcgagccuuaugucuccugugacccagauaagugcuaccaauucgcucucggccaggggacgacucugaacaauggacauucuaacgacaccgugcacgaucgaacacccuaucguacucuucugaugaaugaauugggcguuccuuuucaucucgguaccagacagguguguaucgccuggucgucaagcaguugccacgacgggaaggcauggcugcaugucugugugacaggagaugacgagaacgccaccgcuuccuucauuuacaauggcaggcugguagauucuaucggcagcugguccaaaaagauccuccggacgcaggaaucagagugcguuuguauuaacgggacuugcacaguggucaugaccgacggaagugcaagcgguaaagccgauacuaagauauuauuuaucgaggaaggcaaaauugugcacaucucuacacuguccgggucagcucaacacguggaggaaugcagcuguuauccacgcuacccgggagucagaugcguuuguagggacaacuggaagggcaguaaucggcccauaguggauauuaacguaaaggacuacucuaucuucuccagcuaugugugcucgggucuugucggggacaccccucgcaaaaaugauucuuuuuccucaagucauuguuuggacccaaacaaugaggaaggaggccacggcgugaaggggugggccuucgaugacggaaacgauguuuggaugggucgaacgaucagcgagaaacugagauccggcuacgagaccuuuaaggugauugaaggguggucuaaacccaauagcaagcuacagacaaacaggcaggucaucguggagcggggaaaucguucaggcuauagugguauuuucuccguagaagggaaaagcugcauaaaccgcuguuuuuacguugagcucaucagaggcaggaaggaagagacugaggugugguggaccucuaauucaauugucguguucugcggaacaaguggcacuuaugggaccggaagcuggccugacggugcggauaucaaccugaugccaaucuga

SEQ ID NO: 143644 - RNA, 1410 nt, Artificial Sequence
  derived and/or modified CDS sequence (opt3) from neuraminidase__InfluenzaA__ABK80182
augaaccccaaucagaagaucauuaccauaggcagcgugucccugacaaucgccacuauuugcuuccucaugcaaaucgcuauucuugucacgaccguuacacugcacuuuaaacaguacgaguguaacucuccuccaaauaaccaggugauguugugcgaaccgacuaucauagagagaaauaucaccgaaauuguauauuuaacaaacaccacuaucgagaaggaaauuugucccaaacuggcagaguacaggaauuggucaaagccucagugcaacaucacaggguucgccccauuuaguaaagacaauagcauacggcuauccgcgggaggugauauuugggugacccgcgagcccuaugucucuugugacccugauaagugcuaccaauucgcucucggccaggggacgacucugaacaauggacauucgaacgacaccgugcacgaucgaacaccauaucguacucuucugaugaaugaauugggcguucccuuucaucucgguaccagacagguguguaucgccuggucaagcaguuccugccacgacgggaaggcauggcugcaugucugugugacaggagaugacaaaaacgccaccgcuucuuucauuuacaauggcaagcugguagauagcaucggcuccuggaguaaaaagauccucaggacgcaggagucagaaugcguuuguauuaacgggacuugcgcaguggucaugacagacggaagcgccucugguaaagcugauaccaagauauuauuuaucgaggagggcaagauugugcacaucuccacucugucagggagcgcccaacacguggaagagugcaguuguuauccucgguacccaggaguccgcugcguuuguagagacaacuggaaaggcucuaauaggccgauaguggauauuaacguaaaggacuacuccaucgugagcucguaugucugcucuggucuugugggggacacaccccggaaaaaugauuccuucucaaguagccauuguuuggacccuaacaaugaagagggaggccacggcguuaaggggugggcguuugaugacggaaacgauguguggaugggucgcaccaucuccgaaaaacugcgaucuggcuacgagacguucaaggucauugagggguggagcaaaccaaauucaaagcuacagaccaacagacaggugaucguagaaaggggaaaucggaguggcuauuccgguauuuuuagcguugaggggaagucuugcauaaaccguuguuucuacguggaacucauccgcggcagaaaagaggaaacagaggucugguggacuucaaauaguauuguggucuuuugcggaaccagcggcacauaugggacuggauccuggcccgacggugcagauaucaaccugaugccuaucuga

SEQ ID NO: 143645 - RNA, 1410 nt, Artificial Sequence
  derived and/or modified CDS sequence (opt3) from neuraminidase__InfluenzaA__ABK80193
augaaccccaaucagaagaucauuaccauaggcagcgugucccugacaaucgccacuauuugcuuccucaugcaaaucgcuauucuugucacgaccguuacacugcacuuuaaacaguacgaguguaacucuccuccaaauaaccaggugauguugugcgaaccgacuaucauagagagaaauaucaccgaaauuguauauuuaacaaacaccacuaucgagaaggaaauuugucccaaacuggcagaguacaggaauuggucaaagccucagugcaacaucacaggguucgccccauuuaguaaagacaauagcauacggcuauccgcgggaggugauauuugggugacccgcgagcccuaugucucuugugacccugauaagugcuaccaauucgcucucggccaggggacgacucugaacaauggacauucgaacgacaccgugcacgaucgaacaccauaucguacucuucugaugaaugaauugggcguucccuuucaucucgguaccagacagguguguaucgccuggucaagcaguuccugccacgacgggaaggcauggcugcaugucugugugacaggagaugacgagaacgccaccgcuucuuucauuuacaauggcaggcugguagauagcaucggcuccuggaguaaaaagauccuccggacgcaggaaucagagugcguuuguauuaacgggacuugcacaguggucaugaccgacggaagcgcaucugguaaagccgauacuaagauauuauuuaucgaggaaggcaaaauugugcacaucuccacacugucagggagcgcucaacacguggaggaaugcaguuguuauccucgcuacccaggagucagaugcguuuguagggacaacuggaagggcucuaaucggccgauaguggauauuaacguaaaggacuacuccaucgugagcucguaugucugcucuggucuugugggggacacccccaggaaaaaugauuccuucucaaguagccauuguuuggacccuaacaaugaggaaggaggccacggcguuaaggggugggccuuugaugacggaaacgauguguggaugggucgaacgaucggcgagaaacugagauccggguacgagaccuucaaggucauugaaggauggucuaaaccaaauagcaagcuacagacaaaccgccaggugaucguagagcggggcaaucguucagguuauagugggauauuuuccguugaaggcaaaagcugcauuaaccgcuguuucuacguggagcucaucagaggaaggaaggaagagacugaggucugguggaccucuaauucaauuguggucuuuugcggcacaagugggacuuauggaaccgguagcuggcccgacggcgcggauaucaaccugaugccuaucuga

SEQ ID NO: 143646 - RNA, 1410 nt, Artificial Sequence
  derived and/or modified CDS sequence (opt3) from neuraminidase__InfluenzaA__ABK80204
augaaccccaaucagaagaucauuaccauaggcagcgugucccugacaaucgccacuauuugcuuccucaugcaaaucgcuauucuugucacgaccguuacacugcacuuuaaacaguacgaguguaacucuccuccaaauaaccaggugauguugugcgaaccgacuaucauagagagaaauaucaccgaaauuguauauuuaacaaacaccacuaucgagaaggaaauuugucccaaacuggcagaguacaggaauuggucaaagccucagugcaacaucacaggguucgccccauuuaguaaagacaauagcauacggcuauccgcgggaggugauauuugggugacccgcgagcccuaugucucuugugacccugauaagugcuaccaauucgcucucggccaggggacgacucugaacaauggacauucgaacgacaccgugcacgaucgaacaccauaucguacucuucugaugaaugaauugggcguucccuuucaucucgguaccagacagguguguaucgccuggucaagcaguuccugccacgacgggaaggcauggcugcaugucugugugacaggagaugacgagaacgccaccgcuucuuucauuuacaauggcaaacugguagauagcaucggcuccuggucaaagaaaauccucaggacgcaggaaagugagugcguuuguauuaacgggacuugcgcaguggucaugacagacggaagcgccucugguaaggcugauaccaaaauauuauuuaucgaggaaggcaagauugugcacaucuccacucugucagggagcgcccaacacguggaggaaugcaguuguuauccucgguacccaggaguccgcugcguuuguagagacaacuggaagggcucuaauaggccgauaguggauauuaacguaaaagacuacuccaucgugagcucguaugucugcucuggucuugugggggacacaccccggaagaaugauuccuucucaaguagccauuguuuggacccuaacaaugaggaaggaggccacggcguuaaagggugggcguuugaugacggaaacgaugcauggaugggucgcaccaucuccgagaagcugcgaucuggcuacgagacguucaaagugauugaaggguggagcaagccaaauucaaaacuacagaccaacagacaggucaucguggagaggggaaaucggaguggcuauuccgguauuuuuagcguagaagggaagucuugcauaaaccguuguuucuacguugagcucauccgcggcagaaaggaagagacagaggugugguggacuucaaauaguauugucguguuuugcggaaccagcggcacauaugggacuggauccuggcccgacggugccgauaucaaccugaugccuaucuga

SEQ ID NO: 143647 - RNA, 1410 nt, Artificial Sequence; identical to SEQ ID NO: 142639
  derived and/or modified CDS sequence (opt3) from neuraminidase__InfluenzaA__ABK80215

SEQ ID NO: 143648 - RNA, 1410 nt, Artificial Sequence; identical to SEQ ID NO: 142639
  derived and/or modified CDS sequence (opt3) from neuraminidase__InfluenzaA__ABK80226

SEQ ID NO: 143649 - RNA, 1410 nt, Artificial Sequence
  derived and/or modified CDS sequence (opt3) from neuraminidase__InfluenzaA__ABK80237
augaaccccaaucagaagaucauuaccauaggcagcgugucccugacaaucgccacuauuugcuuccucaugcaaaucgcuauucuugucacgaccguuacacugcacuuuaaacagcaugaguguaacucuccuccaaauaaccaggugauguugugcgaaccgacuaucauagagagaaauaucaccgaaauuguauacuuaacaaacaccacuaucgagaaggaaauuugucccaaacugguggaguauaggaauuggucaaagccucagugcaacaucacaggguucgcaccauuuaguaaagacaauagcauacggcuauccgccggaggugauauuugggucacccgcgagcccuacgugucuugugacccugauaagugcuaucaauucgcgcucggccaggggacgacucugaacaauggacacucgaacgacaccguucaugaucgaacaccauaccguacucuucugaugaaugaauugggcgugcccuuucaccucgguaccagacaggucuguaucgcuuggucaagcaguuccugccaugacgggaaggccuggcugcacguguguguaacaggagaugacaaaaacgcaaccgccucuuucauuuauaauggcaggcugguugauagcaucggcuccuggucaaagaaaauccuccggacgcaggagagugaaugcguguguauuaacgggacuugcacagucgugaugaccgacggaagcgcuucugguaaggcagauacuaaaauauuauuuaucgaggagggcaagauugugcacaucuccacacugucagggagcgcccaacaugucgaagagugcaguuguuacccucgcuauccaggaguuagaugcguguguagggacaacuggaagggcucuaaucggccgauaguagauauuaacgugaaagacuacuccaucgucagcucguacgugugcucuggucuuguuggggacacgccccgcaagaccgauuccuucucaaguagccacuguuuggacccuaauaacgaagagggaggccauggcgugaaagggugggcuuuugaugacggaaaugaugucuggaugggucgaaccaucuccgaaaagcugagaucuggcuaugagacauucaaagugauugagggguggagcaagccaaacucaaaacuacagaucaauaggcagguaauuguugaacggggaaaccguaguggcuacuccgguauauuuagcguggaggggaagucuugcaucaaucgcuguuucuaugucgaacucauuagaggcaggaaggaggaaacugaggugugguggaccucaaacaguaucgucguguuuugcggaacaagcggcacuuacgggaccggauccuggcccgacggugccgauaucaaucugaugccuauuuga

SEQ ID NO: 143650 - RNA, 1410 nt, Artificial Sequence
  derived and/or modified CDS sequence (opt3) from neuraminidase__InfluenzaA__ABK80259
augaaccccaaucagaagaucauuaccauaggcagcgccucccugacaaucgcuacuauuugcuuccucauccaaauugcaauccuugugacgaccgucacacugcacuuuaaacagcaugaguguaacucuccuccaaauaaccagguuauguugugcgaaccgacuauaaucgagagaaauauuaccgaaaucguguacuuaacaaacaccacuauugagaaggaaaucugucccaaacuggccgaguauaggaauuggucaaagccucagugcaacauaacaggguucgcgccauuuaguaaagacaauagcauucggcuauccgcuggaggugauaucuggguaacccgcgagcccuacgugucuugugacccugauaagugcuaucaauucgcccucggccaggggacgacucugaacaauggacacucgaacgacaccguccaugaucgaacaccauaccguacucuucugaugaaugaauugggcgugcccuuucaccucgguaccagacagguuuguauugcauggucaagcaguuccugccaugacgggaaggccuggcugcacgugugugucacaggagaugacaaaaacgcuaccgcaucuuucaucuauaauggcaggcugguggauagcaucuccucauggaguaagaaaauucuccggacgcaggagagcgaaugcguauguauaaacggcacuugcacaguugugaugaccgacgggucugccuccggaaaggcugauacuaaaaucuuauuuauugaggaggguaagaucauacacauuucaacacugagcggcagugcccaacaugucgaagagugcucuuguuacccucgcuauccaggggugagaugcguguguagggacaacuggaagggauccaaucggccgaucgucgauaucaacguuaaagacuacagcauugugucgucuuacguaugcuccggccuugugggugacacccccaggaagaaugauucauucaguagcucccacuguuuggacccuaacaaugaagaagggggacauggcgucaaaggcugggcguuugaugacgggaacgauguguggaugggacgaacgaucucugagaagcugagaagcgguuaugagaccuucaaaguuauugagggcuggucaaauccaaacaguaagcuacagauaaaucgccaggugaucgucgaacgggggaaccguuccggauacagcggcauuuuuaguguggaggguaaaucaugcaucaaucgcuguuucuauguagaacucaucagagggaggaaggaggaaacagagguuugguggacuucuaacagcauuguggucuuuugcggcaccuccggaacauacggcacugggucuuggcccgacggagcagauauaaaucugaugccuaucuga

SEQ ID NO: 143651 - RNA, 1410 nt, Artificial Sequence; identical to SEQ ID NO: 142375
  derived and/or modified CDS sequence (opt3) from neuraminidase__InfluenzaA__ABK80270

SEQ ID NO: 143652 - RNA, 1410 nt, Artificial Sequence; identical to SEQ ID NO: 142762
  derived and/or modified CDS sequence (opt3) from neuraminidase__InfluenzaA__ABK80281

SEQ ID NO: 143653 - RNA, 1410 nt, Artificial Sequence
  derived and/or modified CDS sequence (opt3) from neuraminidase__InfluenzaA__ABK80292
augaaccccaaucagaagaucauuaccauaggcagcgugucccugacaaucucuacuauuugcuucuuuaugcaaaucgccauucucaucacgaccgucacacuucacuucaaacaguacgaguuuaacucaccuccaaauaaccagguuaugcugugugaaccgacuauaaucgagagaaauauuaccgaaaucguguauuugacaaacaccacuauugagaaggaaaucugccccaaauuagcugaguacaggaauuggaguaagccucaguguaacauaacaggguucgcaccauuuagcaaagacaauuccauucggcugucugccggaggugauaucuggguaacccgcgagcccuaugugucgugcgacccugauaaguguuaccaauucgcgcuaggccaggggacgacucucaacaauguccauucaaacgacaccgugcacgaucgaacaccauaucguacucugcuuaugaaugaacugggaguucccuuucauuugggcaccaaacaggugugcauugcuuggagcaguuccucuugucacgacgguaaggccuggcuccaugucugcgugacaggggaugacaagaacgcaaccgccagcuucaucuacaauggaagacugguagauuccaucguuucauggaguaaagagauucugaggacgcaggaaagcgagugugugugcauaaacggcacuuguacagucgugaugaccgacggcucugcuuccgggaaggcagauacuaaaauccucuuuauugaggaaggaaagaucauacacacaucaaccuuaagcgguagugcccaacacguggaggaaugcucuugcuauccucgguacccaggcguccgcuguguuugcagagacaacuggaagggguccaauaggccgauuguggauaucaacaucaaagacuacagcauuguaucgucuuauguguguuccggacuggucggcgacacgccccggaagaaugauucaaguagcuccucucauugccuugacccuaacaaugaggaaggugggcacggagugaaaggcugggcuuucgaugacggcaacgauguuuggauggggcgcaccaucagcgagaaguugcgaucaggauacgagacauuuaaagugauugaagguuggaguaauccaaacuccaagcugcagauaaauagacaggucaucguggacaggagcaaccggucuggcuauucagggauuuucaguguagagggaaaaagcuguaucaaucguugcuuuuacguugaacuaauccgcggcagaaaggaggaaacugaggugcucuggaccuccaacucuauugucguguucugugguacaucggggacuuauggcaccggaagcuggcccgauggcgccgacauaaaucugaugccuaucuga

SEQ ID NO: 143654 - RNA, 1410 nt, Artificial Sequence
  derived and/or modified CDS sequence (opt3) from neuraminidase__InfluenzaA__ABK80303
augaaccccaaucagaagaucauuaccauaggcagcgugucccugacaaucgccacuauuugcuuccucaugcaaaucgcuauucuugucacgaccguuacacugcacuuuaaacaguacgaguguaacucuccuccaaauaaccaggugauguuguaugaaccgacuaucauagagagaaauaucaccgaaauuguauacuuaacaaacaccacuaucgagaaggaaauuugccccaaacuggcagaguauaggaauuggucaaagccucaguguaacaucacaggguucgccccauuuaguaaagacaauagcauacggcuauccgcgggaggugauauuugggugacccgcgagcccuacgucucuugcgacccugauaaguguuaucaauucgcucucggccaggggacgacucugaacaauggacauucgaacgacaccgugcacgaucgaacaccauaccguacucuucugaugaaugaauugggcguucccuuucaucucgguaccagacaggugugcaucgccuggucaagcaguuccugucacgacgggaaggcauggcugcaugucugcgugacaggagaugacgagaacgccaccgcuucuuucauuuauaauggcaggcugguagauagcaucggcuccuggaguaaaaagauccuccggacgcaggaaucagaguguguuugcauuaacgggacuuguacaguggucaugaccgacggaaacgcaagcgguaaagccgauacuaagauauuauuuaucgaggaaggcaaaauugugcacaucucuacacuguccgggucagcucaacacguggaggaaugcagcugcuacccucgcuacccaggagucagauguguuugcagggacaauuggaagggcaguaaccggccgauaguggauauuaauguaaaggacuauucuaucguguccagcuacgucuguucgggucuugugggggacacccccaggaaaaacgauucuuucuccucaagucauugcuuggacccuaauaacgaggaaggaggccacggcguuaaggggugggccuuugaugacggaaaugauguguggaugggucgaacgaucagcgagaaacugagauccggcuaugagaccuucaaggucauugaaggguggucuaaaccaaacagcaagcuacagaucaaucgccaggugauuguagagcggggaaaccguucaggcuacagugguauauuuuccguugaagggaaaagcuguaucaaucgcugcuucuauguggagcucauuagaggcaggaaggaagagacagaggucugguggacuucuaacucaaucguggucuuuuguggaaccaguggcacauacgggacuggaagcuggcccgacggugcggauaucaaucugaugccuauuuga

SEQ ID NO: 143655 - RNA, 1410 nt, Artificial Sequence
  derived and/or modified CDS sequence (opt3) from neuraminidase__InfluenzaA__ABK80314
augaaccccaaucagaagaucauuaccauaggcagcgugucccugacaaucgccacuauuugcuuccucaugcaaaucgcuauucuugucacgaccguuacacugcacuuuaaacaguacgagugugacucuccuccaaacaaucaggugauguuguaugaaccgacuaucauagagagaaacaucaccgaaauuguauacuuaacaaauaccacuaucgagaaggaaauuugccccaaacuggcagaguauaggaacuggucaaagccucaguguaauaucacaggguucgccccauuuaguaaagauaacagcauacggcuauccgcgggaggugacauuugggugacccgcgagcccuacgucucuugcgauccugacaaguguuaucaauucgcucucggccaggggacgacucugaauaacggacauucgaaugauaccgugcacgaccgaacaccauaccguacucuucugaugaacgaauugggcguucccuuucaucucgguaccagacaggugugcaucgccuggucaagcaguuccugucacgaugggaaggcauggcugcaugucugcgugacaggagacgaugagaaugccaccgcuucuuucauuuauaacggcaggcugguagacagcaucggcuccuggaguaaaaagauccuccggacgcaggaaucagaguguguuugcauuaaugggacuuguacaguggucaugaccgauggaagcgcaucugguaaagccgacacuaagauauuauuuaucgaggaaggcaaaauugugcacaucuccacacugucagggagcgcucaacacguggaggaaugcaguugcuacccucgcuacccaggagucagauguguuugcagggauaacuggaagggcucuaaccggccgauaguggacauuaauguaaaggacuauuccaucgugagcucguacgucuguucuggucuugugggggauacccccaggaaaaacgacuccuucucaaguagccauugcuuggauccuaauaacgaggaaggaggccacggcguuaaggggugggccuuugacgauggaaaugacguguggaugggucgaacgaucuccgagaaacugagaucuggcuaugagaccuucaaggucauugaaggguggagcaaaccaaacucaaagcuacagaucaaucgccaggugauuguagagcggggaaaccguaguggcuacuccgguauauuuagcguugaagggaaaucuuguaucaaucgcugcuucuauguggagcucauuagaggcaggaaggaagagacagaggucugguggacuucaaacaguaucguggucuuuuguggaaccagcggcacauacgggacuggauccuggcccgauggugcggacaucaaucugaugccuauuuga

SEQ ID NO: 143656 - RNA, 1350 nt, Artificial Sequence
  derived and/or modified CDS sequence (opt3) from neuraminidase__InfluenzaA__ABL07021
augaaccccaaucagaagaucauuaccauaggcagcaucugcauggugauugggaucgucucccugaugcuccaaauuggaaacaugaucucuauauggguuucacacaguauccagaaagguaaucagcaucaggccgagagcauuuccaacacaaauccucuuacugaaaaggcuguggcaucuaucacgcuggccggcaacucgucauuguguccaauuagagggugggcgguacacagcaaagacaauaacaucaggauaggaaguaagggcgauguguucgucauucgggagccguuuaucuccugcucucauuuagaaugucgcaccuucuuucugacacaaggugcucuacucaaugacaaacacagcaacgggacugugaaggaucgaucaccccaucguacccugauguccugcccuguuggagaggccccaagucccuacaauagcagauucgaaucuguggcaugguccgccucagcuugucacgacggcacaagcuggcuuaccauuggcaucagugggccugauaacgaggcagucgccgugcugaaguauaauggaaucauuacugacacaauaaaaucuuggaggaacaauaucuugcggacccaggaguccgaaugcgcuuguguaaacgguagcugcuuuacgguuaugacugauggcccaucgaacgggcaggccucuuacaagauuuucaaaaugaagaaaggaaagguggucaaguccguggagcucgacgcgcccaauuaucacuacgaagaguguucaugcuauccugaugcaggcgagaucaccugugugugccgcgacaacuggcaugguaguaauagaccaugggucagcuuuaaccagaaucuggaauaccaaauaggguauauuugcuccggaguuuucggcgauaacccgaggcccaaugacggcacagggucuuguggaccuaugagcccaaacggugccuacggcgugaaaggguuuucauucaaguacggaaauggcguauggaucggucggacuaaaaguaccaacucccgcagcggguuugagaugaucugggaucccaauggcuggacaggaaccgacucuucauucagugugaagcaggacauugucgcuaucacggauuggagcggcuauuccgggucuuuugugcagcacccugaacugacuggacucgacugcauucgaccauguuucuggguugaguuaauaagagguaggcccaaagaaucgacaaucuggaccagcggcuccucaauuaguuucugcggggugaacucugauacugucagcugguccuggccggacggagccgagcugccuuuuacaaucgauaaguga

SEQ ID NO: 143657 - RNA, 1350 nt, Artificial Sequence
  derived and/or modified CDS sequence (opt3) from neuraminidase__InfluenzaA__ABL07032
augaaccccaaucagaagaucauuaccauaggcagcaucugcauggugauugggaucgucucccugaugcuccaaauuggaaacaugguuucuacaugggugucacacaguauccagacugguaaucaguaccaggccgagagcauauccaacacgaauccucuuaccgaaaaagcuguagcaucugugacacuggccggcaacucgucauuguguccaaucagagggugggcgguccauagcaaggacaauaacauuaggaucggaaguaaaggcgauguguucguuauucgggagccguuuaucuccugcucucacuuagaaugucgcacuuucuuucugacccaaggugcucuacucaaugacaagcauagcaacgggacagugaaagaucgaucaccccaccguacccugauguccugcccugucggagaggccccaagucccuauaauagcagauucgaaucuguggcaugguccgccucagcuugucaugacggcacuagcuggcuuacaauaggcauuagugggccugauaacgaggcaguagccguucugaaguacaauggaaucauuaccgacacgaucaagucuuggaggaacaauaucuugcggacucaggaguccgaaugcgcuugugugaacgguagcugcuuuaccgucaugacagauggcccaucgaacgggcaggccucuuauaaaauuuucaagauggagaaaggaaagguggugaaauccgucgaacucgacgcgcccaauuaccacuaugaggaguguucaugcuacccugaugcaggcgaaauaacuuguguuugccgcgacaacuggcacgguaguaauagaccaugggugagcuuuaaccagaaucuggaguaucaaaucggguacauuugcuccggaguauucggcgauaacccgaggcccaaugacggcaccgggucuuguggaccuaugagcccaaacggugccuacggcgugaagggguuuucauucaaguauggaaauggcgucuggaucggucggacaaaaaguaccaacucccgcagcggguuugaaaugauaugggaucccaauggcuggacgggaacugacucuucauucagugugaagcaggacauuguugcuaucacagauuggagcggcuacuccgggucuuuugugcagcauccugagcugaccggacucgacugcauccgaccauguuucugggucgaauuaauuagagguaggcccaaagagucgacuaucuggacaagcggcuccucaauuaguuucugcggggugaacucugauaccguaagcugguccuggccggacggagccgagcugccuuuuacgauagauaaguga

SEQ ID NO: 143658 - RNA, 1350 nt, Artificial Sequence
  derived and/or modified CDS sequence (opt3) from neuraminidase__InfluenzaA__ABL31746
augaaccccaaucagaagaucauuaccauaggcagcaucugcauggugauugggaucgucucccugaugcuccaaauuggaaacaugaucucuauauggguuucacacaguauccagacagguaaucagcaucaggccgagagcauuuccaacacuaauccucuuacggaaaaagcuguggcaucuguaacccuggccggcaacucgucauuguguccaaucagagggugggcggugcacagcaaggacaauaacauuaggaucggaaguaaaggcgaugucuucgugauacgggagccguuuauuuccugcucucauuuagaaugucgcacauucuuucugacucaaggugcucuacucaaugacaagcacagcaacgggaccguuaaagaucgaucaccccaucguacacugauguccugcccugugggagaggccccaagucccuacaauagcagauucgaaucugucgcaugguccgccucagcuugucacgacggcaacagcuggcuuaccaucggcauuagugggccugauaaugaggcaguggccguacugaaguauaacggaaucaucacugacacaauuaagucuuggaggaaaaauauauugcggacccaggaguccgaaugcgcuuguguuaacgguagcugcuuuacggugaugacugauggcccaucgaacgggcaggccucuuacaagaucuucaaaauggagaagggaaaagucgugaaguccguggaacucgacgcgcccaauuaucacuacgaggaguguucaugcuauccugaugcaggcgaaauuaccugugucugccgcgacaacuggcaugguaguaauagaccauggguuagcuuuaaccagaaucuggaguaccaaaucggguauauaugcuccggaguguucggcgauaacccgaggcccaaugacggcacagggucuuguggaccuaugagcccaaacggugccuacggcguaaagggguuuucauucaaauacggaaauggcguguggauuggucggacuaagaguaccaacucccgcagcggguuugaaaugaucugggaucccaauggcuggacaggaaccgacucuucauucagugucaaacaggacaucguggcuauuacggauuggagcggcuauuccgggucuuuuguucagcacccugagcugacuggacucgacugcauccgaccauguuucuggguggaauuaauuagagguaggcccaaggagucgacaauauggaccagcggcuccucaaucaguuucugcggggucaacucugauacugugagcugguccuggccggacggagccgagcugccuuuuacaauugauaaauga

SEQ ID NO: 143659 - RNA, 1350 nt, Artificial Sequence
  derived and/or modified CDS sequence (opt3) from neuraminidase__InfluenzaA__ABL31757
augaaccccaaucagaagaucauuaccauaggcagcaucugcauggugauugggaucgucucccugaugcuccaaauuggaaacaugaucucuauauggguuucacacaguauccagacagguaaucagcaucaggccgagagcauuuccaacacuaauccucuuacggaaaaagcuguggcaucuguaacccuggccggcaacucgucauuguguccaaucagagggugggcggugcacagcaaggacaauaacauuaggaucggaaguaaaggcgaugucuucgugauacgggagccguuuauuuccugcucucauuuagaaugucgcacauucuuucugacucaaggugcucuacucaaugacaagcacagcaacgggaccguuaaagaucgaucaccccaucguacacugauguccugcccugugggagaggccccaagucccuacaauagcagauucgaaucugucgcaugguccgccucagcuugucacgacggcaccagcuggcuuacuaucggcauuagugggccugauaacgaggcaguggccguacugaaguauaauggaaucaucacagacaccauuaagucuuggaggaacaauauauugcggacgcaggaguccgaaugcgcuuguguuaacgguagcugcuuuacugugaugaccgauggcccaucgaacgggcaggccucuuacaaaaucuucaagauggagaaaggaaaggucgugaaauccguggaacucgacgcgcccaauuaucacuacgaggaguguucaugcuauccugaugcaggcgaaauuacaugugucugccgcgacaacuggcaugguaguaauagaccauggguuagcuuuaaccagaaucuggaguaccaaaucggguauauaugcuccggaguguucggcgauaacccgaggcccaaugacggcacugggucuuguggaccuaugagcccaaacggugccuacggcguaaagggguuuucauucaaguacggaaauggcguguggauuggucggaccaaaaguacaaacucccgcagcggguuugaaaugaucugggaucccaauggcuggaccggaacggacucuucauucagugucaagcaggacaucguggcuauuacugauuggagcggcuauuccgggucuuuuguucagcacccugagcugacaggacucgacugcauccgaccauguuucuggguggaauuaauuagagguaggcccaaagagucgaccauauggacuagcggcuccucaaucaguuucugcggggucaacucugauacagugagcugguccuggccggacggagccgagcugccuuuuaccauugauaaguga

SEQ ID NO: 143660 - RNA, 1350 nt, Artificial Sequence; identical to SEQ ID NO: 143659
  derived and/or modified CDS sequence (opt3) from neuraminidase__InfluenzaA__ABL31768

SEQ ID NO: 143661 - RNA, 1410 nt, Artificial Sequence; identical to SEQ ID NO: 142639
  derived and/or modified CDS sequence (opt3) from neuraminidase__InfluenzaA__ABL67168

SEQ ID NO: 143662 - RNA, 1410 nt, Artificial Sequence; identical to SEQ ID NO: 142778
  derived and/or modified CDS sequence (opt3) from neuraminidase__InfluenzaA__ABL67179

SEQ ID NO: 143663 - RNA, 1413 nt, Artificial Sequence; identical to SEQ ID NO: 143604
  derived and/or modified CDS sequence (opt3) from neuraminidase__InfluenzaA__ABL67190

SEQ ID NO: 143664 - RNA, 1410 nt, Artificial Sequence
  derived and/or modified CDS sequence (opt3) from neuraminidase__InfluenzaA__ABL67201
augaaccccaaucagaagaucauuaccauaagcuccgugucucugacaaucucaacuauuugcuucuuuaugcaaaucgccauucucaucacgaccgucacacuucacuucaaacaguacgaguuuaacaguccuccaaauaaccagguuaugcugugugaaccgacuauaaucgagagaaauauuaccgaaaucguguauuugacaaacaccacuauugagaaggaaaucugccccaaauuagcugaguacaggaauuggagcaagccucagugugacauaacaggcuucgcaccauuuuccaaagauaacucuauucggcugucggccgggggagacaucuggguaacccgcgagcccuaugugucaugcgauccugacaaguguuaccaauucgcgcuaggucagggcacgacucucaauaacguccauagcaaugauaccgugcacgaccgaacaccauaucguacucugcuuaugaacgaacuggggguucccuuucauuugggaaccaaacaggugugcauugcuuggaguuccucuagcugucacgauggcaaggccuggcuccaugucugcgugacaggugacgauaagaaugcaaccgccuccuucaucuacaacgggagacugguagacucaaucguuaguuggagcaaaaagauucugaggacgcaggagucugaaugugugugcauaaauggaacuuguacagucgugaugaccgauggcuccgcuucaggcaaagcagacacuaagauccucuuuauugaggaggggaagaucgugcacacaagcaccuuaaguggaucugcccaacacgucgaagagugcuccugcuauccucgguacccagguguucgcugugugugcagagauaacuggaaaggcagcaacaggccgauaguagacauuaauaucaaggacuacucgaucgugucuuccuaugucuguucagggcuggugggagauacgccccggaaaaacgacaguagcuccucuagccauugccuugauccuaauaacgaagagggcggucacgggguuaagggaugggcuuucgacgauggcaaugacguguggaugggccgcaccauuucagaaaaauugcgaaguggguacgagacauuuaaggucaucgagggaugguccaacccaaauagcaaacugcagauuaacagacaggugauaguagauagggguaaucggucuggcuauucagggaucuucaguguugaaggaaagagcuguauuaaccguugcuuuuacguggagcuaauccgcggcagaaaggaagagacugaaguccucuggaccuccaauucuaucguggucuucugugguacaucggggacuuauggcaccggaagcuggcccgacggcgccgauauuaaccugaugccuauauga

SEQ ID NO: 143665 - RNA, 1413 nt, Artificial Sequence; identical to SEQ ID NO: 143604
  derived and/or modified CDS sequence (opt3) from neuraminidase__InfluenzaA__ABL67212

SEQ ID NO: 143666 - RNA, 1413 nt, Artificial Sequence; identical to SEQ ID NO: 143107
  derived and/or modified CDS sequence (opt3) from neuraminidase__InfluenzaA__ABL67256

SEQ ID NO: 143667 - RNA, 1413 nt, Artificial Sequence; identical to SEQ ID NO: 143107
  derived and/or modified CDS sequence (opt3) from neuraminidase__InfluenzaA__ABL67267

SEQ ID NO: 143668 - RNA, 1410 nt, Artificial Sequence; identical to SEQ ID NO: 142109
  derived and/or modified CDS sequence (opt3) from neuraminidase__InfluenzaA__ABL67278

SEQ ID NO: 143669 - RNA, 1410 nt, Artificial Sequence
  derived and/or modified CDS sequence (opt3) from neuraminidase__InfluenzaA__ABL67289
augaaccccaaucagaagaucauuaccauaggcagcgugucccugacaaucgccacuauuugcuuccucaugcaaaucgcuauucuugucacgaccguuacacugcacuuuaaacaguacgaguguaacucuccuccaaauaaccaggugauguuguaugaaccgacuaucauagagagaaauaucaccgaaauuguauacuuaacaaacaccacuaucgagaaggaaauuugccccaaacuggcagaguauaggaauuggucaaagccucaguguaacaucacaggguucgccccauuuaguaaagacaauagcauacggcuauccgcgggaggugauauuugggugacccgcgagcccuacgucucuugcgacccugauaaguguuaucaauucgcucucggccaggggacgacucugaacaauggacauucgaacgacaccgugcacgaucgaacaccauaccguacucuucugaugaaugaauugggcguucccuuucaucucgguaccagacaggugugcaucgccuggucaagcaguuccugucacgacgggaaggcauggcugcaugucugcgugacaggagaugacgagaacgccaccgcuucuuucauuuauaauggcaggcugguagauagcaucggcuccuggaguaaaaagauccuccggacgcaggaaucagaguguguuugcauuaacgggacuuguacaguggucaugaccgacggaagcgcaucugguaaagccgauacuaagauauuauuuaucgaggaaggcaaaauugugcacaucuccacacugucagggagcgcucaacacguggaggaaugcaguugcuacccucgcuacccaggagucagauguguuugcagggacaacuggaagggcucuaaucggccgauaguggauauuaacguaaaggacuauuccaucgugagcucguacgucuguucuggucuugugggggacacccccaggaaaaaugauuccuucucaaguagccauugcuuggacccuaacaaugaggaaggaggccacggcguuaaggggugggccuuugaugacggaaacgauguguggaugggucgaacgaucuccgagaaacugagaucuggcuaugagaccuucaaggucauugaaggguggagcaaaccaaauucaaagcuacagaucaaccgccaggugauuguagagcggggaaaucguaguggcuacuccgguauauuuagcguugaagggaaaucuuguaucaaccgcugcuucuauguggagcucauuagaggcaggaaggaagagacagaggucugguggacuucaaauaguaucguggucuuuuguggaaccagcggcacauacgggacuggauccuggcccgacggugcggauaucaaccugaugccuauuuga

SEQ ID NO: 143670 - RNA, 1410 nt, Artificial Sequence
  derived and/or modified CDS sequence (opt3) from neuraminidase__InfluenzaA__ABL67300
augaaccccaaucagaagaucauuaccauaggcagcgugucccugacaaucgccacuauuugcuuccucaugcaaaucgcuauucuugucacgaccguuacacugcacuuuaaacaguacgaguguaacucuccuccaaauaaccaggugauguugugcgaaccgacuaucauagagagaaauaucaccgaaauuguauauuuaacaaacaccacuaucgagaaggaaauuugucccaaacuggcagaguacaggaauuggucaaagccucagugcaacaucacaggguucgccccauuuaguaaagacaauagcauacggcuauccgcgggaggugauauuugggugacccgcgagcccuaugucucuugugacccugauaagugcuaccaauucgcucucggccaggggacgacucugaacaauggacauucgaacgacaccgugcacgaucgaacaccauaucguacucuucugaugaaugaauugggcguucccuuucaucucgguaccagacagguguguaucgccuggucaagcaguuccugccacgacgggaaggcauggcugcaugucugugugacaggagaugacgagaacgccaccgcuucuuucauuuacaauggcaggcugguagauagcaucggcuccuggaguaaaaacauccuccggacgcaggaaucagagugcguuuguauuaacgggacuugcacaguggucaugaccgacggaagcgcaucugguaaggccgauacuaaaauauuauuuaucgaggaaggcaagauugugcacaucuccacacugucagggagcgcucaacacguggaggaaugcaguuguuauccucgcuacccaggagucagaugcguuuguagggacaauuggaaaggcucuaaccggccgauaguggauauuaauguaaaggaccauuccaucgugagcucguacgucugcucuggucuugugggggacacccccaggaagaacgauuccuucucaaguagccacuguuuggacccuaauaacgaggaaggaggccauggcguuaaagggugggccuuugaugacggaaaugauguguggaugggucgaacgaucuccgagaagcugagaucuggcuaugagaccuucaaagucauugaaggguggagcaagccaaacucaaaacuacagaucaaucgccaggugauuguagagcggggaaaccguaguggcuacuccgguauauuuagcguugaagggaagucuugcaucaaucgcuguuucuauguggagcucauuagaggcaggaaagaagagacagaggucugguggacuucaaacaguaucguggucuuuugcggaaccagcggcacauacgggacuggauccuggcccgacggugcggauaucaaucugaugccuauuuga

SEQ ID NO: 143671 - RNA, 1410 nt, Artificial Sequence; identical to SEQ ID NO: 142228
  derived and/or modified CDS sequence (opt3) from neuraminidase__InfluenzaA__ABL67311

SEQ ID NO: 143672 - RNA, 1410 nt, Artificial Sequence
  derived and/or modified CDS sequence (opt3) from neuraminidase__InfluenzaA__ABL67322
augaaccccaaucagaagaucauuaccauaggcagcgugucccugacaaucgccacuauuugcuuccucaugcagaucgcuauucuugucacgaccguuacacugcacuuuaaacaguacgaguguaacccuccaccgaauaaccaggugauguugugcgaacccacuaucauagagagaaauaucaccgaaauuguauauuuaacaaacaccacuaucgagaaggaaauuuguccuaaacuggcagaguacaggaauuggucuaagccacagugcaacaucacaggguucgcccccuuuucaaaagacaauaguauacggcuaagcgcgggaggugauauuugggugacccgcgagccuuaugucuccugugacccagauaagugcuaccaauucgcucucggccaggggacgacucugaacaauggacauucuaacgacaccgugcacgaucgaacacccuaucguacucuucugaugaaugaauugggcguuccuuuucaucucgguaccagacagguguguaucgccuggucgucaagcaguugccacgacgggaaggcauggcugcaugucugugugacaggagaugacgagaacgccaccgcuuccuucauuuacaauggcaggcugguagauucuaucggcagcugguccaaaaagauccuccggacgcaggaaucagagugcguuuguauuaacgggacuugcacaguggucaugaccgacggaagugcaagcgguaaagccgauacuaagauauuauuuaucgaggaaggcaaaauugugcacacaucuacccuguccgggucagcucaacacguggaggaaugcagcuguuauccacgcuacccgggagucagaugcguuuguagggacaacuggaagggcaguaaucggcccaucguggauauaaacguaaaggacuacucuauuguguccagcuaugucugcucgggucuugugggggacacgccucgcaaaaaugauucuuucuccucaagucauuguuuggacccaaacaaugaggaaggaggccacggcguuaaggggugggccuuugaugacggaaacgauguguggaugggucgaaccaucagcgagaaacugagauccggcuacgagacauucaaggucaucgaaggguggucuaaacccaauagcaagcuacagacuaacaggcaagugauuguagagcggggaaaucguucaggcuauagugguaucuuuuccguugaagggaaaagcugcauuaaccgcuguuucuacguggagcucauaagaggcaggaaggaagagaccgaggucugguggacaucuaauucaaucguggucuuuugcggaaccaguggcacuuaugggacaggaagcuggccugacggugcggauauuaaccugaugccaaucuga

SEQ ID NO: 143673 - RNA, 1410 nt, Artificial Sequence
  derived and/or modified CDS sequence (opt3) from neuraminidase__InfluenzaA__ABL67333
augaaccccaaucagaagaucauuaccauaggcagcgugucccugacaaucgccacuauuugcuuccucaugcaaaucgcuauucuugucaucacgguuacccugcacuuuaaacaguacgaguguaacucuccuccaaauaaccaggugauguugugcgaaccgacaauaaucgagagaaauauuacugaaaucguauauuuaaccaacacaaccauugagaaggaaaucugucccaaacuggcagaguacaggaauuggucaaagccucagugcaacauaacuggguucgccccauuuaguaaagacaauagcauucggcuauccgcgggaggugauaucugggugacacgcgagcccuaugucucuugugacccugauaagugcuaccaauucgcucucggccaggggaccacgcugaacaauggacauucgaacgacacugugcacgaucgaaccccauaucguacacuucugaugaaugaauugggcguucccuuucaucucgguacuagacagguguguauugccuggucaagcaguuccugccacgacgggaaggcauggcugcaugucugugugaccggagaugacgagaacgccacagcuucuuucaucuacaauggcaaacugguagauagcaucggcuccuggucaaagaaaauucucaggacccaggaaagugagugcguuuguauaaacgggacgugcgcaguggucaugacugacggaagcgccucugguaaggcugauacaaaaaucuuauuuauugaggaaggcaagaucgugcacauauccacccugucagggagcgcccaacacguggaggaaugcaguuguuauccucgguacccaggaguccgcugcguuuguagagacaacuggaagggcucuaauaggccgauuguggauaucaacguaaaagacuacuccaucgugagcucguaugucugcucuggucuugugggggacacuccccggaagaaugauuccuucucaaguagccauuguuuggacccuaacaaugaggaaggaggccacggcguuaaagggugggcguuugaugacggaaacgauguguggaugggucgcacaauuuccgagaagcugcgaucuggcuacgagaccuucaaagucaucgaaggguggagcaagccaaauucaaaacuacagacgaacagacaggugauuguagagaggggaaaucggaguggcuauuccgguauauuuagcguugaagggaagucuugcaucaaccguuguuucuacguggagcucauucgcggcagaaaggaagagaccgaggucugguggacaucaaauaguaucguggucuuuugcggaacuagcggcaccuaugggacaggauccuggcccgacggugcagauaucaaccugaugccuauuuga

SEQ ID NO: 143674 - RNA, 1410 nt, Artificial Sequence; identical to SEQ ID NO: 142639
  derived and/or modified CDS sequence (opt3) from neuraminidase__InfluenzaA__ABL67344

SEQ ID NO: 143675 - RNA, 1410 nt, Artificial Sequence
  derived and/or modified CDS sequence (opt3) from neuraminidase__InfluenzaA__ABL67355
augaaccccaaucagaagaucauuaccauaggcagcgugucccugacaaucgccacuauuugcuuccucaugcaaaucgcuauucuugucacgaccguuacacugcacuuuaaacagcaugaguguaacucuccuccaaauaaccaggugauguugugcgaaccgacuaucauagagagaaauaucaccgaaauuguauacuuaacaaacaccacuaucgagaaggaaauuugucccaaacugguggaguauaggaauuggucaaagccucagugcaacaucacaggguucgcaccauuuaguaaagacaauagcauacggcuauccgccggaggugauauuugggucacccgcgagcccuacgugucuugugacccugaaaagugcuaucaauucgcgcucggccaggggacgacucugaacaauggacacucgaacgauaccguucaugaccgaacaccauaccguacucuucugaugaaugaguugggcgugcccuuucaccucgguaccaagcaggucuguaucgcuuggucaagcaguuccugccaugaugggaaagccuggcugcacguguguguaacaggagacgauaagaacgcaaccgccucuuucauuuauaauggcagacugguugacagcaucggcuccuggaguaaaaagauccucaggacgcaggaaucagagugcguguguauuaacgggacuugcacagucgugaugaccgauggaagcgcuucugguaaagcagacacuaagauauuauuuaucgaggaaggcaagauugugcacaucuccacacugucagggagcgcccaacaugucgaggaaugcaguuguuacccucgguauccaggaguucgcugcguguguagagauaacuggaaaggcucuaauaggccgauaguagacauuaacgugaaggauuacuccaucgucagcucguacgugugcucuggucuuguuggggacacgccccggaaaaaugacuccuucucaaguagccacuguuuggauccuaacaaugaggaaggaggccauggcgugaaggggugggcuuuugacgauggaaacgacgucuggaugggucgcaccaucuccgagaaacugcgaucuggcuaugagaccuucaaggugauugaaggguggagcaaaccaaauucaaagcuacagaucaacagacagguaauuguugagaggggaaaucggaguggcuacuccgguauauuuagcguggaagggaagucuugcaucaaccguuguuucuaugucgagcucauucgcggcagaaaagaagagacagaggugugguggacuucaaauaguaucgucguguuuugcggaaccagcggcacauacgggacuggauccuggcccgauggugccgacaucaaccugaugccuauuuga

SEQ ID NO: 143676 - RNA, 1410 nt, Artificial Sequence
  derived and/or modified CDS sequence (opt3) from neuraminidase__InfluenzaA__ABL67366
augaaccccaaucagaagaucauuaccauaggcagcgugucccugacaaucgccacuauuugcuuccucaugcaaaucgcuauucuugucacgaccguuacacugcacuuuaaacagcaugaguguaacucuccuccaaauaaccaggugauguugugcgaaccgacuaucauagagagaaauaucaccgaaauuguauacuuaacaaacaccacuaucgagaaggaaauuugucccaaacuggcagaguauaggaauuggucaaagccucagugcaacaucacaggguucgccccauuuaguaaagacaauagcauacggcuauccgcgggaggugauauuugggugacccgcgagcccuacgucucuugugacccugauaagugcuaucaauucgcucucggccaggggacgacucugaacaauggacacucgaacgacaccgugcaugaucgaacaccauaccguacucuucugaugaaugaauugggcguucccuuucaccucgguaccagacagguguguaucgccuggucaagcaguuccugccaugacgggaaggcauggcugcacgucugugugacaggagaugacaaaaacgccaccgcuucuuucauuuauaauggcaggcugguagauagcaucggcuccuggucaaagaaaauccuccggacgcaggagagugaaugcguuuguauuaacgggacuugcacaguggucaugaccgacggaagcgcaucugguaaggccgauacucgcauauuauuuaucgaggagggcaaaauugugcacaucuccacacugucagggagcgcucaacauguggaagagugcaguuguuacccuagauauccaggagucaggugcguuugucgggacaacuggaagggcucuaaucgcccgauaguggauauuaacguaaaggacuacuccaucgugagcucguacgucugcucuggucuugugggggacacgccccggaaaaaugauuccuucucaaguagccacuguuuggacccuaacaaugaagagggaggccauggcguuaaggggugggccuuugaugacggaaacgauguguggauggguagaaccaucuccgaaaaacugaggucuggcuaugagaccuucaaggucauugagggguggagcaaaccaaauucaaagcuacagaucaaccgacaggugauuguagaacguggaaaucgcaguggcuacuccgguauauuuagcguugaggggaaaucuugcaucaacagauguuucuauguggaacucauuaggggccggaaggaggaaacagaggucugguggacuucaaauaguaucguggucuuuugcggaaccagcggcacauacgggacuggauccuggcccgacggugcggauaucaaccugaugccuauuuga

SEQ ID NO: 143677 - RNA, 1410 nt, Artificial Sequence
  derived and/or modified CDS sequence (opt3) from neuraminidase__InfluenzaA__ABL67377
augaaccccaaucagaagaucauuaccauaggcagcgccucccugacaaucgcuauuaucugcuuccucauucagaucgcaauacuugugacuacggucacccugcacuuuaaacagcaugaguguaacucuccuccaaauaaccagguuauguugugcgaaccgacaaucauugagagaaauaucacugaaauuguguacuuaaccaacacaaccaucgagaaggaaauaugucccaaacuggccgaguauaggaauuggucaaagccucagugcaacauuacuggguucgcgccauuuaguaaagacaauagcauccggcuauccgcuggaggugauauuuggguaacacgcgagcccuacgugucuugugacccugauaagugcuaucaauucgcccucggccaggggaccacgcugaacaauggacacucgaacgacacuguccaugaucgaaccccauaccguacacuucugaugaaugaauugggcgugcccuuucaccucgguacuagacagguuuguaucgcauggucaagcaguuccugccaugacgggaaggccuggcugcacgugugugucaccggagaugacaaaaacgcuacagcaucuuucaucuauaauggcaggcugguggauagcauuuccucauggaguaagaaaauacuccggacccaggagagcgaaugcguauguaucaacggcacgugcacuguugugaugacagacgggucugccuccggaaaggcugauaccaaaauuuuauuuaucgaggaggguaagauaauucacaucucaacucugagcggcagugcccaacaugucgaagagugcucuuguuacccucgcuauccaggggugagaugcguguguagggacaacuggaagggauccaaucggccgaucgucgauauuaacguuaaagacuacagcaucgugucgucuuacguaugcuccggccuugugggugacacaccccgcaagaaugauucauucaguagcucccacuguuuggacccuaacaaugaagaagggggacauggcgucaaaggcugggcguuugaugacgggaacgauguguggaugggacgaaccauuucugagaagcugagaagcgguuaugagacguucaaaguuauagagggcuggucaaauccaaacaguaagcuacagaucaauaggcaagugauugucgaacgggggaaccguuccggauacagcggcaucuuuucuguggaggguaaaucaugcaucaaucgcuguuucuauguagaacucauuagagggaggaaggaggaaaccgagguuugguggacaaguaacagcauaguggucuuuugcggcacuuccggaaccuacggcacagggucuuggcccgacggagcagaucugaaucuuaugccuaucuga

SEQ ID NO: 143678 - RNA, 1410 nt, Artificial Sequence; identical to SEQ ID NO: 142375
  derived and/or modified CDS sequence (opt3) from neuraminidase__InfluenzaA__ABL67388

SEQ ID NO: 143679 - RNA, 1410 nt, Artificial Sequence; identical to SEQ ID NO: 142375
  derived and/or modified CDS sequence (opt3) from neuraminidase__InfluenzaA__ABL67399

SEQ ID NO: 143680 - RNA, 1410 nt, Artificial Sequence; identical to SEQ ID NO: 142760
  derived and/or modified CDS sequence (opt3) from neuraminidase__InfluenzaA__ABL67410

SEQ ID NO: 143681 - RNA, 1410 nt, Artificial Sequence
  derived and/or modified CDS sequence (opt3) from neuraminidase__InfluenzaA__ABL67421
augaaccccaaucagaagaucauuaccauaggcagcaucucccugacaauuucuacuaucugcuucuuuaugcaaauugccauccucauaacgaccgugacacuucacuucaaacaguacgaguuuaacucaccuccaaauaaccaggucaugcugugugaaccgacuaucauugagagaaauaucaccgaaauuguuuauuugacaaacaccacuaucgagaaggaaauaugccccaaauuagcugaguacaggaauuggaguaagccucaguguaacauuacaggguucgcaccauuuagcaaagacaauuccauccggcugucugccggaggugauauuugggugacccgcgagcccuauguaucgugcgacccugauaaguguuaccaauucgcgcuaggccaggggacgacucucaacaaugugcauucaaacgacaccguccacgaucgaacaccauaucguacucugcuuaugaaugaacugggagugcccuuucauuugggcaccaagcagguuugcaucgcuuggagcaguuccucuugucacgacgguaaagccuggcuccaugugugcgucacaggggaugacaagaacgcaaccgccagcuucaucuacaauggaagacugguggauuccauuguaucauggaguaaagagauacugaggacgcaggaaagcgaguguguuugcaucaacggcacuuguacaguggucaugaccgacggcucugcuuccgggaaggcagauacuaaaauucucuuuaucgaggaaggaaagauagugcacacaucaaccuuaagcgguagugcccaacacguggaggaaugcucuugcuauccucgguacccaggcguccgcuguguuugcagagacaacuggaagggguccaauaggccgauuguggauaucaacaucaaagacuacagcauuguaucgucuuauguguguuccggacuggucggcgacacgccccggaagaaugauucaaguagcuccucucauugccuugacccuaacaaugaggaaggugggcacggagugaaaggcugggcuuucgaugacggcaacgauguuuggauggggcgcaccaucagcgagaaguugcgaucaggauacgagacauuuaaagugauugaagguuggaguaauccaaacuccaagcugcagauaaauagacaggucaucguggacaggggcaaccggagcggguauucuggaauuuucucaguagagggcaaaaguuguaucaaucguugcuuuuacguugaacuaauccgcgguagaaaggaggaaacugaggugcucuggaccagcaacuccauugucguguucugugggacaucuggcacuuauggaaccggcucguggcccgauggggccgacauaaaucugaugccuaucuga

SEQ ID NO: 143682 - RNA, 1350 nt, Artificial Sequence
  derived and/or modified CDS sequence (opt3) from neuraminidase__InfluenzaA__ABL67772
augaaccccaauaagaaaaucauuaccauaggcagcaucugcauggugacagggauggucucccugaugcuccagauuggaaaccuuaucucuauuuggguuucacacaguauccauacugguaaucaacacaaggccgagccuauaagcaacacgaauuuccugaccgaaaaagcuguggcauccguaaaguuggccggcaacucuucguuauguccaaucaaugggugggcgguguacucaaaagacaacagcauuagaaucggaaguaagggcgaugucuuugugauuagggagccguucaucuccugcucucaucuggaaugucggacauuuuuccuaacucagggugcucuccugaaugacaagcacagcaacgggaccguuaaagaucgcucaccccaucgaacacuuauguccugcccugugggagaggccccaagucccuauaauagccguuuugaaucugucgcaugguccgccucagcuugucacgacggcaccagcuggcugacuauaggcauuagugggccugauaacggagcaguggccguauugaaguacaaugguaucauuacagacaccaucaaaucuuggagaaacaauauccucaggacgcaggaguccgagugcgcuuguguuaacggcagcugcuucacugugaugaccgaugggccaucgaacggacaggccucucacaagauuuuuaaaauggaaaagggcaaggucgugaaauccguggagcuggacgcgcccaauuaucauuacgaagaguguucaugcuauccugaugccggugagauaacaugugucugccgggacaacuggcacgggaguaaucgcccauggguuagcuucaaccaaaaucugaaguaccagaucggauauauuugcuccggcguguuuggcgauaacccgagacccaaugacgggacuggaucuugugguccuguaagcucaaacggcgcauacggggugaaaggauucaguuuuaaguacggcaauggugucuggaucgggaggaccaaauccacaaacagccggucuggcuucgaaaugauaugggauccaaauggauggaccgagacggacucaaguuuuagcgugaagcaggacauuguugcuaucacugauugguccggcuauucugggucguucgugcagcaucccgaacucacaggauuagacugcauccgcccuuguuucugggucgagcugauucgagguagaccaaaagaaagcaccaucuggacuuccggcucaaguauuucuuuuugcggggugaacagcgauacaguaggaugguccuggcccgacggcgccgagcuuccguucaccauagauaaguga

SEQ ID NO: 143683 - RNA, 1350 nt, Artificial Sequence
  derived and/or modified CDS sequence (opt3) from neuraminidase__InfluenzaA__ABL67783
augaaccccaauaagaaaaucauuaccauaggcagcaucugcauggugacagggauggucucccugaugcuccagauuggaaaccuuaucucuauuuggguuucacacaguauccauacugguaaucaacacaaggccgagccuauaagcaacacgaauuuccugaccgaaaaagcuguggcauccguaaaguuggccggcaacucuucguuauguccaaucaaugggugggcgguguacucaaaagacaacagcauuagaaucggaaguaagggcgaugucuuugugauuagggagccguucaucuccugcucucaucuggaaugucggacauuuuuccuaacucagggugcucuccugaaugacaagcacagcaacgggaccguuaaagaucgcucaccccaucgaacacuuauguccugcccugugggagaggccccaagucccuauaauagccguuuugaaucugucgcaugguccgccucagcuugucacgacggcaccagcuggcugacuauaggcauuagugggccugauucuggagcaguggccguauugaaguacaacgguaucauuacagacaccaucaaauccuggagaaauaacauccucaggacgcaggagagcgagugcgcuuguguuaauggcucgugcuucacugugaugaccgaugggccaucuaacggacaggccucccacaagauuuuuaaaauggaaaagggcaaggucgugaaaucaguggagcuggacgcgcccaacuaucauuacgaagaguguaguugcuauccugaugccggugagauaacaugugucugccgggacaauuggcacgggagcaaccgcccauggguuuccuucaaucaaaaccuggaauaccagaucggauauauuugcucuggcguguuuggcgauaauccgagacccaacgacgggacuggaagcugugguccuguaucaaguaauggcgcauacggggugaagggauucuccuuuaaauacggcaacggugucuggaucgggaggaccaagagcacaaauucucggucaggcuucgagaugauaugggauccaaacggauggaccgaaacggacaguagcuuuuccgugaaacaggacauuguugcuaucacugauuggucuggcuauucggggagcuucgugcagcaucccgagcucacaggauuagacugcauccgcccuuguuucugggucgaacugauucgagguagaccaaaggaguccaccaucuggacuucaggcaguucuauuagcuuuugcgggguaaauuccgauacagugggauggucauggcccgacggcgccgagcuuccguucaccauagauaaauga

SEQ ID NO: 143684 - RNA, 1350 nt, Artificial Sequence
  derived and/or modified CDS sequence (opt3) from neuraminidase__InfluenzaA__ABL67796
augaaccccaauaagaaaaucauuaccauaggcagcaucugcauggugacagggauggucucccugaugcuccagauuggaaaccuuaucucuauuuggguuucacacaguauccauacugguaaucaacacaaggccgagccuauaagcaacacgaauuuccugaccgaaaaagcuguggcauccguaaaguuggccggcaacucuucguuauguccaaucaaugggugggcgguguacucaaaagacaacagcauuagaaucggaaguaagggcgaugucuuugugauuagggagccguucaucuccugcucucaucuggaaugucggacauuuuuccuaacucagggugcucuccugaaugacaagcacagcaacgggaccguuaaagaucgcucaccccaucgaacacuuauguccugcccugugggagaggccccaagucccuauaauagccguuuugaaucugucgcaugguccgccucagcuugucacgacggcaccagcuggcugacuauaggcauuagugggccugauaacggagcaguggccguauugaaguacaaugguaucauuacagacaccaucaaaucuuggagaaacaauauccucaggacgcaggaguccgagugcgcuuguguuaacggcagcugcuucacugugaugaccgaugggccaucgaacggacaggccucucacaagauuuuuaaaauggaaaagggcaaggucgugaaauccguggagcuggacgcgcccaauuaucauuacgaagaguguucaugcuauccugaugccggugagauaacaugugucugccgggacaacuggcacgggaguaaucgcccauggguuagcuucaaccaaaaucuggaauaccagaucggauauauuugcuccggcguguuuggcgauaacccgagacccaaugacgggacuggaucuugugguccuguaagcuacaacggcgcauacggggugaagggauucucauuuaaauauggcaauggugucuggaucgggaggaccaagaguacaaacucccggagcggcuucgagaugauaugggauccaaauggauggaccgaaacggacucuucauuuagugugaaacaggacauuguugcuaucacugauuggagcggcuacuccgggucuuucgugcagcaucccgagcucacaggauuagacugcauccgcccuuguuucugggucgaacugauucgagguagaccaaaggagucgaccaucuggacuagcggcuccucaauuaguuuuugcggggugaacucugauacaguaggauggagcuggcccgacggcgccgagcuuccguucaccauagauaaauga

SEQ ID NO: 143685 - RNA, 1350 nt, Artificial Sequence
  derived and/or modified CDS sequence (opt3) from neuraminidase__InfluenzaA__ABL67807
augaaccccaauaagaaaaucauuaccauaggcagcaucugcauggugacagggauggucucccugaugcuccagauuggaaaccuuaucucuauuuggguuucacacaguauccauacugguaaucaacacaaggccgagccuauaagcaacacgaaucuguugaccgaaaaagcuguggcauccguaaaguuagccggcaacucuucgcuguguccaaucgacgggugggcgguguacucaaaagauaauagcauuagaaucggaaguaagggcgacgucuucgugguuagggagccguuuauuuccugcucucaucuagaaugucggacauucuuucucacucagggugcucugcuuaacgauaagcacagcaaugggaccgugaaagaccgcucaccccaucgaacacugauguccugcccugucggagaggccccaagucccuauaacagccguuucgaaucuguggcaugguccgccucagcuugucacgauggcaccagcugguugacuaucggcauaagugggccugacaauggagcaguagccguucucaaguacaacgguauuaucacagauaccauuaaaucuuggagaaauaacauccugaggacgcaggaguccgagugcgcuugugugaauggcagcugcuuuacugucaugaccgacgggccaucgaacggacaggccucucacaagaucuucaaaauggaaaagggcaagguggugaaauccgucgagcuggaugcgcccaacuaucauuacgaagaguguucaugcuauccugacgccggugagauuacauguguuugccgggauaauuggcacgggaguaaccgcccaugggugagcuuuaaucaaaaccucgaauaccagauaggauauaucugcuccggcguauucggcgacaauccgagacccaacgauggggcaggaucuugugguccugugagcucaaauggcgcuuacggggucaagggauuuaguuucaaauacggcaacgguguguggauugggaggacuaaguccaccaauagccggucuggcuuugagaugaucugggacccaaacggauggacagaaaccgacucaaguuucagcguuaaacaggauauaguggccauuacggacugguccggcuauucugggucguuuguccagcaucccgaguuaacuggacuggauugcauccgcccuuguuucuggguggaacuuauccgagguagaccaaaggagagcacaauuuggaccuccggcucaaguaucucuuucugcgggguaaauagcgacacuguuggaugguccuggcccgauggcgcagaguugccguuuacaauugacaaauga

SEQ ID NO: 143686 - RNA, 1350 nt, Artificial Sequence
  derived and/or modified CDS sequence (opt3) from neuraminidase__InfluenzaA__ABL67818
augaaccccaauaagaaaaucauuaccauaggcagcaucugcauggugacagggauggucucccugaugcuccagauuggaaaccuuaucucuauuuggguuucacacaguauccauacugguaaucaacacaaggccgagccuauaagcaacacgaaucuguugaccgaaaaagcuguggcauccguaaaguuagccggcaacucuucgcuguguccaaucgacgggugggcgguguacucaaaagauaauagcauuagaaucggaaguaagggcgacgucuucgugguuagggagccguuuauuuccugcucucaucuagaaugucggacauucuuucucacucagggugcucugcuuaacgauaagcacagcaaugggaccgugaaagaccgcucaccccaucgaacacugauguccugcccugucggagaggccccaagucccuauaacagccguuucgaaucuguggcaugguccgccucagcuugucacgauggcaccagcugguugacuaucggcauaagugggccugacaauggagcaguagccguucucaaguacaacgguauuaucacagauaccauuaaaucuuggagaaauaacauccugaggacgcaggaguccgagugcgcuugugugaauggcuauugcuuuacugucaugaccgacgggccaagcaacggacaggccucgcacaagaucuucaaaauggaaaagggcaagguggugaaaucugucgagcuggaugcgcccaacuaccauuaugaagaguguuccugcuacccugacgccggugagauuacauguguuugccgggauaauuggcacgggucaaaccgcccaugggugaguuuuaaucaaaaccucgaauaucagauaggauacaucugcagcggcguauucggcgacaauccgagacccaacgauggggcaggauccugugguccugugucuagcaauggcgcuuacggggucaagggauuuucauucaaauauggcaacgguguguggauugggaggacuaagaguaccaauucccggagcggcuuugagaugaucugggacccaaacggauggacagaaaccgacucuucauucaguguuaaacaggauauaguggccauuacggacuggagcggcuacuccgggucuuuuguccagcaucccgaguuaacuggacuggauugcauccgcccuuguuucuggguggaacuuauccgagguagaccaaaggagucgacaauuuggaccagcggcuccucaaucaguuucugcgggguaaauucugacacuguuggauggagcuggcccgauggcgcagaguugccguuuacaauugacaaauga

SEQ ID NO: 143687 - RNA, 1350 nt, Artificial Sequence
  derived and/or modified CDS sequence (opt3) from neuraminidase__InfluenzaA__ABL67829
augaaccccaauaagaaaaucauuaccauaggcagcaucugcauggugacagggauggucucccugaugcuccagauuggaaaccuuaucucuauuuggguuucacacaguauccauacugguaaucaacacaaggccgagccuauaagcaacacgaaucuguugaccgaaaaagcuguggcauccguaaaguuagccggcaacucuucgcuguguccaaucaaugggugggcgguguacucaaaagacaacagcauuagaaucggaaguaagggcgaugucuucgugguuagggagccguuuauuuccugcucucaucuagaaugucggacauucuuucucacucagggugcucugcuuaaugacaagcacagcaacgggaccgugaaagaucgcucaccccaucgaacacugauguccugcccugucggagaggccccaagucccuauaauagccguuucgaaucuguggcaugguccgccucagcuugucacgacggcaccagcugguugacuaucggcauaagugggccugauaacggagcaguagccguucucaaguacaaugguauuaucacagacaccauuaaaucuuggagaaacaauauccugaggacgcaggaguccgagugcgcuugugugaacggcuuuugcuucacugucaugaccgaugggccaagcaacggacaggccucgcacaagaucuuuaaaauggaaaagggcaagguggugaaaucugucgagcuggacgcgcccaauuaucauuacgaagaguguuccugcuauccugaugccggugagauuacauguguuugccgggacaacuggcacgggucaaaucgcccaugggugaguuucaaccaaaaucucgaauaccagauaggauauaucugcagcggcguauuuggcgauaacccgagacccaaugacggggcaggauccugugguccuguggcuucuaacggcgccuacggggucaagggauucagcuuuaaauacggcaaugguguguggauugggaggacuaagucaaccaacagucgguccggcuucgagaugaucugggauccaaauggauggacagaaaccgacagcucuuuuucaguuaaacaggacauaguggcaauuacggauuggaguggcuauagcggguccuucguccagcaucccgaguuaacuggacuggacugcauccgcccuuguuucuggguggaacuuauccgagguagaccaaaggagucuacaauuuggaccucgggcagcuccaucucauuuugcgggguaaacagugauacuguuggauggucuuggcccgacggcgcugaguugccguucacaauugauaaauga

SEQ ID NO: 143688 - RNA, 1410 nt, Artificial Sequence; identical to SEQ ID NO: 142760
  derived and/or modified CDS sequence (opt3) from neuraminidase__InfluenzaA__ABM22018

SEQ ID NO: 143689 - RNA, 1413 nt, Artificial Sequence; identical to SEQ ID NO: 143604
  derived and/or modified CDS sequence (opt3) from neuraminidase__InfluenzaA__ABM22029

SEQ ID NO: 143690 - RNA, 1410 nt, Artificial Sequence; identical to SEQ ID NO: 142762
  derived and/or modified CDS sequence (opt3) from neuraminidase__InfluenzaA__ABM22040

SEQ ID NO: 143691 - RNA, 1410 nt, Artificial Sequence; identical to SEQ ID NO: 143669
  derived and/or modified CDS sequence (opt3) from neuraminidase__InfluenzaA__ABM22062

SEQ ID NO: 143692 - RNA, 1410 nt, Artificial Sequence
  derived and/or modified CDS sequence (opt3) from neuraminidase__InfluenzaA__ABM22073
augaaccccaaucagaagaucauuaccauaggcagcgugucccugacaaucgccacuauuugcuuccucaugcaaaucgcuauucuugucacgaccguuacacugcacuuuaaacaguacgaguguaacucuccuccaaauaaccaggugauguugugcgaaccgacuaucauagagagaaauaucaccgaaauuguauauuuaacaaacaccacuaucgagaaggaaauuugucccaaacuggcagaguacaggaauuggucaaagccucagugcaacaucacaggguucgccccauuuaguaaagacaauagcauacggcuauccgcgggaggugauauuugggugacccgcgagcccuaugucucuugugacccugauaagugcuaccaauucgcucucggccaggggacgacucugaacaauggacauucgaacgacaccgugcacgaucgaacaccauaucguacucuucugaugaaugaauugggcguucccuuuaaccucgguaccagacagguguguaucgccuggucaagcaguuccugccaugacgggaaggcauggcugcacgucugugugacaggagaugacgagaaugccaccgcuucuuucauuuacaacggcaaacugguagauagcaucggcuccuggucaaagaaaauccucaggacgcaggaaagugagugcguuuguauuaacgggacuugcgcaguggucaugacagacggaagcgccucugguaaggcugauaccaaaauauuauuuaucgaggaaggcaagauugugcauaucuccacucugucagggagcgcccaacacguggaggaaugcaguuguuauccucgguacccaggaguccgcugcguuuguagagacaauuggaagggcucuaacaggccgauaguggauauuaauguaaaagacuacuccaucgugagcucguaugucugcucuggucuugugggggacacaccccggaagaacgauuccuucucaaguagccacuguuuggacccuaauaacgaggaaggaggccauggcguuaaagggugggcguuugaugacggaaaugauguguggaugggucgcaccaucuccgagaagcugcgaucuggcuacgagacguucaaagucauugaaggguggagcaagccaaacucaaaacuacagaccaauagacaggugaucguagagaggggaaaccggaguggcuauuccgguauuuuuagcguugaagggaagucuugcauaaaucguuguuucuacguggagcucauccgcggcagaaaggaagagacagaggucugguggacuucaaacaguauuguggucuuuugcggaaccagcggcacauaugggacuggauccuggcccgacggugcagauaucaaucugaugccuaucuga

SEQ ID NO: 143693 - RNA, 1410 nt, Artificial Sequence; identical to SEQ ID NO: 142639
  derived and/or modified CDS sequence (opt3) from neuraminidase__InfluenzaA__ABM22084

SEQ ID NO: 143694 - RNA, 1410 nt, Artificial Sequence
  derived and/or modified CDS sequence (opt3) from neuraminidase__InfluenzaA__ABM22095
augaaccccaaucagaagaucauuaccauaggcagcgugucccugacaaucgccacuauuugcuuccucaugcaaaucgcuauucuugucacgaccguuacacugcacuuuaaacagcaugaguguaacucuccuccaaauaaccaggcaauguugugcgaaccgacuaucauagagagaaauaucaccgaaauugugcacuuaacaaacaccacuaucgagaaggaaauuugucccaaacugguagaguacaggaauuggucaaagccucagugcaacaucacaggguucgccccauuuaguaaagacaauagcauacggcuauccgcgggaggugauauuugggugacccgcgagcccuaugucucuugugacccugauaagugcuaccaauucgcucucggccaggggacgacucugaacaauggacauucgaacgacaccgugcacgaucgaacaccauaucguacucuucugaugaaugaauugggcguucccuuucaucucgguaccagacagguguguaucgccuggucaagcaguuccugccacgacgggaaggcauggcugcacgucugugugacaggagaugacaaaaacgccaccgcuucuuucauuuacaauggcaggcugguagauagcaucggcuccuggucaaagaaaauccuccggacgcaggagagugaaugcguuuguauuaacgggacuugcacaguggucaugaccgacggaagcgcaucugguaaggccgauacuaaaauauuauuuaucgaggagggcaagauugugcauaucuccacacugucagggagcgcucaacacguggaagagugcaguuguuauccucgcuacccaggagucagaugcguuuguagggacaacuggaagggcucuaaucggccgauaguggauauuaacguaaaagacuauuccaucgugagcucguacgucugcucuggucuugugggggacacccccaggaagaaugauuccuucucaaguagccauuguuuggacccuaacaaugaagagggaggccacggcguuaaagggugggccuuugaugacggaaacgauguguggaugggucgaacgaucuccgaaaagcugagaucuggcuacgagaccuucaaagucauugagggguggagcaagccaaauucaaaacuacagaucaaccgccaggugauuguagaacggggaaaucguaguggcuauuccgguauauuuagcguugaggggaagucuugcaucaaccgcuguuucuacguggaacucauuagaggcaggaaggaggaaacagaggucugguggacuucaaauaguaucguggucuuuugcggaaccagcggcacauaugggacuggauccuggcccgacggugcggauaucaaccugaugccuauuuga

SEQ ID NO: 143695 - RNA, 1410 nt, Artificial Sequence; identical to SEQ ID NO: 142639
  derived and/or modified CDS sequence (opt3) from neuraminidase__InfluenzaA__ABM22106

SEQ ID NO: 143696 - RNA, 1410 nt, Artificial Sequence; identical to SEQ ID NO: 142639
  derived and/or modified CDS sequence (opt3) from neuraminidase__InfluenzaA__ABM22117

SEQ ID NO: 143697 - RNA, 1410 nt, Artificial Sequence; identical to SEQ ID NO: 143650
  derived and/or modified CDS sequence (opt3) from neuraminidase__InfluenzaA__ABM22128

SEQ ID NO: 143698 - RNA, 1410 nt, Artificial Sequence
  derived and/or modified CDS sequence (opt3) from neuraminidase__InfluenzaA__ABM22139
augaaccccaaucagaagaucauuaccauaggcagcgugucccugacaaucucuacuauuugcuucuuuaugcaaaucgccauucucaucacgaccgucacacuucacuucaaacaguacgaguuuaacucaccuccaaauaaccagguuaugcugugugaaccgacuauaaucgagagaaauauuaccgaaaucguguauuugacaaacaccacuauugagaaggaaaucugccccaaauuagcugaguacaggaauuggaguaagccucaguguaacauaacaggguucgcaccauuuagcaaagacaauuccauucggcugucugccggaggugauaucuggguaacccgcgagcccuaugugucgugcgacccugauaaguguuaccaauucgcgcuaggccaggggacgacucucaacaauguccauucaaacgacaccgugcacgaucgaacaccauaucguacucugcuuaugaaugaacugggaguucccuuucauuugggcaccaaacaggugugcauugcuuggagcaguuccucuugucacgacgguaaggccuggcuccaugucugcgugacaggggaugacaagaacgcaaccgccagcuucaucuacaauggaagacugguagauuccaucguuucauggaguaaagagauucugaggacgcaggaaagcgagugugugugcauaaacggcacuuguacagucgugaugaccgacggcucugcuuccgagaaggcagauacuaaaauccucuuuauugaagaggggaagaucgugcacacaucaaccuuaagcggaagugcccaacacgucgaagagugcucuugcuauccucgguacccagguguucgcugugugugcagagacaacuggaagggcuccaauaggccgauaguagauauuaacaucaaagacuacagcaucgugucgucuuaugucuguuccgggcuggugggagacacgccccggaagaaugauucaaguagcuccucucauugccuugacccuaacaaugaagagggcggucacgggguuaaaggaugggcuuucgaugacggcaacgauguguggaugggccgcaccauuagcgagaaguugcgaucaggguacgaaacauuuaaagucaucgagggauggaguaauccaaacuccaagcugcagauuaauagacaggugauaguagacagggguaaccggagcggcuauucugggaucuucucaguugaaggaaaaaguuguauuaaucguugcuuuuacguggagcuaauccgcggcagaaaggaagagacugagguccucuggaccagcaacuccaucguggucuucugugguacaucugggacuuauggcaccggaucguggcccgauggcgccgacauuaaucugaugccuauauga

SEQ ID NO: 143699 - RNA, 1410 nt, Artificial Sequence
  derived and/or modified CDS sequence (opt3) from neuraminidase__InfluenzaA__ABM22150
augaaccccaaucagaagaucauuaccauaggcagcgugucccugacaaucucuacuauuugcuucuuuaugcaaaucgccauucucaucacgaccgucacacuucacuucaaacaguacgaguuuaacucacugccuaauaaccagguuauguugugugaaccaacuauaaucgagagaaauauuaccgaaaucguguauuuaacaaacaccacuauugagaaggaaaucugcccggagcuggcugaguacaggaauuggaguaaaccccagugugacauaacaggguucgcaccuuuuagcaaggauaacuccauucggcuaucugccggaggugacaucuggguaacccgcgaaccauaugugucgugcgaucccgacaaauguuaccaauucgcgcucggccaggggacgacucugaauaacguccauucaaaugauaccgugcacgaccgaacaccuuaucguacucuucugaugaacgaguugggaguuccauuucaucucggcaccaaacaggugugcauugcuuggagcaguuccucuugucacgaugguaaggccuggcugcaugucugcgugacaggggacgauaagaaugcaaccgccagcuucaucuacaacggaagacugguagacuccaucguuucauggaguaagaaaauucucaggacgcaggaaagcgagugugugugcauaaauggcacuuguacagucgugaugaccgauggcucugcuuccgggaaggcagacacuaaaaucuuauuuauugaggaaggaaagaucgugcacacaucaacccugagcgguagugcccaacacgucgaggaaugcucuugcuauccccgguacccuggcguucgcugugugugcagagauaacuggaagggguccaacaggccaauaguagacauuaauaucaaagacuacagcaucgugucgucuuaugucuguuccggacuugugggcgauacgccgcggaagaacgacucaaguagcuccucucauugcuuggaucccaauaacgaggaaggugggcacggaguuaaaggcugggcuuucgacgauggcaaugacguguggauggggcgcaccauuagcgagaagcugcgaucaggauacgagacauuuaaagucaucgaagguuggaguaacccuaauuccaagcuacagauuaacagacaggugauaguagauaggggcaaucggagcggguauucuggaaucuucucaguugagggcaaaaguuguauuaaccguugcuuuuacguggaacucauccgcgguagaaaggaggaaacugagguccuguggaccagcaauuccaucguggucuucugugggacaucuggcacuuauggaaccggcucguggccagacggggccgauauuaaccuuaugcccauauga

SEQ ID NO: 143700 - RNA, 1413 nt, Artificial Sequence; identical to SEQ ID NO: 143107
  derived and/or modified CDS sequence (opt3) from neuraminidase__InfluenzaA__ABM22161

SEQ ID NO: 143701 - RNA, 1413 nt, Artificial Sequence; identical to SEQ ID NO: 143107
  derived and/or modified CDS sequence (opt3) from neuraminidase__InfluenzaA__ABM22172

SEQ ID NO: 143702 - RNA, 1413 nt, Artificial Sequence; identical to SEQ ID NO: 143107
  derived and/or modified CDS sequence (opt3) from neuraminidase__InfluenzaA__ABM22183

SEQ ID NO: 143703 - RNA, 1413 nt, Artificial Sequence; identical to SEQ ID NO: 143107
  derived and/or modified CDS sequence (opt3) from neuraminidase__InfluenzaA__ABM22194

SEQ ID NO: 143704 - RNA, 1413 nt, Artificial Sequence; identical to SEQ ID NO: 143107
  derived and/or modified CDS sequence (opt3) from neuraminidase__InfluenzaA__ABM22205

SEQ ID NO: 143705 - RNA, 1413 nt, Artificial Sequence; identical to SEQ ID NO: 143107
  derived and/or modified CDS sequence (opt3) from neuraminidase__InfluenzaA__ABM22216

SEQ ID NO: 143706 - RNA, 1413 nt, Artificial Sequence; identical to SEQ ID NO: 143107
  derived and/or modified CDS sequence (opt3) from neuraminidase__InfluenzaA__ABM22227

SEQ ID NO: 143707 - RNA, 1413 nt, Artificial Sequence; identical to SEQ ID NO: 143107
  derived and/or modified CDS sequence (opt3) from neuraminidase__InfluenzaA__ABM22238

SEQ ID NO: 143708 - RNA, 1413 nt, Artificial Sequence
  derived and/or modified CDS sequence (opt3) from neuraminidase__InfluenzaA__ABM22271
augaaccccaaucagaagaucauuaccauaggcagcaucuccauugugaucgggauuaucucucugauacuccaaaucggaaacauuaucucaauuugggccagucacagcauccagacagguucccagaaucauacuggcauaugcaaccagagaauuaucacguacgaaaauucuaccugggucaaccaaacauauguuaauauuaacaauacuaacgugguagcugggaaagacaagaccucgaugacacuugcaggaaauucaagccuguguccuaucaggggcugggccaucuacaccaaagauaacaguauucggauagguuccaagggggacguguucgucauccgcgagccauuuauuucuugcagccacuuggagugucgaacuuucuuuuuaacacagggagcgcugcuaaaugauaaacauuccaacggcaccgugaaggaccguucaccguauagagcucucaugaguugcccccugggcgaagccccuagcccauacaauucuagguucgaguccguugcauggucagccagcgcuugucacgaugggcuuggauggcugacgaucgguauaaguggccccgacaacggggcaguggccgucuugaaguauaacggaauuaucacugaaaccaucaaaucuuggaagaaacggauucuccgcacacaggaguccgagugcguguguaugaauggcagcugcuuuacuaucaugaccgaugguccuucgaacggggcugccucuuacagaauuuucaagauagaaaaaggaaggguaacaaaguccaucgagcugggcgcgccaaauuaucauuacgaagaguguucaugcuaccccgacaccggcacgguuaugugugugugccgggauaacuggcacgggaguaaucgcccuugggucagcuuuaaccagaaucuggacuaucaaauuggauacaucugcuccgguguguucggcgauaacccacgaccgaaggacggggagggaucuuguaaucccgugacugucgauggcgcagacgguguuaaaggguuuagcuauagauacggcaacggaguguggaucggcaggacaaagucaaaucggcuccguaaaggguucgaaaugauuugggacccuaacggauggaccgauacugacagugauuuuuccaugaagcaggacauaguagccaugacagauuggagcgguuauucuggcucauucgugcagcacccagaguuaaccgggcuggacugcaugcgccccuguuuuugggucgaacuugugagaggauugccuagggagaauacgaccaucuggacaaguggcagcuccauuucuuucugcgguguuaacucggauacugcuaauuggagcuggccagacggggccgaacugcccuucaccaucgauaaauga

SEQ ID NO: 143709 - RNA, 1413 nt, Artificial Sequence; identical to SEQ ID NO: 143016
  derived and/or modified CDS sequence (opt3) from neuraminidase__InfluenzaA__ABM22282

SEQ ID NO: 143710 - RNA, 1410 nt, Artificial Sequence; identical to SEQ ID NO: 142391
  derived and/or modified CDS sequence (opt3) from neuraminidase__InfluenzaA__ABM22304

SEQ ID NO: 143711 - RNA, 1410 nt, Artificial Sequence; identical to SEQ ID NO: 142391
  derived and/or modified CDS sequence (opt3) from neuraminidase__InfluenzaA__ABM22315

SEQ ID NO: 143712 - RNA, 1410 nt, Artificial Sequence; identical to SEQ ID NO: 142391
  derived and/or modified CDS sequence (opt3) from neuraminidase__InfluenzaA__ABM22326

SEQ ID NO: 143713 - RNA, 1410 nt, Artificial Sequence; identical to SEQ ID NO: 142391
  derived and/or modified CDS sequence (opt3) from neuraminidase__InfluenzaA__ABM22337

SEQ ID NO: 143714 - RNA, 1410 nt, Artificial Sequence; identical to SEQ ID NO: 142394
  derived and/or modified CDS sequence (opt3) from neuraminidase__InfluenzaA__ABM22348

SEQ ID NO: 143715 - RNA, 1410 nt, Artificial Sequence; identical to SEQ ID NO: 142394
  derived and/or modified CDS sequence (opt3) from neuraminidase__InfluenzaA__ABM22359

SEQ ID NO: 143716 - RNA, 1410 nt, Artificial Sequence; identical to SEQ ID NO: 142394
  derived and/or modified CDS sequence (opt3) from neuraminidase__InfluenzaA__ABM22370

SEQ ID NO: 143717 - RNA, 1413 nt, Artificial Sequence; identical to SEQ ID NO: 142973
  derived and/or modified CDS sequence (opt3) from neuraminidase__InfluenzaA__ABM66867

SEQ ID NO: 143718 - RNA, 1413 nt, Artificial Sequence; identical to SEQ ID NO: 143107
  derived and/or modified CDS sequence (opt3) from neuraminidase__InfluenzaA__ABM66900

SEQ ID NO: 143719 - RNA, 1413 nt, Artificial Sequence; identical to SEQ ID NO: 143107
  derived and/or modified CDS sequence (opt3) from neuraminidase__InfluenzaA__ABM66911

SEQ ID NO: 143720 - RNA, 1410 nt, Artificial Sequence; identical to SEQ ID NO: 142394
  derived and/or modified CDS sequence (opt3) from neuraminidase__InfluenzaA__ABM66922

SEQ ID NO: 143721 - RNA, 1410 nt, Artificial Sequence; identical to SEQ ID NO: 142394
  derived and/or modified CDS sequence (opt3) from neuraminidase__InfluenzaA__ABM66933

SEQ ID NO: 143722 - RNA, 1410 nt, Artificial Sequence; identical to SEQ ID NO: 142394
  derived and/or modified CDS sequence (opt3) from neuraminidase__InfluenzaA__ABM66944

SEQ ID NO: 143723 - RNA, 1410 nt, Artificial Sequence; identical to SEQ ID NO: 142394
  derived and/or modified CDS sequence (opt3) from neuraminidase__InfluenzaA__ABM66955

SEQ ID NO: 143724 - RNA, 1410 nt, Artificial Sequence; identical to SEQ ID NO: 142394
  derived and/or modified CDS sequence (opt3) from neuraminidase__InfluenzaA__ABM66966

SEQ ID NO: 143725 - RNA, 1410 nt, Artificial Sequence; identical to SEQ ID NO: 142394
  derived and/or modified CDS sequence (opt3) from neuraminidase__InfluenzaA__ABM66977

SEQ ID NO: 143726 - RNA, 1410 nt, Artificial Sequence; identical to SEQ ID NO: 142394
  derived and/or modified CDS sequence (opt3) from neuraminidase__InfluenzaA__ABM66988

SEQ ID NO: 143727 - RNA, 1410 nt, Artificial Sequence; identical to SEQ ID NO: 142394
  derived and/or modified CDS sequence (opt3) from neuraminidase__InfluenzaA__ABM66999

SEQ ID NO: 143728 - RNA, 1410 nt, Artificial Sequence; identical to SEQ ID NO: 142394
  derived and/or modified CDS sequence (opt3) from neuraminidase__InfluenzaA__ABM67010

SEQ ID NO: 143729 - RNA, 1410 nt, Artificial Sequence; identical to SEQ ID NO: 142394
  derived and/or modified CDS sequence (opt3) from neuraminidase__InfluenzaA__ABM67021

SEQ ID NO: 143730 - RNA, 1413 nt, Artificial Sequence
  derived and/or modified CDS sequence (opt3) from neuraminidase__InfluenzaA__ABM67054
augaaccccaaucagaagaucauuaccauaggcagcaucuccauugccaucgggacaauuucucugaugcuccaaaucggaaacaugauaucaaucugggcuagucacagcauucagacugguucccagaaucauacgggcaucugcaaccagagaauuaucaccuacgagaauagcacaugggugaaccacacuuaugucaauauaaacaauaccaacguuguggcagggaaagacaagacaucgguaacccuugccggaaauucaagccuguguaguauuuccggcugggcgaucuacacuaaagauaacucuauuaggaucgguagcaagggggacguguucgucauccgggaaccuuuuauuuccugcucacauuuggagugucgcacauucuuuuuaacccaaggagcucugcuaaaugauaaacacaguaacggcacggugaaggaccgaagcccauaucgugcccucaugucuugcccgcugggcgaagcacccuccccuuacaauucaaaguucgagagcguugccuggagugcuucugcaugucaugaugggaugggauggcuuacuauagguaucuccggcccagacaacggggccguggcuguccugaaauauaacggaauuaucaccgaaacaauaaagagcuggaaaaagagaauuuugaggacucaggagucggagugcguguguguaaauggcucuugcuuuaccaucaugacagauggucccuccaacggggccgcgucauacaaaaucuucaagauugaaaagggaaaaguuaccaagaguaucgagcucaaugcaccuaacuuucacuaugaagaguguagcugcuacccagacacgggcacugugaugugugucugccgggauaauuggcacggcuccaaccgccccugggugucuuucaaucagaaccuggacuaccagauuggguauauaugcagcggaguguuuggugauaauccuagaccaaaagacggcaaggggucauguaacccggucacaguugauggagccgacggcgugaaagguuucaguuacaaguaugggaauggcguauggaucggaaggaccaaauccaaccggcugcgcaagggcuuugagaugauuugggaccccaauggguggacugauacagacagcgauuucucugugaagcaagacgucguggcuaucaccgauuggucaggauacagugguagcuuuguucagcauccugaacucacgggcuuagacugcauccgaccauguuucuggguggagcuggucagagggcuucccagggaaaacaccacaauuuggacuuccggaucuucgauaucuuucugcggcguggauuccgacaccgccaauuggucauggccugauggugcagaguugccauuuacaaucgacaaauga

SEQ ID NO: 143731 - RNA, 1350 nt, Artificial Sequence
  derived and/or modified CDS sequence (opt3) from neuraminidase__InfluenzaA__ABM68048
augaaccccaaucagaagaucauuaccauaggcagcaucugcauggugauugggaucgucucccugaugcuccaaauuggaaacaucauaucuaucuggauuucacacaguauccagacagguaaucagugucaggccggcccuauuagcaacacuaaauuccuuacggagaaggcuguugcauccgugacccuggccgggaauaguucguugugcccaaucucaggaugggcgguauacagcaaagacaacaguauaagaauuggcuccaggggugauguguuugucauccgggaaucuuucauuagcuguucccauuuagagugccgcacauuuuuccugacucaaggggcucuacucaaugacaagcacucaaacggaaccgugaaagaucgaaguccgcaucguacacugaugagcugucccguuggcgaagccccuucuccauauaauuccagauuugagucaguggcauggagcgccagugcuugccacgacggcaccucuuggcuuacuaucgggaucuccggacccgauaacggugcagucgccgugcugaaguacaauggcauuauaacagacaccaucaagagcuggaggaacaauauuuugcggacgcaggaaucggagugugcuugcguaaacgggucuuguuucacuguuaugaccgauggaccuuccaauggccaggccucauauaaaaucuuuaagauggagaaagguaagguggucaaaaguguggaacucgacgcgccaaacuaccauuaugaggaaugcagcuguuaccccgaugcaggggagauaacaugcgugugccgcgacuccuggcacggaucuaacagaccuugggucagcuucaaucagaaccuggaguaucaaauuggcuacaucuguucaggcguuuuuggggauaauccaaggccgaacgacggaacugguaguugcggccccguguccccuaauggggccuacggaguaaagggcuucagcuuuaaguaugguaacgggguguggaucggccggaccaaaucuacaaauucacgcaguggauucgaaaugauuugggauccaaacggcuggaccgggacggacagcuccuuuucugucaagcaggacaucguggcuauuacugauuggucgggauacagcgguuccuucguucagcaccccgagcugacaggccucgacuguauacgaccuugcuucuggguggaauuaaucagagggaggccaaaagagucaaccauuuggacuucuggaucuagcaucuccuuuuguggcgucaauucagauacagugagcuggucuuggcccgacggugccgaacugccguucaccaucgauaaguga

SEQ ID NO: 143732 - RNA, 1350 nt, Artificial Sequence
  derived and/or modified CDS sequence (opt3) from neuraminidase__InfluenzaA__ABM68049
augaaccccaaucagaagaucauuaccauaggcagcaucugcauggugauugggaucgucucccugaugcuccaaauuggaaacaucauaucuaucuggauuucacacaguauccagacagguaaucagugucaggccgagccuauuagcaacacuaaauuccuuacggaaaaggcuguugcauccgugacccuggccggcaauucuucguugugcccaaucucagggugggcgguauacagcaaagacaacaguauaagaauuggauccaggggcgauguguuugucauccgggagccguucauuucuuguagccauuuagaaugccgcacauuuuuccugacucaaggugcucuacucaaugacaagcacuccaacgggaccgugaaagaucgaucaccccaucguacacugaugaguuguccuguuggagaggccccaagccccuauaauucuagauuugaauccguggcauggucagccagcgcuugccacgacggcaccaguuggcuuacuaucggcaucucugggccugauaacggagcagucgccgugcugaaguacaaugguauuauaacagacaccaucaaguccuggaggaacaauauuuugcggacgcaggagagcgagugugcuugcguaaacggcucguguuucacuguuaugaccgaugggccaucuuccggacaggccucauauaaaaucuuuaagauggaaaaaggcaagguggucaaaaguguggagcucgacgcgcccaauuaccauuaugaagagugcagcuguuacccugaugccggugagauaacaugcgugugccgcgacuccuggcacgggucuaacagaccaugggucagcuucaaccagaaucuggaauaucaaauuggauacaucuguucaggcguuuuuggcgauaacccgaggcccaaugacgggacuggaaguugcgguccuguguccccaaacggcgcauacgggguaaagggauucagcuuuaaguauggcaaugguguguggaucgggcggaccaaaucuacaaacucacgcaguggcuucgagaugauuugggaucccaauggauggaccggcacggacagcuccuuuucugucaagcaggacaucguggcuauuacugauuggucgggguacagcggauccuucguucagcacccugaacugacaggucucgacuguauacgaccaugcuucuggguggaguuaaucagaggcaggcccaaagaaucaaccauuuggacaagugggucuagcaucuccuuuuguggagucaacucagauacugugagcuggucuuggccggacggcgccgagcugccuuucaccaucgauaaguga

SEQ ID NO: 143733 - RNA, 1350 nt, Artificial Sequence
  derived and/or modified CDS sequence (opt3) from neuraminidase__InfluenzaA__ABM90436
augaaccccaaucagaagaucauuaccauaggcagcaucugcauggugauugggaucgucucccugaugcuccaaauuggaaacaugaucucuauauggguuucacacaguauccagaaagguaaucagcaucaggccgagagcauuuccaacacaaauccucuuacugaaaaggcuguggcaucuguaacgcuggccggcaacucgucauuguguccaaucagagggugggcggugcacagcaaagacaauaacauuaggaucggaaguaagggcgaugucuucgugauacgggagccguuuauuuccugcucucauuuagaaugucgcaccuucuuucugacacaaggugcucuacucaaugacaaacacagcaacgggacuguuaaggaucgaucaccccaucguacccugauguccugcccugugggagaggccccaagucccuacaauagcagauucgaaucugucgcaugguccgccucagcuugucacgacggcacaagcuggcuuaccaucggcauuagugggccugauaacgaggcaguggccguacugaaguauaauggaaucaucacugacacaauuaaaucuuggaggaacaauauauugcggacccaggaguccgaaugcgcuuguguuaacgguagcugcuuuacggugaugacugauggcccaucgaacgggcaggccucuuacaagaucuucaaaaugaagaaaggaaaggucgugaaguccguggagcucgacgcgcccaauuaucacuacgaagaguguucaugcuauccugaugcaggcgagauuaccugugucugccgcgacaacuggcaugguaguaauagaccauggguuagcuuuaaccagaaucuggaauaccaaaucggguauauaugcuccggaguguucggcgauaacccgaggcccaaugacggcacagggucuuguggaccuaugagcccaaacggugccuacggcguaaaaggguuuucauucaaguacggaaauggcguguggauuggucggacuaaaaguaccaacucccgcagcggguuugagaugaucugggaucccaauggcuggacaggaaccgacucuucauucagugucaagcaggacaucguggcuauuacggauuggagcggcuauuccgggucuuuuguucagcacccugaacugacuggacucgacugcauccgaccauguuucuggguggaguuaauuagagguaggcccaaagaaucgacaauauggaccagcggcuccucaaucaguuucugcggggucaacucugauacugugagcugguccuggccggacggagccgagcugccuuuuacaauugauaaguga

SEQ ID NO: 143734 - RNA, 1350 nt, Artificial Sequence; identical to SEQ ID NO: 143733
  derived and/or modified CDS sequence (opt3) from neuraminidase__InfluenzaA__ABM90447

SEQ ID NO: 143735 - RNA, 1350 nt, Artificial Sequence; identical to SEQ ID NO: 143733
  derived and/or modified CDS sequence (opt3) from neuraminidase__InfluenzaA__ABM90458

SEQ ID NO: 143736 - RNA, 1350 nt, Artificial Sequence; identical to SEQ ID NO: 143733
  derived and/or modified CDS sequence (opt3) from neuraminidase__InfluenzaA__ABM90469

SEQ ID NO: 143737 - RNA, 1350 nt, Artificial Sequence
  derived and/or modified CDS sequence (opt3) from neuraminidase__InfluenzaA__ABM90491
augaaccccaaucagaagaucauuaccauaggcagcaucugcauggugauugggaucgucucccugaugcuccaaauuggaaacaugaucucuauauggguuucacacaguauccagaaagguaaucagcaucaggccgagagcauuuccaacacaaauccucuuacugaaaaggcuguggcaucuguaacgcuggccggcaacucgucauuguguccaaucagagggugggcggugcacagcaaagacaauaacauuaggaucggaaguaagggcgaugucuucgugauacgggagccguuuauuuccugcucucauuuagaaugucgcaccuucuuucugacacaaggugcucuacucaaugacaaacacagcaacgggacuguuaaggaucgaucaccccaucguacccugauguccugcccugugggagaggccccaagucccuacaauagcagauucgaaucugucgcaugguccgccucagcuugucacgacggcacaagcuggcuuaccaucggcauuagugggccugauaacgaggcaguggccguacugaaguauaauggaaucaucacugacacaauuaaaucuuggaggaacaauauauugcggacccaggaguccgaaugcgcuuguguuaacgguagcugcuuuacggugaugacugauggcccaucgaacgggcaggccucuuacaagaucuucaaaaugaagaaaggaaaggucauuaaguccguggagcucgacgcgaccaauuaucacuacgaagaguguucaugcuaucccgaugcaggcgagaucacaugugugugccgcgacaacuggcaugguaguaauagaccuugggucagcuuuaaccagaaucuggaauaccaaauaggguauauuugcuccggaguuuucggcgauaacccaaggccgaaugacggcacugggucuuguggacccaugagcccuaacggugccuacggcgugaaaggguuuucauucaaguacggaaauggcguauggaucggucggaccaaaaguacaaacucccgcagcggguuugagaugaucugggauccaaauggcuggaccggaacggacucuucauucagugugaagcaggacauugucgcuaucacugauuggagcggcuauuccgggucuuuugugcagcaccccgaacugacaggacucgacugcauucgaccuuguuucuggguugaguuaauaagagguaggccaaaagaaucgaccaucuggacuagcggcuccucaauuaguuucugcggggugaacucugauacagucagcugguccuggcccgacggagccgagcugccguuuaccaucgauaaguga

SEQ ID NO: 143738 - RNA, 1350 nt, Artificial Sequence; identical to SEQ ID NO: 143737
  derived and/or modified CDS sequence (opt3) from neuraminidase__InfluenzaA__ABM90502

SEQ ID NO: 143739 - RNA, 1350 nt, Artificial Sequence
  derived and/or modified CDS sequence (opt3) from neuraminidase__InfluenzaA__ABM90524
augaaccccaaucagaagaucauuaccauaggcagcaucugcauggugauugggaucgucucccugaugcuccaaauuggaaacaugaucucuauauggguuucacacaguauccagacagguaaucagcaucaggccgagagcauuuccaacacuaauccucuuacggaaaaagcugugguaucugugacccuggcaggcaacucgucauuguguccaaucagagggugggccguccacagcaaggacaauaacauuaggaucggaaguaaaggcgauguguucguuauacgggagccguuuauuuccugcucucauuuagaaugucgcacauucuuucugacucaaggugcgcuacucaaugacaagcacagcaacgggaccgugaaagaucgaucaccccaucguacacugauguccugcccugucggagaggcuccaagucccuacaauagcagauucgaaucuguggccugguccgcaucagccugucacgacggcaccagcuggcuuacuaucggcauuagugggccugauaacgaggcuguagcaguucugaaguauaauggaaucaucacagacaccauuaagucuuggaggaacaauauauugcggacgcaggaguccgaaugcgccugugugaacgguagcugcuuuacugucaugaccgauggcccaucgaacgggcaggcuucuuacaaaaucuucaagauggagaaaggaaagguggugaaauccgucgaacucgacgcccccaauuaucacuacgaggaguguucaugcuauccugaugcgggcgaaauuacauguguuugccgcgacaacuggcaugguaguaauagaccaugggugagcuuuaaccagaaucuggaguaccaaaucggguauauaugcuccggaguauucggcgauaacccgaggcccaaugacggcacugggucuuguggaccuaugagcccaaacggugcauacggcgugaagggguuuucauucaaguacggaaauggcgucuggauuggucggaccaaaaguacaaacucccgcagcggguuugaaaugaucugggaucccaauggcuggaccggaacggacucuucauucagugugaagcaggacaucguugccauuacugauuggagcggcuauuccgggucuuuugugcagcacccugagcugacaggacucgacugcauccgaccauguuucugggucgaauuaauuagagguaggcccaaagagucgaccauauggacuagcggcuccucaaucaguuucugcggggugaacucugauacaguaagcugguccuggccggacggagcugagcugccuuuuaccauugauaaguga

SEQ ID NO: 143740 - RNA, 1350 nt, Artificial Sequence; identical to SEQ ID NO: 143739
  derived and/or modified CDS sequence (opt3) from neuraminidase__InfluenzaA__ABM90535

SEQ ID NO: 143741 - RNA, 1350 nt, Artificial Sequence; identical to SEQ ID NO: 143739
  derived and/or modified CDS sequence (opt3) from neuraminidase__InfluenzaA__ABM90546

SEQ ID NO: 143742 - RNA, 1413 nt, Artificial Sequence
  derived and/or modified CDS sequence (opt3) from neuraminidase__InfluenzaA__ABN50759
augaaccccaaucagaagaucauuaccauaggcagcaucugcauggccauugggaucauuucccugauccuccaaauaggaaacaucauuucuaucugggugucacacaguauucagacagguagccagaaucauacuggcaucuguaaccagagaauaauuacguacgaaaauuccaccugggucaaccaaacauauguuaauaucucuaacacuaaugugguagcugggaaagacaccacaucgaugacccuugcaggaaacucaagccugugcccuauuaggggcugggccaucuacaguaaggauaauuccauccggauugguucuaaaggggacguguucgucauacgcgaaccauuuaucagcuguucccacuuggagugccgaacuuucuuuuuaacacagggagcgcugcuaaacgauaagcauucaaauggcaccgugaaagaccguaguccguauagagcucucaugagcugucccauuggcgaagccccuucuccauacaacuccagguucgagucaguugcauggagcgccagugcuugccacgaugggaugggauggcugacgaucgguauaucuggccccgacgauggggcaguggccguccuuaaguauaauggaauuaucacugaaaccaucaaguccuggcggaaacagauucugcgcacacaggagagcgagugugugugcguaaacggcucguguuuuacuaucaugaccgacgguccuucugaugggcaggcuuccuacagaauuuucaagauagaaaaaggaaagaucacaaaaucaauugaguuggacgccccaaacagucauuaugaagagugcagcuguuaccccgauaccggcacgguuaugugcgugugcagggacaauuggcacggcuccaaccggccuugggucucuuuuaaucaaaaccucgauuaccagaucggguauaucuguagcggaguguucggugacaauccacgcccgaaggacggcaaggggucaugcgaucccgugaacgucgacggagcggauggcguuaaagguuuuaguuaccgauaugggaauggcguguggauuggaagaacuaaguccaacagcucuaggaaaggcuucgagaugauaugggacccuaauggguggacagauaccgacucaaacuuucugguaaagcaggauguggucgcaaugacugacuggaguggauacagcgguuccuucgugcaacacccagaacugacaggccucgauuguauccggcccugcuuuuggguugaguuaauucgugggcgcccuagagagaaaaccacgaucuggaccucuggaucgagcauuuccuucuguggcgucaauucagacacagugaacuggaguuggccagauggugccgagcugcccuucacuaucgacaaguga

SEQ ID NO: 143743 - RNA, 1410 nt, Artificial Sequence
  derived and/or modified CDS sequence (opt3) from neuraminidase__InfluenzaA__ABN50770
augaaccccaaucagaagaucauuaccauaggcagcgugucccugacaaucucuacuauuugcuucuuuaugcaaaucgccauucucaucacgaccgucacacuucacuucaaacaguacgaguuuaacucaccuccaaauaaccagguuaugcugugugaaccgacuauaaucgagagaaauauuaccgaaaucguguauuugacaaacaccacuauugagaaggaaaucugccccaaauuagcugaguacaggaauuggaguaagccucagugugacauaacaggguucgcaccauuuagcaaagauaacuccauucggcugucugccggaggugacaucuggguaacccgcgagcccuaugugucgugcgauccugacaaguguuaccaauucgcgcuaggccaggggacgacucucaauaacguccauucaaaugauaccgugcacgaccgaacaccauaucguacucugcuuaugaacgaacugggaguucccuuucauuugggcaccaaacaggugugcauugcuuggagcaguuccucuugucacgaugguaaggccuggcuccaugucugcgugacaggggacgauaagaaugcaaccgccagcuucaucuacaacggaagacugguagacuccguugugucauggaguaaaaagauccugaggacgcaggagagcgaaugugucugcauuaauggcacuuguacaguggugaugaccgauggcucugcuuccgggaaagcagacacuaagauacucuuuaucgaggagggaaagauuguccacacaucaaccuuaagcgguagugcccaacacguugaagagugcucuugcuauccucgguacccaggcgugcgcuguguaugcagagauaacuggaaaggguccaacaggccgaucguggacauaaauauuaaggacuacagcaucgucucgucuuauguguguuccggacugguuggcgauacgccccggaaaaacgacucaaguagcuccucucauugccuugauccuaauaacgaagagggugggcacggagugaagggcugggcuuucgacgauggcaaugacgucuggauggggcgcaccaucagcgaaaaauugcgaucaggauacgagacauuuaaggugauugaggguuggaguaacccaaauuccaaacugcagaucaacagacagguaauuguugauaggggcaaucggagcggguauucuggaauauucucaguggaaggcaagaguuguaucaaccguugcuuuuacgucgagcuaauucgcgguagaaaggaagagacugaagugcucuggaccagcaauuccaucgucguguucugugggacaucuggcacuuauggaaccggcucguggcccgacggggccgauaucaaccugaugccuauuuga

SEQ ID NO: 143744 - RNA, 1413 nt, Artificial Sequence
  derived and/or modified CDS sequence (opt3) from neuraminidase__InfluenzaA__ABN50903
augaaccccaaucagaagaucauuaccauaggcagcaucugcauggccauugggaucauuucccugauccuccaaauaggaaacaucauuucuaucugggugucacacaguauucagacagguagccagaaucauacuggcaucuguaaccagagaauaauuacguacgaaaauuccaccugggucaaccaaacauauguuaauaucaacaauacuaacgugguagcugggaaagacaccacaucugugacccuugcaggaaauucgucacugugcccugucaggggcugggccauuuacagcaaggauaacaguauccggaucgguuccaaaggggacguguucguuauucgcgaaccauuuauaucuuguagccacuuggagugccgaacuuucuuuuuaacacagggagcgcugcuaaaugauaagcauuccaacggcaccgugaaagaccguucaccguauagagcucucaugaguugucccaucggcgaagccccuagcccauacaauucuagguucgaguccgucgcauggucagccagcgcuugccacgaugggaugggauggcugacgauugguaucaguggccccgacgauggggcaguggccguacuuaaguauaacggaauaauuacugaaaccaucaagucuuggcggaaacgcauccugagaacacaggaguccgaguguguuugcgugaacggcagcuguuuuacuauuaugaccgacgguccuucgaaugggccagcuucuuacaggaucuucaagauugaaaaaggaaagauaacaaaauccaucgaguuggaugcccccaacucacauuaugaagagugcaguuguuacccugacaccggcacggucaugugcgugugccgggauaauuggcacggcagcaaccgcccauggguguccuuuaaucagaaccucgacuaccaaauuggguauaucuguucuggagucuucggugauaauccgcgacccaaggacggcaaggggagcugcggaccuguuacuguggacggcgcggaugguguaaaaggguuuucauacagauauggcaacggaguguggaucggcaggacaaagaguaauuccagccggaaaggguucgagaugauuugggacccaaacggauggaccgauacugacucuaauuuucuggucaagcaggaugugguugcaaugacagacuggucagguuacaguggcagcuucauacagcaccccgaacugaccgggcucgauuguaugcguccuugcuuuuggguggaguuaauccgcggaagaccaagggagaaaacgaccauuuggacauccgguucuucgaucagcuucuguggcgucaacuccgacacugugaauuggucauggcccgauggggccgagcugccguucaccauugacaaguga

SEQ ID NO: 143745 - RNA, 1413 nt, Artificial Sequence; identical to SEQ ID NO: 143107
  derived and/or modified CDS sequence (opt3) from neuraminidase__InfluenzaA__ABN50920

SEQ ID NO: 143746 - RNA, 1413 nt, Artificial Sequence
  derived and/or modified CDS sequence (opt3) from neuraminidase__InfluenzaA__ABN50931
augaaccccaaucagaagaucauuaccauaggcagcaucugcauggccauugggaucauuucccugauccuccaaauaggaaacaucgugucuauuuggaucucacacaguauucagacagguagccagaauuacacuggcaucuguaaccagagaauaauuacguaugaaaauuccaccugggucaaccaaacauacguuaauaucaacaauacuaacgugguagcugggcaggacaccacaucuguggcacuugccggaaauucgucacugugcccuauuagcggcugggcgaucuauaguaaagauaacuccaucaggauugguucuaagggggacgucuucgugauacgggagccauuuaucagcuguucccauuuggagugccgcaccuucuuuuuaacucagggagcucugcuaaaugauaaacacucaaacggcacaguuaaggaccgaaguccguaccgugcccucaugagcugucccauuggcgaagcaccuucuccauauaauuccagauucgagucaguggccuggagcgcuagugcaugccaugaugggaugggauggcugaccaucgguauaucuggccccgacgauggggccgucgcugugcuuaaauacaacggaauuaucacggaaacuaucaaguccuggaggaagcggauucugcgcacccaggagagcgaguguguaugcguuaacggcucguguuuuacaaucaugacugacgguccuaauaacgggccagccucuuauaaaauuuucaagauagaaaaaggaaagaucaccaaauccauugaguuggaugcgcccaauucacacuacgaagagugcaguuguuacccugacgcaggcacagugaugugcgucugcagagauaacuggcauggcagcaauaggccauggguguccuuuaaccaaaaucucgacuaucagaucggguacaucuguucuggaguguucggugauaacccgcggcccaaggacggcaaggggagcugcggaccugucaccguugacggcgccgauggugugaaaggguuuucauaucgcuacggcaauggaguauggauuggccgaacgaagaguaacuccagcagaaggggguucgagaugauaugggacccaaauggauggacugauacagacucuaaauuucuggugaagcaggaugucguggcuaucaccgacuggucagguuauaguggcagcuucguucagcaccccgaacugacugggcucgauuguaugcggccuugcuuuuggguggaguuaauucguggacgcccaagagaaaacacaaccaucuggacguccgguucuucgauuagcuucuguggcgucaauggggacaccgccaacugguccuggcccgauggcgcagagcugccguucacaaucgacaaauga

SEQ ID NO: 143747 - RNA, 1413 nt, Artificial Sequence
  derived and/or modified CDS sequence (opt3) from neuraminidase__InfluenzaA__ABN50943
augaaccccaaucagaagaucauuaccauaggcagcaucugcauggccauugggaucauuucccugauccuccaaauaggaaacaucgugucuauuuggaucucacacaguauucagacagguagccagaauuacacuggcaucuguaaccagagaauaauuacguaugaaaauuccaccugggucaaccaaacauacguuaauaucaacaauacuaacgugguagcugggcaggacaccacaucuguggcacuugccggaaauucgucacugugcccuauuagcggcugggcgaucuauaguaaagauaacuccaucaggauugguucuaagggggacgucuucgugauacgggagccauuuaucagcuguucccauuuggagugccgcaccuucuuuuuaacucagggagcucugcuaaaugauaaacacucaaacggcacaguuaaggaccgaaguccguaccgugcccucaugagcugucccauuggcgaagcaccuucuccauauaauuccagauucgagucaguggccuggagcgcuagugcaugccaugaugggaugggauggcugaccaucgguauaucuggccccgacgauggggccgucgcugugcuuaaauacaacggaauuaucacggaaacuaucaaguccuggaggaagcggauucugcgcacccaggagagcgaguguguaugcguuaacggcucguguuuuacaaucaugacugacgguccuaauaacgggccagccucuuauaaaauuuucaagauagaaaaaggaaagaucaccaaauccauugaguuggaugcgcccaauucacacuacgaagagugcaguuguuacccugacgcaggcacagugaugugcgucugcagagauaacuggcauggcagcaauaggccauggguguccuuuaaccaaaaucucgacuaucagaucggguacaucuguucuggaguguucggugauaacccgcggcccaaggacggcaaggggagcugcggaccugucaccguugacggcgccgauggugugaaaggguuuucauaucgcuacggcaauggaguauggauuggccgaacgaagaguaacuccagcagaaggggguucgagaugauaugggacccaaauggauggacugauacagacucuaaauuucuggugaagcaggaugucguggcuaugaccgacuggucagguuauaguggcagcuucguucagcaccccgaacugacugggcucgauuguaugcggccuugcuuuuggguggaguuaauccguggacgcccaagagaaaacacaaccauuuggacguccgguucuucgaucagcuucuguggcgucaauggggacaccgccaacugguccuggcccgauggcgcagagcugccguucacaauugacaaauga

SEQ ID NO: 143748 - RNA, 1413 nt, Artificial Sequence; identical to SEQ ID NO: 143016
  derived and/or modified CDS sequence (opt3) from neuraminidase__InfluenzaA__ABN50954

SEQ ID NO: 143749 - RNA, 1413 nt, Artificial Sequence; identical to SEQ ID NO: 143016
  derived and/or modified CDS sequence (opt3) from neuraminidase__InfluenzaA__ABN50965

SEQ ID NO: 143750 - RNA, 1413 nt, Artificial Sequence; identical to SEQ ID NO: 143016
  derived and/or modified CDS sequence (opt3) from neuraminidase__InfluenzaA__ABN50976

SEQ ID NO: 143751 - RNA, 1410 nt, Artificial Sequence; identical to SEQ ID NO: 142391
  derived and/or modified CDS sequence (opt3) from neuraminidase__InfluenzaA__ABN50987

SEQ ID NO: 143752 - RNA, 1410 nt, Artificial Sequence; identical to SEQ ID NO: 142394
  derived and/or modified CDS sequence (opt3) from neuraminidase__InfluenzaA__ABN50998

SEQ ID NO: 143753 - RNA, 1410 nt, Artificial Sequence
  derived and/or modified CDS sequence (opt3) from neuraminidase__InfluenzaA__ABN51013
augaaccccaaucagaagaucauuaccauaggcagcgugucccugacaaucucuacuauuugcuucuuuaugcaaaucgccauucucaucacgaccgucacacuucacuucaaacaguacgaguuuaacucaccuccaaauaaccagguuaugcugugugaaccgacuauaaucgagagaaauauuaccgaaaucguguauuugacaaacaccacuauugagaaggaaaucugccccaaauuagcugaguacaggaauuggaguaagccucaguguaacauaacaggguucgcaccauuuagcaaagacaauuccauucggcugucugccggaggugauaucuggguaacccgcgagcccuaugugucgugcgacccugauaaguguuaccaauucgcgcuaggccaggggacgacucucaacaauguccauucaaacgacaccgugcacgaucgaacaccauaucguacucugcuuaugaaugaacugggaguucccuuucauuugggcaccaaacaggugugcauugcuuggagcaguuccucuugucacgacgguaaggccuggcuccaugucugcgugacaggggaugacaagaacgcaaccgccagcuucaucuacaauggaagacugguagauuccaucguuucauggaguaaagagauucugaggacgcaggaaagcgagugugugugcauaaacggcacuuguacagucgugaugaccgacggcucugcuuccgggaaggcagauacuaaaauccucuuuauugaggaaggaaagaucgugcacacaucaaccuuaagcgguagugcccaacacgucgaggaaugcucuugcuauccucgguacccaggcguucgcugugugugcagagacaacuggaagggguccaauaggccgauaguagauauuaacaucaaagacuacagcaucgugucgucuuaugucuguuccggacuggugggcgacacgccccggaagaaugauucaaguagcuccucucuuugcuuggacccuaacaaugaggaaggugggcauggaguuaaaggcugggcuuucgaugacggcaacgauguguggauggggcgcaccauuagcgagaagcugcgaucaggauacgagacauuuaaagucaucgaagguuggaguaauccaaacuccaagcuacagauuaauagacaggugauaguagacaggggcaaccggagcggguauucuggaaucuucucaguugagggcaaaaguuguauuaaucguugcuuuuacguggaacucauccgcgguagaaaggaggaaacugagguccuguggaccagcaacuccaucguggucuucugugggacaucuggcacuuauggaaccggcucguggcccgauggggccgacauuaaucuuaugccuauauga

SEQ ID NO: 143754 - RNA, 1410 nt, Artificial Sequence
  derived and/or modified CDS sequence (opt3) from neuraminidase__InfluenzaA__ABN51024
augaaccccaaucagaagaucauuaccauaggcagcgugucccugacagucucuacuaucugcuucuuuaugcaaauugccauccucauuacgaccguuacacuucacuucaaacaguacgaguuuaacucaccuccaaauaaccaggugaugcugugugaaccgacuaucauagagagaaauaucaccgaaauuguauauuugacaaacaccacuaucgagaaggaaauuugccccaaauuagcugaguacaggaauuggaguaagccucaguguaacaucacaggguucgcaccauuuagcaaagacaauuccauacggcugucugccggaggugauauuugggugacccgcgagcccuaugucucgugcgacccugauaaguguuaccaauucgcgcuaggccaggggacgacucucaacaaugugcauucaaacgacaccguucacgaucgaacaccauaucguacucugcuuaugaaugaacugggagugcccuuucauuugggcaccaagcaggucugcaucgcuuggagcaguuccucuugucacgacgguaaagccuggcuccaugugugcguaacaggggaugacaagaacgcaaccgccagcuucauuuacaauggaagacugguugauuccaucgugucauggaguaaagagauccugaggacgcaggaaagcgagugugucugcauuaacggcacuuguacaguggugaugaccgacggcucugcuuccgggaaggcagauacuaaaauacucuuuaucgaggaaggaaagauuguccacacaucaaccuuaagcgguagugcccaacacguugaggaaugcucuugcuauccucgguacccaggcgugcgcuguguaugcagagacaacuggaagggguccaauaggccgaucguggauauaaacauuaaagacuacagcaucgucucgucuuauguguguuccggacugguuggcgacacgccccggaagaaugauucaaguagcuccucucauugccuugacccuaacaaugaggaaggugggcacggagugaaaggcugggcuuucgaugacggcaacgaugucuggauggggcgcaccaucagcgagaaguugcgaucaggauacgagacauuuaaagugauugaagguuggaguaauccaaacuccaagcugcagacuaauagacagguaaucguugacaggggcaaccggagcggguauucuggaauuuucucaguggagggcaaaaguuguauaaaucguugcuuuuacgucgaacuaauccgcgguagaaaggaggaaaccgaggugcucuggacaagcaacuccauugucguguucugugggacuucuggcaccuauggaacaggcucguggcccgauggggccgacaucaaucugaugccuaucuga

SEQ ID NO: 143755 - RNA, 1410 nt, Artificial Sequence
  derived and/or modified CDS sequence (opt3) from neuraminidase__InfluenzaA__ABN51035
augaaccccaaucagaagaucauuaccauaggcagcgugucccugacaaucucuacuauuugcuucuuuaugcaaaucgccauucucaucacgaccgucacacuucacuucaaacaguacgaguuuaacucaccuccaaauaaccagguuaugcugugugaaccgacuauaaucgagagaaauauuaccgaaaucguguauuugacaaacaccacuauugagaaggaaaucugccccaaauuagcugaguacaggaauuggaguaagccucagugugacauaacaggguucgcaccauuuagcaaagauaacuccauucggcugucugccggaggugacaucuggguaacccgcgagcccuaugugucgugcgauccugacaaguguuaccaauucgcgcuaggccaggggacgacucucaauaacguccauucaaaugauaccgugcacgaccgaacaccauaucguacucugcuuaugaacgaacugggaguucccuuucauuugggcaccaaacaggugugcauugcuuggagcaguuccucuugucacgaugguaaggccuggcuccaugucugcgugacaggggacgauaagaaugcaaccgccagcuucaucuacaacggaagacugguagacuccguugugucauggaguaaagauauccugaggacgcaggagagcgaaugugucugcauuaauggcacuuguacaguggugaugaccgacggcucugcuuccgggaaggcagauacuaaaauacucuuuaucgaggagggaaagauuguccacacaucaaccuuaagcgguagugcccaacacguugaagagugcucuugcuauccucgguacccaggcgugcgcuguguaugcagagacaacuggaagggguccaacaggccgaucguggacauaaauauuaaaaacuacagcaucgucucgucuuauguguguuccggacugguuggcgauacgccccggaagaccgacucaaguagcuccucucauugccuugauccuaauaacgaagagggugggcacggagugaaaggcugggcuuucgacgauggcaaugacgucuggauggggcgcacaaucagcgaaaaguugcgacugggauacgagacuuuuaaagugauugaggguuggucaaacccaaauaguaagcuacagaucaacagacagguaauuguugauaggggcaaucgguccggguauagcggaauauucucuguggaaggcaaaucauguaucaaccguugcuuuuacgucgagcucauucgcgguagaaaggaagagaccgaagugcuguggacaaguaauagcaucgucguguucugugggacuuccggcaccuauggaacaggcucuuggcccgacggggccgauaucaaccuuaugccuauuuga

SEQ ID NO: 143756 - RNA, 1410 nt, Artificial Sequence; identical to SEQ ID NO: 143755
  derived and/or modified CDS sequence (opt3) from neuraminidase__InfluenzaA__ABN51046

SEQ ID NO: 143757 - RNA, 1413 nt, Artificial Sequence
  derived and/or modified CDS sequence (opt3) from neuraminidase__InfluenzaA__ABN51069
augaaccccaaucagaagaucauuaccauaggcagcaucuccauugccaucgggauuaucucucugauacuccaaaucggaaacauuaucucaauuugggcuagucacagcauccagacagguucccagaaucauacuggcauaugcaaccagagaauuaucacguacgaaaauucuaccugggugaaccaaacauaugucaauauuaacaauacuaacguuguggcagggaaagacaagaccucgaugacacuugccggaaauucaagccuguguccuaucaggggcugggcgaucuacaccaaagauaacaguauucggauagguuccaagggggacguauucgugauccgcgagccauuuauuucuugcagccacuuggagugucgaacuuucuuuuuaacacagggagcucugcuaaaugauaaacauuccaacggcaccgucaaggaccguucaccguauagagcccucaugaguugcccccugggcgaagcaccuagcccauacaauucuagguucgaguccguggccuggucagcuagcgcaugucacgaugggcuuggauggcugacgaucgguauaaguggccccgacaacggggccguugcuguguugaaguauaacggaauuaucacugaaaccaucaaaucuuggaagaaacggauucuccgcacacaggaguccgagugcgucuguaugaauggcagcugcuuuacuaucaugaccgaugguccuucgaacggggccgcgucuuacagaauuuucaagauagaaaaaggaagggugacaaaguccaucgagcuggacgcaccaaauuaucauuacgaagaguguucaugcuaccccgauaccggcacgguaauguguguuugccgggacaacuggcacggcaguaaucgcccuugggugagcuuuaaccagaaucuggauuaucaaauuggguacaucugcuccggagucuucggugacaacccacgaccgaaggauggcgaggggucuuguaaucccgugacuguggacggagccgacggcgucaaagguuuuagcuauagauacgggaacggcguuuggaucggaaggacaaagucaaaucggcuccguaaaggcuucgaaauggugugggauccuaacggguggaccgacacugauagugacuuuuccaugaagcaggauauuguagcuaugacagacuggagcggauauucugguucauucgugcagcacccagaguuaaccggccuggauugcaugcgccccuguuuuugggucgaacuugugagaggguugccuagggagaauacgaccauauggacaaguggaagcuccaucucuuucugcggcguuaacucggacacugccaauuggagcuggccagauggugcagaacugcccuucaccauugacaaauga

SEQ ID NO: 143758 - RNA, 1413 nt, Artificial Sequence
  derived and/or modified CDS sequence (opt3) from neuraminidase__InfluenzaA__ABN51080
augaaccccaaucagaagaucauuaccauaggcagcaucuccauugccaucgggauuaucucucugaugcuccaaauaggaaacaucauuucaaucugggcuagucacagcauucagacagguucccagaaucauacuggcgugugcaaccagagaaucauaacguacgaaaauucuaccugggucaaccacacauauguuaauauuaacaauacuaacgugaucgcagagaaagacaagaccucgguaacacuugccggaaauucaagccuguguaguauuuccggaugggcgaucuacaccaaagauaacucuaucaggauuggcagcaagggugacguguucgucauacgggagccuuuuaucuccugcucacauuuggaaugucgcacuuucuuuuuaacacaaggggcucugcuaaaugauaaacacaguaacggaaccgugaaggaccgaagcccauaucgugcccucaugucuugcccgcugggcgaggcacccuccccuuacaauucaaaguucgaaagcguugccuggagugcuucugcaugucaugauggcaugggguggcuuacgauuggaaucuccgguccagacaacggcgccguggcuguccugaaauauaacgggauaauuacugagaccaucaagagcuggaaaaagcagaucuugagaacacaggagucggaaugcguguguguaaauggaucuugcuuuacuauuaugaccgauggccccuccaacggugccgcgucauacaaaaucuucaagauugagaaggggaaaguuacaaagaguguggaacucaaugcaccuaacuuucacuaugaggaguguagcugcuacccagacaccggaacggucaugugugugugcagggauaauuggcacggcuccaaccggcccugggugucuuucaaucagaaccuggacuaccaaauaggcuauaucugcagcggggucuuuggagauaauccucgcccaaaagacggugaaggcucauguaacccgguuacuguggauggggccaauggaguaaagggcuucaguuacaaauaugguaacgggguguggauuggcagaacaaaguccaauaggcugcggaaaggauuugagaugaucugggaccccaacggcuggaccgacacugauagcgacuucucugucaagcaggaugugguugcuaucacagacuggucaggguacagugggagcuuugugcagcauccugaacucaccgguuuagauugcauucgcccauguuucugggucgagcuggugcgaggccuucccaaggaaaauacgaccauauggacauccgggucuucgaucagcuucugcggaguaaacuccgacacugccaacuggucauggccugauggcgcagaguugccauuuaccauugacaaauga

SEQ ID NO: 143759 - RNA, 1413 nt, Artificial Sequence; identical to SEQ ID NO: 142434
  derived and/or modified CDS sequence (opt3) from neuraminidase__InfluenzaA__ABN51091

SEQ ID NO: 143760 - RNA, 1410 nt, Artificial Sequence; identical to SEQ ID NO: 142143
  derived and/or modified CDS sequence (opt3) from neuraminidase__InfluenzaA__ABN51102

SEQ ID NO: 143761 - RNA, 1410 nt, Artificial Sequence; identical to SEQ ID NO: 142151
  derived and/or modified CDS sequence (opt3) from neuraminidase__InfluenzaA__ABN51113

SEQ ID NO: 143762 - RNA, 1410 nt, Artificial Sequence
  derived and/or modified CDS sequence (opt3) from neuraminidase__InfluenzaA__ABN51124
augaaccccaaucagaagaucauuaccauaggcagcgugucccugacaaucgccacugucugcuuccucaugcaaauugcuauccuuguuacgaccgugacacugcacuuuaaacaguacgagugugacucuccugcaucaaaccagguaaugccaugcgaaccgauuaucauagagagaaauaucacugaaauuguguauuugaacaauaccacaaucgagaaggaaauuugucccaaagucguggaguacaggaacuggaguaagccucagugccaaaucaccggguucgccccauuuagcaaagauaauuccauacgguuaucugcgggaggugacauuuggguuacucgcgagcccuaugugucgugugauccuggcaagugcuaccaguucgcucuggggcagggaacaacccuagacaacaagcauucaaaugauacgauccacgaccgagucccacaucguacucuccugaugaacgaacuuggcgugcccuuucaccuggguaccagacagguauguauugccuggagcaguuccucuugccaugaugggaaagcaugguugcacguuuguaucacaggagacgauaagaaugccacugcuagcuucaucuaugacggcaggcucguggauuccauuggcucauggagucaaaacauacugcggacccaggagagcgaaugcgucuguaucaaugggacaugcaccguggugaugacggacggaucugcauccggucgcgccgauacuaggauucuguuuaucgaggagggcaaaauaguccacauuucaccucucagcgggagugcucagcauguugaagagugcucuuguuacccaagguauccgggagugcggugcaucugucgcgacaacuggaagggcuccaaucgacccguaguggacaucaacauggaagauuacagcauugacucgucuuacgucugcuccgguuuagugggggauacaccuagaaacgacgauaggucaaguaauagcaacugucggaauccaaacaaugagcguggaaaccagggcguuaaaggcugggccuucgacaauggggaugacguguggaugggacgcaccaucuccaaggaucugagaucugguuaugaaacuuuuaaggucauuggcggguggagcacacccaacucaaaaagucaaauaaauagacaggugaucguagacuccgauaaccggagcggauacucuggcauuuucucaguugaggguaagaguugcaucaaucgauguuuuuauguggagcuuauccgcgggagaaaacaggaaaccagggucugguggacgagcaacuccauuguggucuucugcggcaccucuggaacauacggcacugggucguggccugacggagcgaauauaaacuuuaugccaaucuga

SEQ ID NO: 143763 - RNA, 1410 nt, Artificial Sequence; identical to SEQ ID NO: 142151
  derived and/or modified CDS sequence (opt3) from neuraminidase__InfluenzaA__ABN51135

SEQ ID NO: 143764 - RNA, 1413 nt, Artificial Sequence; identical to SEQ ID NO: 142444
  derived and/or modified CDS sequence (opt3) from neuraminidase__InfluenzaA__ABN51146

SEQ ID NO: 143765 - RNA, 1410 nt, Artificial Sequence
  derived and/or modified CDS sequence (opt3) from neuraminidase__InfluenzaA__ABN51157
augaaccccaaucagaagaucauuaccauaggcagcgugucccugacaaucgccacuauuugcuuccucaugcaaaucgcuauucuugucacgaccguuacacugcacuuuaaacaguacgaguguaacucuccuccaaauaaccaggugauguugugcgaaccgacuaucauagagagaaauaucaccgaaauuguauauuuaacaaacaccacuaucgagaaggaaauuugucccaaacuggcagaguacaggaauuggucaaagccucagugcaacaucacaggguucgccccauuuaguaaagacaauagcauacggcuauccgcgggaggugauauuugggugacccgcgagcccuaugucucuugugacccugauaagugcuaccaauucgcucucggccaggggacgacucugaacaauggacauucgaacgacaccgugcacgaucgaacaccauaucguacucuucugaugaaugaauugggcguucccuuucaucucgguaccagacagguguguaucgccuggucaagcaguuccugccacgacgggaaggcauggcugcaugucugugugacaggagaugacgagaacgccaccgcuucuuucauuuacaauggcaggcugguagauagcaucggcuccuggaguaaaaagauccuccggacgcaggaaucagagugcguuuguauuaacgggacuugcacaguggucaugaccgacggaagcgcaucugguaaagccgagacuaagauauuauuuaucgaagagggcaaaauugugcacaucuccacacugucagggagcgcucaacacguggaagagugcaguuguuauccucgcuacccaggagucagaugcguuuguagggauaacuggaagggcucuaaucggccgauaguggacauuaacguaaaggauuacuccaucgugagcucguaugucugcucuggucuugugggggacacccccaggaaaaaugacuccuucucaaguagccauuguuuggauccuaacaaugaagagggaggccacggcguuaaggggugggccuuugacgauggaaacgacguguggaugggucgaacgaucuccgagaaacugagaucuggcuacgaaaccuucaaggucauugagggguggagcaaaccaaauucaaagcuacagacaaaccgccaggugaucguagaacggggaaaucguaguggcuauuccgguauuuuuagcguugaggggaaaucuugcauaaaccgcuguuucuacguggaacucaucagaggcaggaaggaggagacugaagucugguggaccucaaauaguauuguggucuuuugcggaacaagcggcacuuaugggaccggauccuggcccgauggugcggacaucaaccugaugccuaucuga

SEQ ID NO: 143766 - RNA, 1410 nt, Artificial Sequence; identical to SEQ ID NO: 143754
  derived and/or modified CDS sequence (opt3) from neuraminidase__InfluenzaA__ABN59393

SEQ ID NO: 143767 - RNA, 1365 nt, Artificial Sequence
  derived and/or modified CDS sequence (opt3) from neuraminidase__InfluenzaA__ABN59415
augaaccccaaucagaagaucauuaccauaggcagcaucugccugguggucgggcucauuucccuuauccugcaaauuggaaacaucauaucuaucuggauuucacacaguauccagacagguagccagaaucauacuggcauuuguaaccagaauaucauaacguacaaaaacuccaccuggguuaaggacacaacuucugugauuuugaccggaaauucgucauuaugcccuaucagagggugggccauuuauagcaaagauaacaguaucaggaucggcuccaagggugacguauucgugauucgggagccauuuauaucuuguagccaccuggaaugccgcacauucuuucuaacccaaggggcucuccugaaugauaaacauuccucaggaacugucaaggaccgaaguccguaccgugcacuuaugagcugucccgugggcgaggccccuucuccauauaacuccagauucgaaucaguugcguggagcgcuagugccugccacgauggcaugggguggcugacaaucggaauuucuggucccgacaauggcgcaguggccgucuugaaguacaacgggaucauaaccgagacgauuaaauccuggaggaagaaaauccuccggacucaggaaagcgagugugcuugcgugaauggaucguguuuuaccaucaugacagauggcccuucugacggucuggcauccuauaagauuuucaaaaucgagaaggggaagguaacuaaaucaauugaacugaacgccccaaauagucauuacgaggaaugcagcuguuaucccgauaccggaaagguuaugugcgugugccgcgacaacuggcacggcuccaacagaccuugggucucuuuugaucagaaucucgacuaccagauaggcuacaucuguagcgggguguucggagauaacccaaggccggaggacgguacaggcucaugcgggcccguguaugucgacggagcuaauggcguuaaagguuuuaguuaccgguaugggaacggcguguggauuggacgcaccaagucccacagcucucgacauggcuucgagaugaucugggauccuaauggguggacggaaacugacucaaaauuuaguguaagacaagauguggucgccaugacagacuggagcggauacuccgguucuuucgugcagcacccagaguuaaccggccuggauuguaugaggcccugcuuuuggguugaacuuauccgggggcguccuaaggagaaaacuauuuggacaucggcgagcuccauaucauucuguggagugaacagugacaccgucgauuggucuuggccagacggcgcagaauugcccuucagcaucgauaaguga

SEQ ID NO: 143768 - RNA, 1413 nt, Artificial Sequence; identical to SEQ ID NO: 142999
  derived and/or modified CDS sequence (opt3) from neuraminidase__InfluenzaA__ABN59426

SEQ ID NO: 143769 - RNA, 1410 nt, Artificial Sequence; identical to SEQ ID NO: 142301
  derived and/or modified CDS sequence (opt3) from neuraminidase__InfluenzaA__ABO32659

SEQ ID NO: 143770 - RNA, 1410 nt, Artificial Sequence
  derived and/or modified CDS sequence (opt3) from neuraminidase__InfluenzaA__ABO32670
augaaccccaaucagaagaucauuaccauaggcagcgugucccugacaaucucuacuauuugcuucuuuaugcaaaucgccauucucgucacgaccguuacacuucacuucaaacaguacgaguguaacucaccuccaaauaaccaggugaugcugugcgaaccgacuaucauagagagaaauaucaccgaaauuguauauuugacaaacaccacuaucgagaaggaaauuugucccaaauuagcugaguacaggaauuggaguaagccucagugcaacaucacaggguuugcaccauucagcaaagacaauuccauacggcugucugccggaggugauauuugggugacccgcgagcccuaugucucgugugacccugauaagugcuaccaauuugcgcuaggccaggggacgacucucaacaauggacauucaaacgacaccgugcacgaucgaacaccauaucguacucugcuuaugaaugaacugggcguucccuuccauauggguaccaaacagguguguaucgcuuggagcaguuccucuugccacgacgggaaggccugguugcaugucugugugacaggagaugacgagaacgcaaccgccagcuuuauuuacaauggcagacucguagauuccaucggcucauggaguaagaaaauccugaggacgcaggaaagcgagugcguuuguauuaacgggacuugcacaguggucaugaccgacggaucugcuuccgguaaggcagauacuaaaauacuguucaucgaggaaggcaagauugugcacacaucaacccucagcgggagugcccaacacguggaggaaugcucuuguuauccucgguacccaggaguccgcugcguuuguagagacaacuggaagggcuccaauaggccgaucguggauauaaacauuaaagacuacagcaucguaucgucuuaugugugcuccgguuuagucggggacacgccccggaagaaugauucaaguagcuccucucauugucuggacccuaacaaugaggaaggaggccacggcgugaaagggugggcuuuugaugacggaaacgauguuuggaugggucgcaccaucagcgagaaacuucgaucaggcuacgagacauucaaggugauugaaggguggaguaagccaaauuccaaauugcagaucaacagacaggucauuguggacaggggaaaucggagcggcuauucugguauauuuucaguagaggggaagaguugcaucaaccguuguuucuacguugaacugauucgcggcagaaagcaggagacugaagugcuauggaccagcaauuccaucgucguguuuugcggaacaucuggcacuuaugggaccggaucguggcccgauggugccgacaucaaccucaugccuauuuga

SEQ ID NO: 143771 - RNA, 1413 nt, Artificial Sequence; identical to SEQ ID NO: 143622
  derived and/or modified CDS sequence (opt3) from neuraminidase__InfluenzaA__ABO32681

SEQ ID NO: 143772 - RNA, 1410 nt, Artificial Sequence
  derived and/or modified CDS sequence (opt3) from neuraminidase__InfluenzaA__ABO32695
augaaccccaaucagaagaucauuaccauaggcagcgugucccugacaaucucuacuauuugcuucuuuaugcaaaucgccauucucaucacgaccgucacacuucacuucaaacaguacgaguuuaacucaccuccaaauaaccagguuaugcugugugaaccgacuauaaucgagagaaauauuaccgaaaucguguauuugacaaacaccacuauugagaaggaaaucugccccaaauuagcugaguacaggaauuggaguaagccucaguguaacauaacaggguucgcaccauuuagcaaagacaauuccauucggcugucugccggaggugauaucuggguaacccgcgagcccuaugugucgugcgacccugauaaguguuaccaauucgcgcuaggccaggggacgacucucaacaauguccauucaaacgacaccgugcacgaucgaacaccauaucguacucugcuuaugaaugaacugggaguucccuuucauuugggcaccaaacaggugugcauugcuuggagcaguuccucuugucacgacgguaaggccuggcuccaugucugcgugacaggggaugacaagaacgcaaccgccagcuucaucuacaauggaagacugguagauuccaucguuucauggaguaaagagauucugaggacgcaggaaagcgagugugugugcauaaacggcacuuguacagucgugaugaccgacggcucugcuuccgggaaggcagauacuaaaauccucuuuauugaggaaggaaagaucgugcacacaucaaccuuaagcgguagugcccaacacgucgaggaaugcucuugcuauccucgguacccaggcguucgcugugugugcagagacaacuggaagggguccaauaggccgauaguagauauuaacaucaaagacuacagcaucgugucgucuuaugucuguuccggacuggugggcgacacgccccggaagaaugauucaaguagcuccucucauugcagcgacccuaacaaugaggaaggugggcacggaguuaaaggcugggcuuucgaugacggcaacgauguguggauggggcgcaccauuucagagaaacuucgaaguggauacgagacauuuaaggucaucgaagguugguccaauccaaacagcaaguugcagauuaauagacaggugauaguagacaggggcaaccggucuggguauucaggaaucuucaguguugagggcaaaagcuguauuaaucguugcuuuuacguggaacugauccgcgguagaaaggaggaaacugagguccuauggaccuccaacucuaucguggucuucugugggacaucgggcacuuauggaaccggcagcuggcccgauggggccgacauuaaucucaugccuauauga

SEQ ID NO: 143773 - RNA, 1410 nt, Artificial Sequence; identical to SEQ ID NO: 142778
  derived and/or modified CDS sequence (opt3) from neuraminidase__InfluenzaA__ABO32754

SEQ ID NO: 143774 - RNA, 1410 nt, Artificial Sequence; identical to SEQ ID NO: 142778
  derived and/or modified CDS sequence (opt3) from neuraminidase__InfluenzaA__ABO32765

SEQ ID NO: 143775 - RNA, 1410 nt, Artificial Sequence; identical to SEQ ID NO: 143650
  derived and/or modified CDS sequence (opt3) from neuraminidase__InfluenzaA__ABO32778

SEQ ID NO: 143776 - RNA, 1410 nt, Artificial Sequence
  derived and/or modified CDS sequence (opt3) from neuraminidase__InfluenzaA__ABO32793
augaaccccaaucagaagaucauuaccauaggcagcgugucccugacaaucucuacuauuugcuucuuuaugcaaaucgucauucucaucacgaccguuacacuucacuucaaacaguacgaguuuaacucaccuccaaauaaccaggugaugcugugugaaccgacuauaaucgagagaaauauuaccgaaaucguauauuugacaaacaccacuauugagaaggaaaucugccccaaauuagccgaguacaggaauuggaguaagccucagugugacauaacaggguucgcuccauuuagcaaagauaacuccauucggcugucugcaggaggugacaucugggugacccgcgagcccuaugucucgugcgauccugacaaguguuaccaauucgcccuaggccaggggacgacucucaauaacgugcauucaaaugauaccguucacgaccgaacaccauaucguacucugcuuaugaacgaacugggagugcccuuucauuugggcaccaagcaggucugcauugcguggagcaguuccucuugucacgaugguaaagcauggcuccaugugugcguaacaggggacgauaagaaugccaccgcuagcuucaucuacaacggaagacugguugacuccaucgugucauggaguaaagagauucugaggacgcaggaaagcgagugugucugcauaaauggcacuuguacaguggugaugaccgauggcucugccuccgggaagacugacacaaaaauccucuuuauugaggaaggaaagaucguccacaccucaacguuaagcgguagugcucaacacguugaggaaugcucuugcuauccucgguacccaggcgugcgcuguguaugcagagauaacuggaagggguccaacaggccgauaguggacauuaauaucaaagacuacagcaucgucucgucuuauguguguuccggacugguuggcgauacaccccggaagaacgacucaaguagcuccucucauugccuugauccuaauaacgaggaaggugggcacggagugaaaggcugggcauucgacgauggcaaugacgucuggauggggcgcaccauuagcgagaaguugcgaucaggauacgagacuuuuaaagugaucgaagguuggaguaacccaaauuccaagcugcagauuaacagacagguaauaguugauaggggcaaucggagcggguauucuggaaucuucucaguggagggcaaaaguuguauuaaccguugcuuuuacgucgaacuaauccgcgguagaaaggaggaaaccgaggugcucuggacaagcaauuccaucgucguguucugugggacuucuggcaccuauggaacaggcucguggcccgacggggccgauauuaaccugaugccuauauga

SEQ ID NO: 143777 - RNA, 1410 nt, Artificial Sequence; identical to SEQ ID NO: 142375
  derived and/or modified CDS sequence (opt3) from neuraminidase__InfluenzaA__ABO32806

SEQ ID NO: 143778 - RNA, 1410 nt, Artificial Sequence; identical to SEQ ID NO: 142762
  derived and/or modified CDS sequence (opt3) from neuraminidase__InfluenzaA__ABO32819

SEQ ID NO: 143779 - RNA, 1410 nt, Artificial Sequence; identical to SEQ ID NO: 142394
  derived and/or modified CDS sequence (opt3) from neuraminidase__InfluenzaA__ABO32830

SEQ ID NO: 143780 - RNA, 1410 nt, Artificial Sequence; identical to SEQ ID NO: 142760
  derived and/or modified CDS sequence (opt3) from neuraminidase__InfluenzaA__ABO32841

SEQ ID NO: 143781 - RNA, 1410 nt, Artificial Sequence; identical to SEQ ID NO: 142760
  derived and/or modified CDS sequence (opt3) from neuraminidase__InfluenzaA__ABO32852

SEQ ID NO: 143782 - RNA, 1410 nt, Artificial Sequence; identical to SEQ ID NO: 142760
  derived and/or modified CDS sequence (opt3) from neuraminidase__InfluenzaA__ABO32863

SEQ ID NO: 143783 - RNA, 1410 nt, Artificial Sequence; identical to SEQ ID NO: 143754
  derived and/or modified CDS sequence (opt3) from neuraminidase__InfluenzaA__ABO32874

SEQ ID NO: 143784 - RNA, 1410 nt, Artificial Sequence; identical to SEQ ID NO: 143754
  derived and/or modified CDS sequence (opt3) from neuraminidase__InfluenzaA__ABO32885

SEQ ID NO: 143785 - RNA, 1410 nt, Artificial Sequence; identical to SEQ ID NO: 143755
  derived and/or modified CDS sequence (opt3) from neuraminidase__InfluenzaA__ABO32896

SEQ ID NO: 143786 - RNA, 1410 nt, Artificial Sequence; identical to SEQ ID NO: 143755
  derived and/or modified CDS sequence (opt3) from neuraminidase__InfluenzaA__ABO32907

SEQ ID NO: 143787 - RNA, 1410 nt, Artificial Sequence
  derived and/or modified CDS sequence (opt3) from neuraminidase__InfluenzaA__ABO32918
augaaccccaaucagaagaucauuaccauaggcagcgugucccugacaaucucuacuauuugcuucuuuaugcaaaucgccauucucaucacgaccgucacacuucacuucaaacaguacgaguuuaacucaccuccaaauaaccagguuaugcugugugaaccgacuauaaucgagagaaauauuaccgaaaucguguauuugacaaacaccacuauugagaaggaaacaugccccaaauuagcugaguacaggaauuggaguaagccucaguguaacaucaccggguucgcaccauuuagcaaagacaauuccauacggcugucugccggaggugauauuuggguaacgcgcgagcccuaugugucgugcgacccugauaaguguuaccaauucgcgcuaggccaggggacuacccucaacaauguccauucaaacgacacagugcacgaucgaacuccauaucguacccugcuuaugaaugaacugggaguucccuuucauuugggcacaaaacaggugugcaucgcuuggagcaguuccucuugucacgacgguaaggccuggcuccaugucugcgugaccggggaugacaagaacgcaacggccagcuucauuuacaauggaagacugguagauuccaucguuucauggaguaaagagauccugaggacucaggaaagcgagugugugugcauuaacggcacauguaccgucgugaugacugacggcucugcuuccgggaaggcagauacaaaaauacucuuuaucgaggaaggaaagauugugcacaccucaacguuaagcgguagugcccaacacgucgaggaaugcucuugcuauccucgguacccaggcguucgcugugugugcagagacaacuggaagggguccaauaggccgaucguagauauaaacauuaaagacuacagcaucgugucgucuuaugucuguuccggacuggugggcgacacaccccggaagaaugauucaaguagcuccucucauugccuugacccuaacaaugaggaaggugggcacggaguuaaaggcugggcuuucgaugacggcaacgauguguggauggggcgcaccaucagcgagaaguugcgaucaggauacgagacuuuuaaagucauugaagguuggaguaauuccaacagcaagcugcagaccaauagacaggugaucguagacaggggcaaccggucuggguauucaggaauuuucaguguugagggcaaaagcuguauaaaucguugcuuuuacguggaacuaauccgcgguagaaaggaggaaacagagguccucuggacuuccaacucuauuguggucuucugugggaccucgggcacauauggaaccggcagcuggccagauggggccgacaucaaucugaugcccaucuga

SEQ ID NO: 143788 - RNA, 1410 nt, Artificial Sequence; identical to SEQ ID NO: 143787
  derived and/or modified CDS sequence (opt3) from neuraminidase__InfluenzaA__ABO32929

SEQ ID NO: 143789 - RNA, 1410 nt, Artificial Sequence; identical to SEQ ID NO: 143787
  derived and/or modified CDS sequence (opt3) from neuraminidase__InfluenzaA__ABO32940

SEQ ID NO: 143790 - RNA, 1413 nt, Artificial Sequence
  derived and/or modified CDS sequence (opt3) from neuraminidase__InfluenzaA__ABO32951
augaaccccaaucagaagaucauuaccauaggcagcaucuccauugccaucgggauuaucucucugaugcuccaaauaggaaacaucauuucaaucugggcuagucacagcauucagacagguucccagaaucauacuggcgugugcaaccagagaaucauaacguacgaaaauucuaccugggucaaccacacauauguuaauauuaacaauacuaacgugaucgcagggaaagacaagaccucgguaacacuugccggaaauucaagccuguguaguauuuccggcugggcgaucuacaccaaagauaacucuaucaggauugguagcaagggggacguguucgucauacgggagccuuuuaucuccugcucacauuuggagugucgcacuuucuuuuuaacacaaggagcucugcuaaaugauaaacacaguaacggcaccgugaaggaccgaagcccauaucgugcccucaugucuugcccgcugggcgaagcacccuccccuuacaauucaaaguucgagagcguugccuggagugcuucugcaugucaugaugggaugggauggcuuacgauugguaucuccggcccagacaacggggccguggcuguccugaaauauaacggaauaauuacugaaaccaucaagagcuggaaaaagcagaucuugagaacacaggagucggagugcguguguguaaauggcucuugcuuuacuauuaugaccgauggucccuccaacggggccgcgucauacaaaaucuucaagauugaaaagggaaaaguuacaaagaguauagagcucaaugcaccuaacuuucacuaugaagaguguagcugcuacccagacaccggcacggugaugugugucugcagggauaauuggcacggcuccaaccggcccugggugucuuucaaucagaaccuggacuaccaaaucggguauauuugcagcggaguguuuggugauaauccucgcccaaaagacggcgaggggucauguaacccggucacuguugauggagccaauggcgugaaggguuucaguuacaaauaugggaacggcguauggaucggaagaacaaaguccaauaggcugcggaaaggcuuugaaaugaucugggaccccaacggguggaccgacacugauagcgacuucucugugaagcaggaugucguggcuauuacagacuggucaggauacagugguagcuuuguucagcauccugagcucaccggcuuagauugcauacgcccauguuucuggguggaacugguccgagggcuucccagagagaauacgaccaucuggacauccggaucuucgauuagcuucugcggcgugaacuccgacacugccaacuggucauggccugauggugcagaauugccauuuaccaucgacaaguga

SEQ ID NO: 143791 - RNA, 1413 nt, Artificial Sequence
  derived and/or modified CDS sequence (opt3) from neuraminidase__InfluenzaA__ABO32962
augaaccccaaucagaagaucauuaccauaggcagcaucuccauugccaucgggauuaucucucugaugcuccaaauaggaaacaucauuucaaucugggcuagucacagcauucagacagguuccaaaaaucauacuggcgugugcaaccagagaaucauaacguacgaaaauucuaccugggucaaccacacauauguuaauauuaacaauacuaacgugguagcagggaaggacaaaaccucggugacacuugccggaaauucaagccuguguaguaucuccggcugggcgauuuacaccaaggauaacucuaucaggaucgguagcaaaggggacgucuucgugauucgggagccuuuuauauccugcucacauuuggagugucgcacuuucuuuuuaacacagggagcucugcuaaaugauaagcacaguaacggcaccguuaaggaccgaagcccauaucgugcccucaugucuugcccgcugggcgaagcacccuccccuuacaauucaaaauucgagagcguggccuggagugcuaacgcaugucaugaugggaugggauggcuuacgaucgguauuucuggcccagacaacggggccgucgcugugcugaaguauaauggaaucauaacugaaaccauuaaauccuggaagaaacaaaucuugagaacacaggagagcgagugcguauguguuaacggcucgugcuuuacuaucaugaccgauggucccucuaauggggccgcguccuacaagauuuucaagaucaaaaagggaaaagugacaaagucaauugaacucaacgcaccuaauuuucacuaugaggaauguaguugcuacccagacaccggcacggucaugugugugugcagggauaacuggcacggcagcaaucggcccuggguguccuucaaccagaaucuggacuaccagauaggguauaucugcucuggagucuuuggugauaacccucgcccaaaagacggcgaggggagcuguaauccgguuacuguggauggagccaacggcguaaaggguuucucauacaaauaugggaauggcguguggauuggaagaacaaagaguaacaggcugcggaagggcuuugagaugaucugggaccccaauggguggaccgacacugauuccgacuucagcguccgccaagaugugguugcuaucacagacuggucuggauacucagguaguuuugugcagcauccugaacucaccggcuuagauugcauucgaccauguuucugggucgagcuggugagagggcuucccagggaaaacacgaccauauggacaagcggauccucuaucucguucugcggcguaaacagcgacacugccaauugguccuggccugauggugcagaguugccauuuaccauugacaaauga

SEQ ID NO: 143792 - RNA, 1413 nt, Artificial Sequence; identical to SEQ ID NO: 142434
  derived and/or modified CDS sequence (opt3) from neuraminidase__InfluenzaA__ABO32973

SEQ ID NO: 143793 - RNA, 1413 nt, Artificial Sequence; identical to SEQ ID NO: 142999
  derived and/or modified CDS sequence (opt3) from neuraminidase__InfluenzaA__ABO32984

SEQ ID NO: 143794 - RNA, 1413 nt, Artificial Sequence; identical to SEQ ID NO: 142999
  derived and/or modified CDS sequence (opt3) from neuraminidase__InfluenzaA__ABO32995

SEQ ID NO: 143795 - RNA, 1413 nt, Artificial Sequence
  derived and/or modified CDS sequence (opt3) from neuraminidase__InfluenzaA__ABO33009
augaaccccaaucagaagaucauuaccauaggcagcaucugcauggccauugggaugaucucccugauucuccaaaucggaaacauaaucucuauuugggugucacacaguauccagacagguagccagaaucauacuggcauuuguaaccagagaaucauaacguacgaaaauuccaccugggucaaccaaacauauguuaauauuucuaacacuaaugugguagcugggaaagacaccacaucgaugacccuugcaggaaacucaagccugugcccuaucaggggcugggccauuuacaguaaggauaauuccauccggaucgguucuaaaggggacguguucgucauucgcgaaccauuuauaagcuguucccacuuggagugccgaacuuucuuuuuaacacagggagcgcugcuaaacgauaagcauucaaauggcaccgugaaagaccguaguccguauagagcucucaugagcugucccaucggcgaagccccuucuccauacaacuccagguucgagucaguugcauggagcgccagugcuugccacgaugggaugggauggcugacgauugguaucucuggccccgacgauggggcaguggccguccuuaaguauaauggaauaauuacugaaaccaucaaguccuggcggaaacagauccugcgcacacaggagagcgagugugugugcguaaacggcucguguuuuacuauuaugaccgacgguccuucugaugggccagcuuccuacagaaucuucaagauugaaaaaggaaagauaacaaaaucaaucgaguuggacgcccccaacagucauuaugaagagugcagcuguuacccugauaccggcacgguuaugugcgugugcagggacaauuggcacggcuccaaccggccaugggucucuuuuaaucaaaaccucgauuaccagauuggguauaucuguagcggaguguucggugacaauccgcgccccaaggacggcaaggggucaugcgauccugugaacgucgacggagcggauggcguuaaagguuuuaguuaccgauaugggaauggcguguggaucggaagaacuaaguccaacagcucuaggaaaggcuucgagaugauuugggacccaaauggguggacagauaccgacucaaacuuucugguaaagcaggauguggucgcaaugacugacuggaguggauacagcgguuccuucgugcagcaccccgaacugacaggccucgauuguaugcggccuugcuuuuggguugaguuaauacgugggcgcccaagagagaaaaccacgaucuggaccucuggaucgagcauuuccuucuguggcgucaauucagacacagugaacuggaguuggcccgauggugccgagcugccguucacuaucgacaaguga

SEQ ID NO: 143796 - RNA, 1410 nt, Artificial Sequence; identical to SEQ ID NO: 143566
  derived and/or modified CDS sequence (opt3) from neuraminidase__InfluenzaA__ABO33039

SEQ ID NO: 143797 - RNA, 1410 nt, Artificial Sequence
  derived and/or modified CDS sequence (opt3) from neuraminidase__InfluenzaA__ABO33050
augaaccccaaucagaagaucauuaccauaggcagcgugucccugacaaucgccacuauuugcuuccucaugcaaaucgcuauucuugucacgaccguuacacugcacuuuaaacaguacgaguguaacucuccuccaaauaaccaggugauguugugcgaaccgacuaucauagagagaaauaucaccgaaauuguauauuuaacaaacaccacuaucgagaaggaaauuugucccaaacuggcagaguacaggaauuggucaaagccucagugcaacaucacaggguucgccccauuuaguaaagacaauagcauacggcuauccgcgggaggugauauuugggugacccgcgagcccuaugucucuugugacccugauaagugcuaccaauucgcucucggccaggggacgacucugaacaauggacauucgaacgacaccgugcacgaucgaacaccauaucguacucuucugaugaaugaauugggcguucccuuucaucucgguaccaaacagguguguaucgccuggucaagcaguuccugccacgacgggaaggcauggcugcaugucugugugacaggagaugacgagaacgccaccgcuucuuucauuuacaauggcagacugguagauagcaucggcuccuggucaaagaaaauccucaggacgcaggaaagugagugcguuuguauuaacgggacuugcacaguggucaugaccgacggaagcgcaucugguaaggccgauacuaaaauauuauuuaucgaggaaggcaagauugugcacacauccccucugucagggagcgcucaacacguggaggaaugcaguuguuauccacgguacccgggaguccgcugcguuuguagagacaacuggaagggcucuaauaggcccaucguggauauaaacguaaaagacuacuccauugugagcucguaugucugcucuggucuugugggggacaccccucggaagaaugauuccucaaguagcucccauuguuuggacccaaacaaugaggaaggaggccacggcguuaaagggugggccuucgaugacggaaacgauguguggaugggucgcacgaucucugagaagcugcgaagcggcuacgagaccuuuaaagucaucgaaggguggucaaagcccaauaguaaacuacagauuaacagacaggugaucguagacaggggaaaucgguccggcuauagcgguauuuucucuguugaggggaagucaugcauaaaccguuguuuuuacguggaacucauccgcggcagaaagcaggagacagaaguccuguggaccaguaauagcauuguggucuucugcggaacuuccggcacauaugggacuggaucuuggccugauggugcggacaucaaccuuaugccaaucuga

SEQ ID NO: 143798 - RNA, 1410 nt, Artificial Sequence; identical to SEQ ID NO: 142778
  derived and/or modified CDS sequence (opt3) from neuraminidase__InfluenzaA__ABO33061

SEQ ID NO: 143799 - RNA, 1410 nt, Artificial Sequence
  derived and/or modified CDS sequence (opt3) from neuraminidase__InfluenzaA__ABO33072
augaaccccaaucagaagaucauuaccauaggcagcgugucccugacaaucgccacuauuugcuuccucaugcaaaucgcuauucuugucacgaccguuacacugcacuuuaaacaguacgagugugggucuccugcaaacaaucaggugaugccaugcgaaccgaucauaaucgagagaaacauuacugaaaucguauauuugaccaauacaaccauugagaaggaaaucugucccaaauuaguggaguacaggaacuggucaaagccucagugcaaaauaacuggauucgccccauuuaguaaggacaauagcauucggcuguccgcggguggcgauaucugggucacacgcgagcccuaugugucuugugacccugggaagugcuaccaauucgcucuaggacagggcaccacgcucgauaacaaacauucgaaugacacuauucacgaucgaaccccacaucguacacugcuuaugaacgaacuggguguucccuuucacuuggggacuagacagguguguaucgccuggucaagcaguuccugccaugacggaaaggcauggcuccacgucugugugaccggcuaugauaaaaaugccacagcuucuuucaucuacgacggcaggcugguagauagcauuggguccuggucaaagaacauacugcggacccaggagagugaaugcguuuguaucaauggaacgugcacuguggucaugacagacgguagcgcaucugagcgcgccgauaccaaaauucucuuuaucgaggaaggcaagauagugcacauuuccccuuuaucagggagcgcucaacauguggaggaaugcaguuguuauccaagauacccgggagucaggugcguuugucgggacaacuggaagggcucuaaucgccccgugguagauaucaacgugaaagacuacuccaucgucagcucguaugugugcucuggucugguuggggacacuccucgaaagaacgauagauccucaaguagcuacuguaggaauccaaacaaugagaaaggaaaccacggcgugaagggcugggccuucgacgaugggaaugacgucuggaugggacggacaauuuccgaagagucucguagcgguuaugagaccuuuaaagugaucggcggguggucaacgcccaacaguaaacuucagauuaaucgccagguaauaguugauuccgacaacagaagcggauacucuggcaucuucucaguggaagguaagaguugcauuaauagguguuuuuaugucgaguugauccgggggcgagaacaggagacccgcgugugguggacaagcaacuccaucgucguguucugcggcacuucuggaaccuacggcacagggucguggccugauggagcggacauuaaucugaugccaauauga

SEQ ID NO: 143800 - RNA, 1413 nt, Artificial Sequence; identical to SEQ ID NO: 143107
  derived and/or modified CDS sequence (opt3) from neuraminidase__InfluenzaA__ABO37991

SEQ ID NO: 143801 - RNA, 1413 nt, Artificial Sequence
  derived and/or modified CDS sequence (opt3) from neuraminidase__InfluenzaA__ABO38013
augaaccccaaucagaagaucauuaccauaggcagcaucuccauugccaucgggauuaucucucugauacuccaaaucggaaacauuaucucaauuugggcuagucacagcauccagacagguucccagaaucauacuggcauaugcaaccagagaauuaucacguacgaaaauucuaccugggugaaccaaacauaugucaauauuaacaauacuaacguuguggcagggaaagacaagaccucgaugacacuugccggaaauucaagccuguguccuaucaggggcugggcgaucuacaccaaagauaacaguauucggauagguuccaagggggacguauucgugauccgcgagccauuuauuucuugcagccacuuggagugucgaacuuucuuuuuaacacagggagcucugcuaaaugauaaacauuccaacggcaccgucaaggaccguucaccguauagagcccucaugaguugcccccugggcgaagcaccuagcccauacaauucuagguucgaguccguggccuggucagcuagcgcaugucacgaugggcuuggauggcugacgaucgguauaaguggccccgacaacggggccguugcuguguugaaguauaacggaauuaucacugaaaccaucaaaucuuggaagaaacggauucuccgcacacaggaguccgagugcgucuguaugaauggcagcugcuuuacuaucaugaccgaugguccuucgaacggggccgcgucuuacagaauuuucaagauagaaaaaggaagggugacaaaguccaucgagcuggacgcaccaaauuaucauuacgaagaguguucaugcuaccccgauaccggcacgguaauguguguuugccgggacaacuggcacggcaguaaucgcccuugggugagcuuuaaccagaaucuggauuaucaaauuggguacaucugcuccggagucuucggugacaacccacgaccgaaggauggcgaggggucuuguaaucccgugacuguggacggagccgacggcgucaaagguuuuagcuauagauacgggaacggcguuuggaucggaaggacaaagucaaaucggcuccguaaaggcuaugaaaugauuugggauccuaacggguggaccgacacugauagugacuucuccaugaagcaggauauaguggcuaugacagacuggagcggauacucugguucauuuguacagcacccagaguuaaccggccuggauugcaugcgccccuguuucuggguggaacuugucagaggguugccuagggagaauacgaccaucuggacaaguggaagcuccauuucuuuuugcggcgugaacucggacacugccaauuggagcuggccagauggugcagaacugcccuucaccaucgacaaauga

SEQ ID NO: 143802 - RNA, 1413 nt, Artificial Sequence
  derived and/or modified CDS sequence (opt3) from neuraminidase__InfluenzaA__ABO38024
augaaccccaaucagaagaucauuaccauaggcagcaucuccauugccaucgggauuaucucucugaugcuccaaauaggaaacaucauuucaaucugggcuagucacagcauucagacagguucccagaaucauacuggcaucugcaaccagagaauaauuacguacgagaauaacaccugggugaaucacacauaugucaacaucaauaacacuaauauuguugcagggaaagacaagaccucugugacacuugccggaaacucgucacuguguagcaucaguggcugggcgaucuacaccaaagauaauuccauuaggauagguucuaagggggacguauucgugauccgggaaccuuuuauuagcugcucccauuuggagugucgcacuuucuuuuuaacacaaggagcucugcuaaacgauaaacacucaaauggcaccgucaaggaccgaaguccauaucgugcccucaugagcugcccgcugggcgaagcacccucuccuuacaacuccaaguucgagucaguggccuggagcgcuagugcaugucaugaugggaugggauggcuuacgaucgguauaucuggcccagacaacggggccguugcugugcugaaauauaauggaauuaucacugaaaccaucaaguccuggaaaaagagaauuuugaggacacaggagagcgagugcgucugugugaacggcucgugcuuuacuaucaugaccgauggucccucuaauggggccgcguccuacaaaauuuucaagauagaaaagggaaaaguaacaaagucaaucgagcucaacgcaccuaauuuucacuaugaagaguguaguugcuacccagacaccggcacgguuaugugugugugccgggauaacuggcacggcagcaaucgccccugggucuccuucaaccagaaucuggacuaccagauuggguauaucugcucuggaguguuuggugauaacccuagaccaaaagacggcgaggggagcuguaauccggugacugucgauggagccgacggcguuaaggguuucucauacaaauaugggaacggcguguggaucggaaggacaaagaguaaucggcugcgcaaaggcuuugaaaugguaugggaccccaacggguggaccgauacugacuccgauuucagcgugaagcaagacgucguggcuauuacagauuggucuggauacucagguaguuuuguucagcauccugagcucaccggcuuagacugcauacgaccauguuucuggguggaacuggucagagggcuucccagggagaauacgaccaucuggacaagcggauccucuauuucguucugcggcgugaacagcgauacugccaacugguccuggccugacggugcagaauugccauuuaccaucgauaaguga

SEQ ID NO: 143803 - RNA, 1413 nt, Artificial Sequence
  derived and/or modified CDS sequence (opt3) from neuraminidase__InfluenzaA__ABO38035
augaaccccaaucagaagaucauuaccauaggcagcaucuccauugccaucgggauuaucucucugaugcuccaaauaggaaacaucauuucaaucugggcuagucacagcauucagacagguucccagaaucauacuggcacgugcaaccagagaaucauaaccuacgaaaauucuacaugggugaaccacacuuaugucaauauuaacaauaccaacguuguggcagggaaagacaagacaucgguaacccuugccggaaauucaagccuguguaguaucuccggcugggcgauuuacacuaaagauaacucuaucaggaucgguagcaagggggacguguucgucauucgggagccuuuuauauccugcucacauuuggagugucgcacauucuuuuuaacccaaggagcucugcuaaaugauaaacacaguaacggcacggugaaggaccgaagcccauaucgugcccucaugucuugcccgcugggcgaagcacccuccccuuacaauucaaaguucgagagcguugccuggagugcuucugcaugucaugaugggaugggauggcuuacuaucgguauuuccggcccagacaacggggccguggcuguccugaaauauaacggaaucauaaccgaaacaauuaagagcuggaaaaagagaaucuugaggacucaggagucggagugcguguguguaaauggcucuugcuuuaccaucaugacagauggucccuccaacggggccgcgucauacaaaauuuucaagaucgaaaagggaaaaguuaccaagaguauugagcucaaugcaccuaacuuucacuaugaagaguguagcugcuacccagacacgggcacugugaugugugucugccgggauaauuggcacggcuccaaccgccccugggugucuuucaaucagaaccuggacuaccagauaggguauaucugcagcggaguguuuggugauaauccuagaccaaaagacggcgaggggucauguaacccggucacaguugauggagccgacggcgugaaggguuucaguuacaaauaugggaauggcguauggauuggaaggaccaaguccaaccggcugcgcaaaggcuuugaagugaucugggaccccaauggguggacugauacagacagcgauuucucugucaagcaagacgugguugcuaucaccgauuggucaggauacagugguagcuuugugcagcauccugagcucacgggcuuagacugcauucgaccauguuucugggucgaacuggugagagggaugcccagggagaacaccacaauauggacuuccggaucuucgaucagcuucugcggcguaaauuccgauaccgccaacuggucauggccugacggugcagaacuuccauuuacaauugauaaguga

SEQ ID NO: 143804 - RNA, 1413 nt, Artificial Sequence; identical to SEQ ID NO: 142444
  derived and/or modified CDS sequence (opt3) from neuraminidase__InfluenzaA__ABO38046

SEQ ID NO: 143805 - RNA, 1413 nt, Artificial Sequence; identical to SEQ ID NO: 142999
  derived and/or modified CDS sequence (opt3) from neuraminidase__InfluenzaA__ABO38068

SEQ ID NO: 143806 - RNA, 1410 nt, Artificial Sequence; identical to SEQ ID NO: 142375
  derived and/or modified CDS sequence (opt3) from neuraminidase__InfluenzaA__ABO38079

SEQ ID NO: 143807 - RNA, 1410 nt, Artificial Sequence
  derived and/or modified CDS sequence (opt3) from neuraminidase__InfluenzaA__ABO38090
augaaccccaaucagaagaucauuaccauaggcagcgugucccugacaaucgccacuauuugcuuccucaugcaaaucgcuauucuugucacgaccguuacacugcacuuuaaacaguacgaguguaacucuccuccaaauaaccaggugauguugugcgaaccgacuaucauagagagaaauaucaccgaaauuguauauuuaacaaacaccacuaucgagaaggaaauuugucccaaacuggcagaguacaggaauuggucaaagccucagugcaacaucacaggguucgccccauuuaguaaagacaauagcauacggcuauccgcgggaggugauauuugggugacccgcgagcccuaugucucuugugacccugauaagugcuaccaauucgcucucggccaggggacgacucugaacaauggacauucgaacgacaccgugcacgaacgaacaccauaucguacucuucugaugaaugaguugggcguucccuuucaucucgguaccaaacagguguguaucgccuggucaagcaguuccugccacgaugggaaggcauggcugcaugucugugugacaggagacgaugaaaacgccaccgcuucuuucauuuacaauggcagacugguagacagcaucggcuccuggucaaagaaaauccucaggacgcaggagagugagugcguuuguauuaacgggacuugcacaguggucaugaccgauggaagcgcaucugguaaggccgacacuaaaauauuauuuaucgaagagggcaagauugugcacacaucccugcuuucagggagcgcucaacacguggaagagugcaguuguuauccucgguacccaggaguccgcugcguuuguagagauaacuggaagggcucuaauaggccgaucguggacauaaacguaaaagauuacuccauugugagcucguaugucugcucugguuuggugggggacacuccccggaagaaugacuccucaaguagcucccauugucuggauccuaacaaugaagagggaggccacggcguuaaagggugggccuucgacgauggaaacgacguguggaugggucgcacgaucucugagaagcuacgaagcggcuacgaaaccuuuaaagucaucgagggguggucaaagccaaauaguaaacuccagauuaacagacaggugaucguagauaggggaaaucgguccggcuauagcgguauuuucucuguugaagggaagucaugcauaaaccguuguuuuuacguggagcugauccgcggcagaaagcaggaaacagagguccuuuggaccaguaauagcauuguggucuucugcggaaccuccggcacauaugggacuggaucuuggcccgacggugcggauaucaaccugaugccuaucuga

SEQ ID NO: 143808 - RNA, 1410 nt, Artificial Sequence
  derived and/or modified CDS sequence (opt3) from neuraminidase__InfluenzaA__ABO38101
augaaccccaaucagaagaucauuaccauaggcagcgugucccugacaaucgccacugucugcuuccucaugcaaauugcuauccuugcaacgaccguuacacugcacuuuaaacagcaugagugugacucuccugccucaaaccaggugaugccaugcgaaccgauuaucauagagagaaauaucacugaaauuguauacuugaacaauaccacaaucgagaaggaaauuugucccgagguggucgaguauaggaacuggaguaaaccucagugccaaaucaccggguucgcgccauuuagcaaggauaauuccauacgguuaucugcuggaggugacauuugggugacucgcgaacccuacguuucgugugauccuggcaaaugcuaucaguucgcccuggggcagggaacaacccuagacaacaagcacucaaauggcacgauccaugaucguauuccacaccgaacucuccugaugaacgagcuuggugugcccuuucaucuggggaccaagcaggucuguguggcauggagcaguuccucuugccacgacggaaaagccugguugcacguauguguuacaggcgaugacagaaaugcuacugccagcuucaucuacgauggcaggcucguggacuccaucgggucauggagucaaaacauucugcggacccaggaaagcgagugcgucuguauaaauggaacaugcaccguggugaugacggaugguucugcauccggccgcgcugacacuagaauccuguuuauuaaggaggggaaaaucguccauauaucaccucucagcggaagugcccagcacauugaagagugcucuuguuauccaagguacccggauguucggugcaucugucgcgacaacuggaagggcuccaaucgacccgugaucgacauuaacauggaagauuauagcaucgacucgucuuacguaugcuccgguuuagugggggauacaccuagaaacgacgauucaaguagcaauuccaacuguagggacccaaauaacgagcggggaaaucccggcgucaaaggcugggcguucgauaacggggacgauguguggaugggacguaccauuaauaaggacucucgcagcgguuacgaaacuuuuaagguuauaggcggguggucaacaccuaacaguaaaucccaggugaauagacaagucaucguggauaacaauaacuggagcggauauucuggcauuuucucaguagaggguaagaguugcaucaauagguguuuuuacguugagcugauccgggggcgaccacaggaaacccgcgugugguggacgagcaacuccauugucguguucugcggcaccucuggaacauauggcacugggucguggcccgacggagcaaauauaaacuuuaugccgaucuga

SEQ ID NO: 143809 - RNA, 1410 nt, Artificial Sequence
  derived and/or modified CDS sequence (opt3) from neuraminidase__InfluenzaA__ABO38233
augaaccccaaucagaagaucauuaccauaggcagcgugucccugacaaucgccacuauuugcuuccucaugcaaaucgcuauucuugucacgaccguuacacugcacuuuaaacaguacgagugugacucuccugcaaacaaucaggugaugccaugcgaaccgaucauaaucgagagaaacauuacugaaaucguauauuugaccaauacaaccauugagaaggaaaucugucccaaauuaguggaguacaggaacuggucaaagccucagugcaaaauaacuggguucgccccauuuaguaaggauaauagcauucggcuguccgcgggaggugacaucugggucacacgcgagcccuaugugucuugugauccuggcaagugcuaccaauucgcucuagggcagggaaccacgcucgacaacaaacauucgaaugauacuauucacgaccgaaccccacaucguacacugcuuaugaacgaacugggcguucccuuucacuuggguacuagacagguguguaucgccuggucaagcaguuccugccaugaugggaaggcauggcuccacgucugugugaccggauaugacaaaaaugccacagcuucuuucaucuacgauggcaggcugguagacagcauuggcuccuggucaaagaacauacugcggacccaggagagugaaugcguuuguaucaaugggacgugcacuguggucaugacagauggaagcgcaucugagcgcgccgacaccaaaauucucuuuaucgaggaagguaagauagugcacauuuccccuuuaucaggcagcgcucaacauguggaggaaugcaguuguuauccaagauacccgggggucaggugcguuugucgggauaacuggaagggaucuaaucgccccgugguagacaucaacgugaaagacuacuccaucgccagcucguaugucugcucuggccuggugggugauacuccucgaaagaacgacagauacuccucaaguuauuguaggaauccaaacaaugagaaagggaaccacggaguuaagggcugggcguucgaugacggcaaugauguguggauggggcggacaauuagcgacgaaucccguucuggauacgagaccuuuaaagucaucgguggcuggagcacgcccaacucaaaacuucagauuaaucgccaggugauaguagauagugacaacagauccggguauagcggaaucuucucuguugagggcaagucaugcauuaauagguguuuuuacguggaauugauccggggucgagagcaggaaacccgcgucugguggacaaguaacagcaucguggucuucugcgggacuuccggcaccuauggaacaggcucuuggccugauggggcagacauuaaucugaugccaauauga

SEQ ID NO: 143810 - RNA, 1410 nt, Artificial Sequence; identical to SEQ ID NO: 143159
  derived and/or modified CDS sequence (opt3) from neuraminidase__InfluenzaA__ABO38244

SEQ ID NO: 143811 - RNA, 1410 nt, Artificial Sequence; identical to SEQ ID NO: 142375
  derived and/or modified CDS sequence (opt3) from neuraminidase__InfluenzaA__ABO38255

SEQ ID NO: 143812 - RNA, 1410 nt, Artificial Sequence; identical to SEQ ID NO: 142760
  derived and/or modified CDS sequence (opt3) from neuraminidase__InfluenzaA__ABO38277

SEQ ID NO: 143813 - RNA, 1410 nt, Artificial Sequence; identical to SEQ ID NO: 143787
  derived and/or modified CDS sequence (opt3) from neuraminidase__InfluenzaA__ABO38288

SEQ ID NO: 143814 - RNA, 1410 nt, Artificial Sequence
  derived and/or modified CDS sequence (opt3) from neuraminidase__InfluenzaA__ABO38299
augaaccccaaucagaagaucauuaccauaggcagcgugucccugacaaucgccacugucugcuucauuaugcaaaucgcuauucucgcaacgaccguuacacuucacuuuaaacagcaugagugugacucuccugccucaaaccaggugaugccaugcgaaccgaucauaaucgagagaaauauuacugaaaucguauaccugaacaauaccacaauugagaaggaaaucugucccgaggcgguggaguauaggaacuggaguaaaccucagugccaaauaaccggguucgcuccauuuagcaaggauaauuccauucgguugucugccggaggugacaucugggucacucgcgaacccuacgugucgugugauccuggcaaaugcuaucaguucgcauuagggcagggaacaacccuggacaacaagcacucaaauggcacgauucaugaucgaaucccacaccguacucuacucaugaacgagcuggguguucccuuucaucuugggaccaaacaggugugugucgccuggagcaguuccucuugccacgacggaaaggcuuggcugcacguguguguaacaggcgaugacagaaaugcaacugccagcuucaucuacgauggcagguugguugacuccauugggucauggagucaaaacauacuccggacccaggaaagcgagugcguguguaucaauggaacaugcaccgucgugaugacggaugguucugcuuccggccgcgccgacacuaggauucuguuuaucaaggaggggaaaauagugcauauuucaccucugagcggaagugcgcagcacgucgaagagugcucuuguuauccaagauacccggauguucggugcacaugucgcgacaacuggaagggcuccaaucgacccgugaucgacaucaacauggaagauuauagcauugacucgucuuacguaugcuccggucucgugggggauaccccuagaaacgacgauucaaguagcaauuccaacuguagggacccaaauaacgagcggggaaaucccggcgucaaaggcugggcauucgauaacggggacgauguguggaugggacguacuaucaauaaggacucucgcagcgguuacgaaacauuuaagguuauuggcggguggucaaccccuaacaguaaaucccaggugaauagacaagucauaguggauaacaauaacuggagcggauauucuggcaucuucucaguagaggguaagaguugcauuaauagguguuuuuacguugaguuaauccgggggcgaccacaggaaacgcgcgugugguggaccagcaacuccaucgucguguucugcggcacaucuggaacuuauggcaccgggucguggcccgacggagccaauauuaacuuuaugccgauauga

SEQ ID NO: 143815 - RNA, 1410 nt, Artificial Sequence
  derived and/or modified CDS sequence (opt3) from neuraminidase__InfluenzaA__ABO38310
augaaccccaaucagaagaucauuaccauaggcagcgugucccugacaaucgccacugucugcuuccucaugcaaauugcuauccuugcaacgaccguuacacugcacuuuaaacagcaugagugugacucuccuacuucaaaccaggugaugccaugcgaaccgauuaucauagagagaaauaucaccgaaauuguauacuugaacaauacaaccaucgagaaggaaauuugucccgagguggucgaguauaggaacuggaguaaaccucagugccaaaucacuggguucgccccauuuagcaaggauaauuccauacgguuaucugcgggaggugacauuugggugacacgcgaacccuacguuucgugugauccuggcaaaugcuaucaguucgcucuggggcagggaaccacgcuagacaacaagcacucaaauggcacuauccaugaucguauuccacaccgaacccuccugaugaacgagcuuggugugcccuuucaucuggggacaaagcaggucuguguggccuggagcaguuccucuugccacgacggaaaagcaugguugcacguauguguuacuggcgaugacagaaaugccaccgcuagcuucaucuacgauggcaggcucguggacuccaucgggucauggagucaaaacauucugcggacacaggaaagcgagugcgucuguauaaauggaaccugcacgguggugaugacugaugguucugcauccggccgcgccgacacaagaauccuguuuauuaaggaggggaaaaucguccauauaucaccucucagcggaagugcucagcacauugaagagugcucuuguuauccaagguacccggauguucggugcaucugucgcgacaacuggaagggcuccaaucgacccgugaucgacauuaacauggaagauuauagcaucgacucgucuuacguaugcuccgguuuagugggggauaccccuagaaacggagacucaaguagcaauuccaacuguagggauccaaauaacgagcggggcaaucccggcgucaaagggugggccuucgacaacggagaugacguguggaugggucguacuauuaauaaggaaucucgcagcggcuacgagacauuuaagguuauagggggauggucaaccccuaacaguaaaucccaggugaauagacaagucaucguggauaacaauaacuggagcggcuauucugguauuuucucaguagaggggaagaguugcaucaauagguguuuuuacguugaacugauccggggccgaccacaggagacgcgcgugugguggaccagcaacuccauugucguguucugcggaacaucuggcacuuaugggaccggaucguggcccgacggugcgaauauaaacuuuaugccgaucuga

SEQ ID NO: 143816 - RNA, 1413 nt, Artificial Sequence; identical to SEQ ID NO: 142978
  derived and/or modified CDS sequence (opt3) from neuraminidase__InfluenzaA__ABO38332

SEQ ID NO: 143817 - RNA, 1413 nt, Artificial Sequence
  derived and/or modified CDS sequence (opt3) from neuraminidase__InfluenzaA__ABO38343
augaaccccaaucagaagaucauuaccauaggcagcaucugcaugacaauugggaucauuucccugauccuccaaauaggaaacaucauuucuaucugggugucacacaguauucagacugguagccagaaucauacgggcaucuguaaccagagaauaauuaccuacgaaaauuccacaugggucaaccaaacuuauguuaauaucaacaauaccaacgugguagccgggaaagacacaaccucugugacucuugcuggaaauucgucacugugcccuauuaggggcugggcaaucuacagcaaggauaacaguauccggauugguuccaaaggggacgucuucgugauacgcgagccauuuaucucuuguagccacuuggagugccgaacauucuuuuuaacccagggagcccugcuaaaugauaagcauuccaacggcacgguuaaagaccguucaccguauagagcgcucaugaguugucccauuggcgaagcuccuagcccauacaauucuagguucgaguccguggccuggucagcaagcgccugccacgaugggaugggauggcugacuaucgguauaaguggccccgacgauggggcugucgcagugcuuaaguauaacggaauuaucaccgaaacaaucaagucuuggcggaaacgcauucugagaacucaggaguccgaguguguaugcguuaacggcagcuguuuuaccaucaugacagacgguccuucgaaugggccagccucuuacaggauuuucaagauagaaaaaggaaagaucaccaaauccauugaguuggaugcucccaacucacauuaugaagagugcaguuguuacccugacacgggcacugugaugugcgucugccgggauaauuggcacggcagcaaccgcccauggguguccuuuaaucagaaccucgacuaccaaaucggguauaucuguucuggaguguucggugauaauccgcgacccaaggacggcaaggggagcugcgacccugucacaguugauggagccgacggcgugaaagguuuuucauacagauaugggaacggcguauggauuggaaggaccaagaguaauuccagccggaaaggcuucgagaugauaugggauccaaacggguggacugacacagauucuaauuuucuggugaagcaggacgucguggcgaugaccgauuggucaggauacagugguagcuucguucagcaccccgaacugacgggccucgacuguaugcguccuugcuuuuggguggaguuaguccgcgggagaccaagggaaggaaccacaguguggacuuccgguucuucgaucagcuucuguggcguaaacuccgauaccgcaaauuggucauggcccgacggggccgagcugccguucacaauugauaaauga

SEQ ID NO: 143818 - RNA, 1410 nt, Artificial Sequence
  derived and/or modified CDS sequence (opt3) from neuraminidase__InfluenzaA__ABO38354
augaaccccaaucagaagaucauuaccauaggcagcaucugcaugguggucgggauuaucucccugauucuccaaaucggaaacauaaucucuauuuggaucucacacaguauucagacagguagccagaaucauacuggcaucuguaaccagaauauaauuacguacaaaaacuccaccuggguuaaucaaacauaugugaacaucucuaauacuaacguaguggccgggcaggacaccacaucggucauucuuaccggaaauucaagccugugcccuaucagaggcugggcuaucuacaguaaggauaacuccauuaggauagguucuaaaggggacguguucguuauccgggagccauuuauuagcuguucccacuuggaaugccgcacuuucuuuuuaacacagggagcacugcuaaaugaucgacauucaaacggcaccgugaaggaccguaguccguauagagcccucaugagcugucccgucggcgaggcgccuucuccauacaauuccagguucgaaucaguggcuuggagcgccagugcaugccacgaugggaugggauggcugacgaucgguauaucuggccccgacaacggggccguagcuguucuuaaauauaacggaauuaucacugagaccaucaaguccuggcggaagaaaauucugcgcacacaggaaagcgagugugcaugcgugaauggcucguguuuuacuaucaugaccgaugguccuucuaacggguuggccuccuacaagauuuucaaaauagagaagggaaaagucacaaagucaaucgaacucaaugcuccaaacagucauuaugaggaaugcagcuguuaccccgacaccggcaaggugaugugcgugugcagagauaauuggcacggcuccaacaggccuugggucucuuuugaccaaaaucuggauuaccagauuggguauaucuguagcggaguuuucggugacaacccacggccgaaagauggcacggggucaugcggacccguguacguagacggcgccaauggugugaagggguuuaguuaucgcuacggcaacggagucuggaucggccgaacuaaauccaauagcucuagacacggguucgagaugauuugggacccuaacggauggacagagaccgauucaaaguuuagugugaggcaggacguuguggcgaugacugauuggagcgguuauuccggcucuuucguccagcauccagaacugacagggcucgacuguaugcggcccugcuuuuggguggaguuaauacguggacgcccuaaagaaaauaccaucuggacgucgggcagcuccauuucauucugugguguaaacagugauaccguugacuggucuuggccagauggggcagagcugcccuucacaaucgacaaguga

SEQ ID NO: 143819 - RNA, 1413 nt, Artificial Sequence
  derived and/or modified CDS sequence (opt3) from neuraminidase__InfluenzaA__ABO38365
augaaccccaaucagaagaucauuaccauaggcagcaucugcauggccauugggaucauuucccugauccuccaaaugggaaacauaaucucuauuugggugucacacaguauccagacagguagccagaaucauacuggcauuuguaaccagagaaucauaacguacgaaaauuccaccugggucaaccaaacauauguuaauauuaacaauacuaacgugguagcugggaaagacaccacaucugugacccuugcaggaaauucgucacugugcccuaucaggggcugggccauuuacagcaaggauaacaguauccggaucgguuccaaaggggacgucuucgugauucgcgaaccauuuauaucuuguagccacuuggagugccgaacuuucuuuuuaacacagggagcgcugcuaaaugauaagcauuccaacggcaccguuaaagaccguucaccguauagagcucucaugaguugucccaucggcgaagccccuagcccauacaauucuagguucgaguccguggcauggucagccagcgcuugccacgaugggaugggauggcugacgauugguaucaguggccccgacgauggggcagucgccgugcuuaaguauaacggaauaauuacugaaaccaucaagucuuggcggaaacgcauccugagaacacaggaguccgaguguguaugcguuaacggcagcuguuuuacuauuaugaccgacgguccuucgaaugggccagcuucuuacaggaucuucaagauugaaaaaggaaagauaacaaaauccaucgaguuggaugcccccaacucacauuaugaagagugcaguuguuacccugacaccggcacggugaugugcgucugccgggauaauuggcacggcagcaaccgcccauggguguccuuuaaucagaaccucgacuaccaaauuggguauaucuguucuggaguguucggugauaauccgcgacccaaggacggcaaggggagcugcgacccugucacuguugauggagcggacggcgugaaagguuuuucauacagauaugggaacggcguauggaucggaaggacaaagaguaauuccagccggaaaggcuucgagaugauuugggauccaaacggguggaccgacacugauucuaauuuucuggugaagcaggacgucguggcaaugacagauuggucaggauacagugguagcuucguucagcaccccgaacugaccggccucgacuguaugcguccuugcuuuuggguggaguuaauacgcgggagaccaagggagaaaacgaccaucuggacauccggaucuucgauuagcuucuguggcgucaacuccgauacugccaauuggucauggcccgacggugcugagcugccguucaccaucgauaaguga

SEQ ID NO: 143820 - RNA, 1410 nt, Artificial Sequence
  derived and/or modified CDS sequence (opt3) from neuraminidase__InfluenzaA__ABO38376
augaaccccaaucagaagaucauuaccauaggcagcaucugcaugguggucgggauuaucucccugauucuccaaaucggaaacauaaucucuauuuggaucucacacaguauucagacagguagccagaaucauacuggcacguguaaccaguccaucauaaccuacaaaaauucuacauggguuaaccaaacuuaugugaauauuucgaacaccaauguaguggccgggaaggacacaaccucagucauccuugcuggaaacagcagucugugcccuauuagaggcugggcaaucuacuccaaagauaauggugugaggaucgggucuaagggagacguuuucgugauucgggagccauuuauaagcuguucccacuuggaaugccgcacuuucuuuuuaacacagggcgcccugcuaaacgauaaacauucaaauggcaccgucaaggaccgaaguccguaucgugcgcucaugagcugucccgugggggaggcuccuucuccauacaacuccagauucgaaucaguagccuggagcgcaagugccugccacgauggaauggguuggcugacgaucggcauuucugggcccgacgauggagcuguugcagugcuuaaguauaauggcaucauaacugagaccauuaaauccuggaggaaggaaauccugcggacacaggagagcgagugugccugcgucaacgguucguguuuuacuaucaugaccgacgggccuucuggaggcccagcuuccuacaaaauuuucaagaucgaaaaaggcaaggugacaaagucaauugaguuggaugcccccaacagucauuaugaagagugcagcuguuacccugacaccgggaaagugaugugcgucugccgcgauaauuggcacggauccaacagaccauggguuucuuuugaccagaaucucgauuaccaaauggguuauauauguagcggcguguucggggacaacccgaggcccaaggacggaaaaggcaauugcgguccuguauacguggauggggcgaacggcgucaagggauuuucauaucgguacggcaaugggguguggaucggacgcacgaaaaguaacuccagccgacaggguuucgagaugauuugggacccaaauggcuggacugaaacagauucuaacuuuuucguuaagcaggacguggucgcagugaccgauuggucaggguauaguggauccuuuguacagcaccccgagcugacuggccuggacuguaugagaccuugcuucuggguugaacucaucaggggucggccaaaagagaagacaaucuggaccuccgggucuucgauuagcuucuguggcgugaauagcgauacggucgacuggucauggcccgauggagccgaauuaccguuuaccauagacaaguga

SEQ ID NO: 143821 - RNA, 1410 nt, Artificial Sequence
  derived and/or modified CDS sequence (opt3) from neuraminidase__InfluenzaA__ABO38387
augaaccccaaucagaagaucauuaccauaggcagcaucugcaugguggucgggauuaucucccugauucuccaaaucggaaacauaaucucuauuuggaucucacacaguauucagacagguagccagaaucauacuggcaucuguaaccaguccauaauuacguacaaaaauucuaccuggguuaaccaaacauaugugaauaucucgaacacuaauguaguggccgggcaggacaccacaucagucauucuuaccggaaacagcagucugugcccuaucagaggcugggcuaucuacuccaaggauaaugguauuaggauagggucuaaaggagacguguucguuauccgggagccauuuauuagcuguucccacuuggaaugccgcacuuucuuuuuaacacagggcgcacugcuaaacgauaagcauucaaauggcaccgugaaagaccgaaguccguaucgugcccucaugagcugucccgucggggaggcgccuucuccauacaacuccagauucgaaucaguggcuuggagcgccagugcaugccacgauggaauggguuggcugacgaucggcauaucugggcccgacaaugaggccguagcuguucuuaaguauaacggaauuaucacugaaaccaucaaguccuggaggaaaaagauucugcggacacaggagagcgagugugcaugcgugaacggcucguguuuuacuaucaugaccgaugguccuucugacggguuggccuccuacaaaauuuucaagauagaaaaaggaaaggucacaaagucaaucgagcucaaugcuccaaacagucauuaugaagagugcagcuguuaccccgauaccggcaaagugaugugcgugugccgcgacaauuggcacggcuccaacagaccuugggucucuuuugaucaaaaucuggacuaccagauuggguauaucuguagcggaguuuucggugauaacccaaggccgaaggacggcacggggucaugcggacccguguacguagacggcgccaauggugugaaaggguuuaguuaucgguacggcaacggagucuggaucggccgcacuaaguccacaagcucucgacacggguucgagaugauuugggauccuaauggauggaccgaaacugacucaaaauuuagugugagacaggauguuguggcgaugacagacuggagcgguuauuccggcucuuucguccagcauccagagcugaccgggcucgauuguaugaggcccugcuuuuggguggaauuaauacggggacaaccuaaggagaaaacgaucuggaccucgggcagcuccauuucauucugugguguaaacagugacacaguugauuggucuuggccagacggggcagaacugcccuucacuaucgauaaguga

SEQ ID NO: 143822 - RNA, 1413 nt, Artificial Sequence
  derived and/or modified CDS sequence (opt3) from neuraminidase__InfluenzaA__ABO38398
augaaccccaaucagaagaucauuaccauaggcagcaucugcauggccauugggaucauuucccugauccuccaaauaggaaacaucgugucuauuuggaucucacacaguauucagacagguagccagaauuacacuggcaucuguaaccagagaauaauuacguaugaaaauuccaccugggucaaccaaacauacguuaauaucaacaauacuaacgugguagcugggcaggacaccacaucuguggcacuugccggaaauucgucacugugcccuauuagcggcugggcgaucuauaguaaagauaacuccaucaggauugguucuaagggggacgucuucgugauacgggagccauuuaucagcuguucccauuuggagugccgcaauuucuuuuuaacccagggagcucugcuaaacgauaaacacucaaauggcacuguuaaggaccgaaguccguaccgugcccucaugagcugucccauuggcgaagcaccuucuccauauaacuccagauucgagucaguggccuggagcgcuagugcaugccaugaugggaugggauggcugacaaucgguauaucuggccccgacgauggggccgucgcugugcuuaaauacaacggaauuaucaccgaaacgaucaaguccuggaggaagcggauucugcgcacucaggagagcgaguguguaugcguuaauggcucguguuuuaccaucaugacagacgguccuaacaaugggccagccucuuauaaaauuuucaagauagaaaaaggaaagaucacuaaauccauugaguuggaugcgcccaacucacacuacgaagagugcaguuguuacccugacgcaggcaccgugaugugcgucugcagagauaauuggcauggcagcaacaggccauggguguccuuuaaucaaaaccucgacuaucagaucggguacaucuguucuggaguguucggugauaauccgcggcccaaggacggcaaggggagcugcgacccugucacaguugauggagccgacggcgugaaagguuuuucauaucgcuacgggaacggcguauggauuggacgaaccaagaguaauuccagcagaaggggcuucgagaugauaugggauccaaacggguggacggacacugauucuaaauuucuggugaagcaggacgucguggcuaugacagauuggucaggauauagugguagcuucguucagcaccccgaacugaccggccucgacuguaugcggccuugcuuuuggguggaguuaauccgugggcgcccaagagaaaauacuacaauuuggaccuccggaucuucgaucagcuucuguggcgucaacggugauacggccaauugguccuggcccgacggggcagagcugccguucaccauugauaaauga

SEQ ID NO: 143823 - RNA, 1410 nt, Artificial Sequence; identical to SEQ ID NO: 142301
  derived and/or modified CDS sequence (opt3) from neuraminidase__InfluenzaA__ABO38420

SEQ ID NO: 143824 - RNA, 1410 nt, Artificial Sequence
  derived and/or modified CDS sequence (opt3) from neuraminidase__InfluenzaA__ABO38715
augaaccccaaucagaagaucauuaccauaggcagcgugucccugacaaucgccacugucugcuuccucaugcaaauugcuauccuuguuacgaccgugacacugcacuuuaaacagcaugagugugacucuccugcaucaaaccagguaaugccaugcgaaccgauuaucauagagagaaauaucacugaaauuguguacuugaacaauaccacaaucgagaaggaaaccugucccaaagucguggaguauaggaguuggagcaagccucagugcaaaauuacuggguucgccccauuuuccaaggauaacucuauccgguuaucggcgggaggugacauauggguuacacgcgagcccuacgugucaugugauccuggcaagugcuaucaauucgcucuggggcagggaaccacgcuagacaauaaacacagcaacgauacuauucaugaccgaaucccacaccguacccuccugaugaaugaacuuggcguccccuuucaucuggguacaagacagguguguauugccuggaguuccucuagcugccacgaugggaaggcaugguugcacguauguguuacuggagacgauaaaaacgccaccgcuuccuucaucuacgacggcaggcucguggauucaaucggcaguuggagccagaauauucugcggacacaagagucugaaugcgucuguauaaacgggaccugcacgguggugaugacugacggauccgcaucaggucgcgccgauacaagaauccuguuuauugaggagggcaagaucguccauauaagcccucucagugggucugcucagcacguugaagagugcuccuguuauccaagguacccggacgugcggugcauuugucgcgacaauuggaaaggaagcaaccgacccaucguagauaucaauauggaagacuauucgauugauucuuccuacgugugcucaggcuuagucggugacaccccuagaaacgaugacaggaguagcaacuccaauugucggaacccaaauaacgagcgugggaaucagggagugaagggcugggccuucgauaacggcgacgauguuuggauggggcgcacuaucucuaaggaccugagaagcggauacgaaacauuuaaagugauugguggcuggucaacccccaauaguaagucccagauaaacaggcaagucaucguggauagcgacaaucggucuggguauucaggaauuuucaguguagagggcaaaagcugcaucaaccgauguuuuuacguugagcuuauccgcgguagaaagcaggaaacgagggugugguggaccuccaauucuauugucguguucugcgggacaucgggcacuuauggaaccggcagcuggccugacggggcgaacauaaauuuuaugccaaucuga

SEQ ID NO: 143825 - RNA, 1410 nt, Artificial Sequence; identical to SEQ ID NO: 143824
  derived and/or modified CDS sequence (opt3) from neuraminidase__InfluenzaA__ABO38726

SEQ ID NO: 143826 - RNA, 1413 nt, Artificial Sequence
  derived and/or modified CDS sequence (opt3) from neuraminidase__InfluenzaA__ABO44049
augaaccccaaucagaagaucauuaccauaggcagcaucuccauugccaucgggauuaucucucugaugcuccaaauaggaaacaucauuucaaucugggcuagucacagcauucagacagguucccagaaucauacuggcaucugcaaccagagaauaauuacguacgaaaauucuaccugggugaaccacacauaugucaauaucaacaauacuaacguuguggcagggaaagacaagaccucgguaacacuugccggaaauucaagccuguguaguauuuccggcugggcgaucuacaccaaagauaacucuaucaggauugguagcaagggggacguguucgucauacgggagccuuuuaucuccugcucacauuuggagugucgcacuuucuuuuuaacacaaggagcucugcuaaaugauaaacacaguaacggcaccgugaaggaccgaagcccauaucgugcccucaugucuugcccgcugggcgaagcacccuccccuuacaauucaaaguucgagagcguugccuggagugcuucugcaugucaugaugggaugggauggcuuacgauugguaucuccggcccagacaacggggccguggcuguccugaaauauaacggaauaauuacugaaaccaucaagagcuggaaaaagagaaucuugaggacacaggagucggagugcguguguguaaauggcucuugcuuuacuauuaugaccgauggucccuccaacggggccgcgucauacaaaaucuucaagauugaaaagggaaaaguuacaaagaguauagagcucaaugcaccuaacuuucacuaugaagaguguagcugcuacccagacaccggcacggugaucugugucugccgggauaauuggcacggcuccaaccgccccugggugucuuucaaucagaaccuggacuaccagauuggguauaucugcagcggaguguuuggugauaauccuagaccaaaagacggcgaggggucauguaacccggucacuguugauggagccgacggcgugaaggguuucaguuacaaauaugggaauggcguauggaucggaaggacaaaguccaaccggcugcgcaaaggcuuugaaaugauuugggaccccaauggguggaccgauacugacagcaacuucucugugaagcaagaugucguggcuauaacagacuggucaggauacagugguagcuuuguucagcauccugagcucaccggcuuagauugcauccgaccauguuucuggguggaacuggucagagggcuucccagggagaauacgaccauuuggacauccggaucuucgaucagcuucugcggcgugaacuccgacacugccaacuggucauggccugauggugcagaauugccauuuaccauugacaaguga

SEQ ID NO: 143827 - RNA, 1410 nt, Artificial Sequence
  derived and/or modified CDS sequence (opt3) from neuraminidase__InfluenzaA__ABO44060
augaaccccaaucagaagaucauuaccauaggcagcgugucccugacaaucgccacugucugcuuccucaugcaaauugcuauccuuguuacgaccgugacacugcacuuuaaacagcaugagugugacucuccugcaucaaaccagguaaugccaugcgaaccgauuaucauagagagaaauaucacugaaauuguguacuugaacaauaccacaaucgagaaggaaauuugucccaaagucguggaguauaggaacuggaguaagccucagugcaaaaucaccggguucgccccauuuagcaaggauaauuccauacgguuaucugcgggaggugacauuuggguuacucgcgagcccuacgugucgugugauccuggcaagugcuaucaauucgcucuggggcagggaacaacccuagacaacaaacacucaaaugauacgauccaugaccguauuccacaccgaacucuccugaugaacgaacuuggcguccccuuucaucuggguaccagacagguguguaucgccuggagcaguuccucuugccacgaugggaaggcaugguugcacguauguguuacaggagacgauaaaaaugccacugcuagcuucaucuacgacggcaggcucguggauuccauuggcucauggagucagaacauacugcggacccaagagagcgaaugcgucuguaucaaugggacaugcaccguggugaugacggacggaucugcauccggucgcgccgauacuaagauucuguuuaucgaggagggcaaaauaguccauauuucaccucucagcgggagugcucagcacguugaagagugcucuuguuauccaagauacccggacgugaggugcaucugucgggacaacuggaagggauccaaucgccccguaguggauaucaacauggaagacuauagcauugauucgucuuacgucugcuccggcuuagugggugacacaccucgaaacgaugacagaucaaguaauagcaacuguaggaauccaaacaaugagcgggggaaccagggaguuaagggcugggccuucgauaauggcgacgauguguggauggggcguaccaucuccaaagaccugcgcucuggauacgaaacuuuuaaggucauugguggcuggagcacacccaacucaaaaagucagauaaauagacaagugaucguagauuccgacaacaggagcggguauucuggaauuuucucaguugagggcaagaguugcaucaaucgguguuuuuacguggagcuuauccgaggucgcaaacaggaaaccagagucugguggacgagcaacuccauuguggucuucugcgggaccucuggcacauauggaacuggcucguggccugacggggcgaauauaaacuugaugccaaucuga

SEQ ID NO: 143828 - RNA, 1410 nt, Artificial Sequence
  derived and/or modified CDS sequence (opt3) from neuraminidase__InfluenzaA__ABO44071
augaaccccaaucagaagaucauuaccauaggcuucguguuucugacaaucgccacugucugcuuccucaugcaaauugcuauccuuguuacgaccgugacacugcacuuuaaacaguacgagugugacagcccugcauccaaccagguaaugccaugcgaaccgauuaucauagagagaaauaucacugaaauuguguauuugaacaauaccacaaucgagaaggaaauuugucccaaagucguggaguacaggaacuggucuaagccucagugccaaaucaccggguucgccccauuuucaaaagauaauaguauacgguuaagcgcgggaggugacauuuggguuacucgcgagcccuauguguccugugaucauggcaagugcuaccaguucgcucuggggcagggaacaacccuagacaacaagcacucuaaugauacgauccaugaccguauuccucaccgaacucuccugaugaacgaacuuggcgucccauuucaucuggguaccagacagguguguaucgccuggucgucaagcaguugccacgaugggaaagcaugguugcacguauguaucacaggagacgauaagaaugccacugcuuccuucauuuaugacggcaggcucguugauucuauaggcagcuggucccaaaacauccugcggacccaggagucagaaugcguguguauuaaugggacaugcaccgucgugaugacggacggaagugcaagcggucgcgccgauacuagaauccuguuuauagaggagggcaaaauugugcauaucucuccccucuccgggucagcucagcacgucgaagagugcagcuguuacccuagguauccaggaguucggugcaucugucgcgacaacuggaagggcaguaaucgaccggugguagacauuaacauggaagauuacucuaucgacuccagcuacgugugcucggguuuagucggggauacacccagaaacgacgauaggucuuccaauucaaacuguaaaaauccuaacaaugagcggggaaaccagggcgugaagggcugggccuucgacaauggggaugacguuuggaugggacguaccauuaguaaggaucugcgcagcgguuaugaaacuuuuaaagugauaggcgggugguccacaccaaacucuaagagccaaaucaauagacaggucauuguggacucagauaacaggaguggauacuccggcaucuucagcguagaggguaaaucuugcaucaaucgguguuuuuauguugagcuuauucgagggcgcaagcaggaaaccagagugugguggacgucaaacaguauagucguguucugcggcaccagcggaacauacggcacuggguccuggcccgacggagcgaauaucaacuucaugccuauuuga

SEQ ID NO: 143829 - RNA, 1410 nt, Artificial Sequence; identical to SEQ ID NO: 142394
  derived and/or modified CDS sequence (opt3) from neuraminidase__InfluenzaA__ABO44082

SEQ ID NO: 143830 - RNA, 1410 nt, Artificial Sequence
  derived and/or modified CDS sequence (opt3) from neuraminidase__InfluenzaA__ABO44093
augaaccccaaucagaagaucauuaccauaggcagcgugucccugacaaucgccacugucugcuuccucaugcaaauugcuauccuugcaacgaccguuacacugcacuuuaaacagcaugagugugacucuccugccucaaaccaggugaugccaugcgaaccgauuaucauagagagaaauaucacugaaauuguauacuugaacaauaccacaaucgagaaggaaauuugucccgagguggucgaguauaggaacuggaguaaaccucagugccaaaucaccggguucgcgccauuuagcaaggauaauuccauacgguuaucugcuggaggugacauuugggugacucgcgaacccuacguuucgugugauccuggcaaaugcuaucaguucgcccuggggcagggaacaacccuagacaacaagcacucaaauggcacgauccaugaucguauuccacaccgaacucuccugaugaacgagcuuggugugcccuuucaucuggggaccaagcaggucuguguggcauggagcaguuccucuugccacgacggaaaagccugguugcacguauguguuacaggcgaugacagaaaugcuacugccagcuucaucuacgauggcaggcucguggacuccaucgggucauggagucaaaacauucugcggacccaggaaagcgagugcgucuguauaaauggaacaugcaccguggugaugacggaugguucugcauccggccgcgcugacacuagaauccuguuuauuaaggaggggaaaaucguccauauaucaccucucagcggaagugcccagcacauugaagagugcucuuguuauccaagguacccggauguucggugcaucugucgcgacaacuggaagggcuccaaucgacccguguuagacaucagcauggaagauuauucgauugacucuuccuacguaugcucaggucuggugggggauacaccuagaaacgacgauaguagcuccaacucuaauuguagggacccaaacaaugagcggggaaaccccggcgucaaaggcugggcguucgauaauggggacgauguguggaugggacguaccaucagcaaggaccuucgcucagguuacgaaacuuuuaagguuauuggcggguggaguacaccuaacuccaaaagccaggugaauagacaagucauaguggauaacaauaacuggucuggauauucaggcaucuucaguguagaggguaagagcugcauuaauagguguuuuuacguugaguugauccgggggcgaucccaggaaacccgcgugugguggacgucuaacucgaucgucguguucugcggcaccagcggaacauauggcacuggguccuggccagacggagcaaauauuaacuuuaugcccauauga

SEQ ID NO: 143831 - RNA, 1410 nt, Artificial Sequence
  derived and/or modified CDS sequence (opt3) from neuraminidase__InfluenzaA__ABO44104
augaaccccaaucagaagaucauuaccauaggcagcgccucccugacaaucgcuacugugugcuuccucaugcaaauugcaauccuugucacgaccguuacacugcacuuuaaacagcaugagugugacucuccugccucaaaccaggugaugccaugcgaaccgauuaucauagagagaaauaucacugaaauuguauacuugaacaauaccacaaucgagaaggaaauuugucccaaaguggucgaguauaggaacuggaguaagccucagugcaaaaucaccggguucgcgccauuuagcaaggauaauuccauacgguuaucugcuggaggugacauuugggugacucgcgagcccuacguuucgugugauccuggcaagugcuaucaauucgcccuggggcagggaacaacccuagacaacaaacacucaaaugauacgauccaugaccgaaucccacaccguacucuccugaugaacgaacuuggcgugcccuuucaucuggguaccagacaggucuguauugcauggagcaguuccucuugccacgaugggaaggccugguugcacguguguguaacaggagacgauaaaaaugcuacugccagcuucaucuacgacggcaggcucguugauuccauuggcucauggagucagaacauacugcggacccaagagagcgaaugcguguguaucaaugggacaugcaccgucgugaugacggacggaucugcauccggucgcgcugauacuaggauucuguuuaucgaggagggcaagauagugcauauuucaccucucagcgggagugcccagcacgucgaagagugcucuuguuauccaagauacccggacguucggugcaucugucgcgacaacuggaaaggauccaaucgacccgugguagauaucaacauggaagacuauagcauugauucgucuuacgugugcuccggcuuagucggugacacaccuagaaacgaugacaggucaaguaauagcaacugucggaauccaaacaaugagaaggggaaccagggagugaagggcugggcguucgauaauggcgacgauguuuggauggggcguaccaucuccaaagaccugcgcucuggauacgaaacuuuuaaggugauugguggcuggagcacacccaacucaaaaagucagauaaauagacaagucaucguggauuccgacaacaggagcggguauucuggaauuuucucaguagagggcaagaguugcaucaaucgguguuuuuacguugagcuuauccgaggucgcaaacaggaaaccagagugugguggacgagcaacuccauugucguguucugcgggaccucuggcacauauggaacuggcucguggccugacggggcaaauauaaacuugaugccaaucuga

SEQ ID NO: 143832 - RNA, 1413 nt, Artificial Sequence
  derived and/or modified CDS sequence (opt3) from neuraminidase__InfluenzaA__ABO44126
augaaccccaaucagaagaucauuaccauaggcagcaucugcauggccauugggaucauuucccugauccuccaaauaggaaacaucgugucuauuuggaucucacacaguauucagacagguagccagaauuacacuggcaucuguaaccagagaauaauuacguaugaaaauuccaccugggucaaccaaacauacguuaauaucaacaauacuaacgugguagcugggcaggacaccacaucuguggcacuugccggaaauucgucacugugcccuauuagcggcugggcgaucuauaguaaagauaacuccaucaggauugguucuaagggggacgucuucgugauacgggagccauuuaucagcuguucccauuuggagugccgcaccuucuuuuuaacucagggagcucugcuaaaugauaaacacucaaacggcacaguuaaggaccgaaguccguaccgugcccucaugagcugucccauuggcgaagcaccuucuccauauaauuccagauucgagucaguggccuggagcgcuagugcaugccaugaugggaugggauggcugaccaucgguauaucuggccccgacgauggggccgucgcugugcuuaaauacaacggaauuaucacggaaacuaucaaguccuggaggaagcggauucugcgcacccaggagagcgaguguguaugcguuaacggcucguguuuuacaaucaugacugacgguccuaauaacgggccagccucuuauaaaauuuucaagauagaaaaaggaaagaucaccaaauccauugaguugaaugcgcccaacucacacuacgaagagugcaguuguuacccugaugcaggcacagugaugugcgucugcagagacaauuggcauggcagcaacaggccauggguguccuuuaaucaaaaccucgauuaucagaucggguacaucuguucuggaguguucggugacaauccgcggcccaaggauggcaaggggagcugcggaccugucaccguugacggcgccgacggugugaaaggguuuucauaucgcuacggcaacggaguauggauuggccgaacgaagaguaauuccagcagaaggggguucgagaugauaugggauccaaacggauggacugacacagauucuaaauuucuggugaagcaggacgucguggcuaucaccgauuggucagguuauaguggcagcuucguucagcaccccgaacugacugggcucgacuguaugcggccuugcuuuuggguggaguuaauucguggacgcccaagagaaaauacaaccaucuggacguccgguucuucgauuagcuucuguggcgucaacggggauaccgccaauugguccuggcccgacggcgcagagcugccguucacaaucgauaaauga

SEQ ID NO: 143833 - RNA, 1413 nt, Artificial Sequence
  derived and/or modified CDS sequence (opt3) from neuraminidase__InfluenzaA__ABO52228
augaaccccaaucagaagaucauuaccauaggcagcaucuccauugccaucgggauuaucucucugauacuccaaaucggaaacauuaucucaauuugggcuagucacagcauccagacagguucccagaaucauacuggcauaugcaaccagagaauuaucacguacgaaaauucuaccugggugaaccaaacauaugucaauauuaacaauacuaacguuguggcagggaaagacaagaccucgaugacacuugccggaaauucaagccuguguccuaucaggggcugggcgaucuacaccaaagauaacaguauucggauagguuccaagggggacguauucgugauccgcgagccauuuauuucuugcagccacuuggagugucgaacuuucuuuuuaacacagggagcucugcuaaaugauaaacauuccaacggcaccgucaaggaccguucaccguauagagcccucaugaguugcccccugggcgaagcaccuagcccauacaauucuaaguucgaguccguggccuggucagcuagcgcaugucacgaugggcuuggauggcugacgaucgguauaaguggccccgacaacggggccguugcuguguugaaauauaacggaauuaucacugaaaccaucaagucuuggaaaaagaggauucuccggacacaggaguccgagugcgucuguaugaauggcagcugcuuuacuaucaugaccgaugguccuucgaacggggccgcgucuuaccgcauuuucaaaauagaaaagggaagagugacaaaguccaucgagcuggacgcaccaaauuaucauuacgaagaguguucaugcuaccccgauaccggcacgguaauguguguuugcagggacaacuggcacggcaguaaucggccuugggugagcuuuaaccagaaucuggauuaucaaauuggguacaucugcuccggagucuucggugacaacccacgcccgaaagauggcgaggggucuuguaaucccgugacuguggacggagccgacggcgucaaggguuuuagcuaucgauacgggaacggcguuuggaucggaagaacaaaaucaaauaggcuccggaagggcuucgaaaugauuugggauccuaacggguggaccgacacugauagugacuuuuccaugaaacaggauauaguggcuaugacagacuggagcggauauucugguucauucguacagcacccagaguuaaccggccuggauugcaugcgucccuguuuuuggguggaacuuguccgcggguugccuagagagaauacgaccaucuggacaaguggaagcuccauuucuuucugcggcgugaacucggacacugccaauuggagcuggccagauggugcagaacugcccuucaccaucgacaaguga

SEQ ID NO: 143834 - RNA, 1410 nt, Artificial Sequence
  derived and/or modified CDS sequence (opt3) from neuraminidase__InfluenzaA__ABO52239
augaaccccaaucagaagaucauuaccauaggcagcgugucccugacaaucgccacugucugcuucauuaugcaaaucgcuauucucgcaacgaccguuacacuucacuuuaaacagcaugagugugacucuccugccucaaaccaggugaugccaugcgaaccgaucauaaucgagagaaauauuacugaaaucguauaccugaacaauaccacaauugagaaggaaaucugucccgaggcgguggaguauaggaacuggaguaaaccucagugccaaauaaccggguucgcuccauuuagcaaggauaauuccauucgguugucugccggaggugacaucugggucacucgcgaacccuacgugucgugugauccuggcaaaugcuaucaguucgcauuagggcagggaacaacccuggacaacaagcacucaaauggcacgauucaugaucgaaucccacaccguacucuacucaugaacgagcuggguguucccuuucaucuugggaccaaacaggugugugucgccuggagcaguuccucuugccacgacggaaaggcuuggcugcacguguguguaacaggcgaugacaagaaugcaacugccagcuucaucuacgauggcagauugguugacuccauugggucauggagucaaaacauacucaggacccaggaaagcgagugcguguguaucaauggaacaugcaccgucgugaugacggaugguucugcuuccggccgggccgacacucgcauucuguuuaucaaagaggggaagauagugcauauuucaccucugagcggaagugcgcagcacgucgaagagugcucuuguuauccaagauacccggauguuaggugcaucugucgggacaacuggaaaggcuccaaucgccccgugaucgacauuaacauggaagauuauagcaucgacucgucuuacguaugcuccggucucgugggggauacaccucgaaacgacgauucaaguagcaauuccaacuguagagacccaaauaacgagaggggaaaucccggcgucaagggcugggcauucgauaacggggacgauguguggaugggacggaccauuaauaaggacucucguagcgguuacgaaacuuuuaaaguuauaggcggguggucaacaccuaacaguaagucccaggugaaucgccaagucaucguggauaacaauaacuggagcggauauucuggcauuuucucaguagaggguaaaaguugcaucaauagauguuuuuacguugaguuaaucagggggcggccacaggaaacccgagugugguggacgagcaacuccauugucguguucugcggcaccucuggaacauauggcacugggucguggcccgacggagccaauauaaacuuuaugccgaucuga

SEQ ID NO: 143835 - RNA, 1410 nt, Artificial Sequence; identical to SEQ ID NO: 143831
  derived and/or modified CDS sequence (opt3) from neuraminidase__InfluenzaA__ABO52250

SEQ ID NO: 143836 - RNA, 1413 nt, Artificial Sequence
  derived and/or modified CDS sequence (opt3) from neuraminidase__InfluenzaA__ABO52261
augaaccccaaucagaagaucauuaccauaggcagcaucugcauggccauugggaucauuucccugauccuccaaauaggaaacaucauuucuaucugggugucacacaguauucagacagguagccagaaucauacuggcaucuguaaccagagaauaauuacguacgaaaauuccaccugggucaaccaaacauauguuaauaucaacaauacuaacgugguagcugggaaagacaccacaucugugacccuugcaggaaauucgucacugugcccuauuaggggcugggccaucuacagcaaggauaacaguauccggauugguuccaaaggggacgucuucgugauacgcgaaccauuuaucucuuguagccacuuggagugccgaacuuucuuuuuaacacagggagcgcugcuaaaugauaagcauuccaacggcaccguuaaagaccguucaccguauagagcucucaugaguugucccauuggcgaagccccuagcccauacaauucuagguucgaguccguggcauggucagccagcgcuugccacgaugggaugggauggcugacgaucgguauaaguggccccgacgauggggcagucgccgugcuuaaguauaacggaauuaucacugaaaccaucaagucuuggcggaaacgcauucugagaacacaggaguccgaguguguaugcguuaacggcagcuguuuuacuaucaugaccgacgguccuucgaaugggccagcuucuuacaggauuuucaagauagaaaaaggaaagaucacaaaauccauugaguuggaugcccccaacucacauuaugaagagugcaguuguuacccugacaccggcacggugaugugcgucugccgggauaauuggcacggcagcaaccgcccauggguguccuuuaaucagaaccucgacuaccaaaucggguauaucuguucuggaguguucggugauaauccgcgacccaaggacggcaaggggagcugcgacccugucacuguugauggagcggacggcgugaaagguuuuucauacagauaugggaacggcguauggauuggaaggacaaagaguaauuccagccggaaaggcuucgagaugauaugggauccagacggguggaccgauacugacucuaacuuucuggugaagcaggaugucguggcaaugacagacuggucaggauacagugguagcuucguucagcaccccgaacugaccggccucgauuguauccguccuugcuuuuggguggaguuaauucgcgggagaccaagggagaaaacgaccaucuggacauccggaucuucgauuagcuucuguggcgucaauuccgacacugugaacuggucauggcccgauggugccgagcugccguucaccaucgacaaguga

SEQ ID NO: 143837 - RNA, 1413 nt, Artificial Sequence
  derived and/or modified CDS sequence (opt3) from neuraminidase__InfluenzaA__ABO52283
augaaccccaaucagaagaucauuaccauaggcagcaucugcaugacaauugggacuaucucccugauucuccaaaucggaaacauaaucucuauuuggaucucacacaguauucagacggguagccagaaucauaccggcaucuguaaccagagaauaauuacauacgagaauaacacuugggugaaucaaaccuaugucaacaucuccaauacaaacguuguggccgggaaagacaccacuucuaugauucuugcuggaaauucgucacugugcccuaucaggggcugggcaaucuacagcaaggauaacaguauucggauagguuccaaaggggacguauucgugauccgcgaaccauuuauuucuuguagccacuuggagugccgaacauucuuuuuaacccagggagcccugcuaaaugauaagcauuccaacggcacggucaaagaccguucaccguauagagcgcucaugaguugucccaucggcgaagcuccuagcccauacaauucuagguucgaguccguggccuggucagcaagcgccugccacgaugggaugggauggcugacuauagguauuaguggccccgacgauggggcuguugcagugcuuaaguauaacggaaucaucaccgaaauuaucaagucuuggcggaaacagauucugcgcacacaggaguccgagugugucugcgugaacggcagcuguuuuacuauaaugaccgacgguccuucggaugggccagccucuuacagaaucuucaagauugaaaaaggaaagaucacaaaauccaucgaguuggacgcucccaauucacauuaugaagagugcaguuguuacccugauaccggcaagguaaugugcguuugcagggacaacuggcacggcagcaaucggccauggguguccuuuaaccaaaaucucgauuaccagauuggguauauauguucuggagucuucggugacaacccgcgccccaaggacggcaaagggagcugcgauccugugaauguggacggagccgauggcgucaaggguuuuucauaccgauauggggacggcguuuggaucggaagaacgaaaaguaacuccagcaggaagggcuucgagaugauuugggauccaaauggguggacugacacagaugacaacuuucuggugaaacaggauguaguggcgaugaccgacuggucuggauacucagguaguuucguccagcaccccgaacugacuggccucgauuguaugcggccuugcuuuuggguggaguuaauccgugggcgcccaagagaaaagacaaccauuuggacgagcggauccucuaucucguucuguggcguuaauagcgacaccgugaacugguccuggcccgacggugcagagcugccguucacaauagauauguga

SEQ ID NO: 143838 - RNA, 1410 nt, Artificial Sequence; identical to SEQ ID NO: 143566
  derived and/or modified CDS sequence (opt3) from neuraminidase__InfluenzaA__ABO52294

SEQ ID NO: 143839 - RNA, 1410 nt, Artificial Sequence
  derived and/or modified CDS sequence (opt3) from neuraminidase__InfluenzaA__ABO52316
augaaccccaaucagaagaucauuaccauaggcagcgugucccugacaaucgccacuauuugcuuccucaugcaaaucgcuauucuugucacgaccguuacacugcacuuuaaacaguacgagugugacucuccugcaaacaaucagaucaugccaugcgaaccgacuauaaucgagagaaacauuaccgaaaucguguauuugacaaauauuaccaucgagaaggaaauaugucccaaauuaguagaguacaggaacuggucaaagccucagugcaaaauuacuggguucgccccauuuaguaaggauaauagcauccggcuguccgcgggaggugacauuugggugacacgcgagcccuaugucucuugugauccuucgcgaugcuaccaauucgcucuaggccaggggaccacgcucgacaacaagcauucaaaugauacuauccacgaccguaccccacauagaacacugcuuaugaacgaacugggagugcccuuucacuugggcacuaggcagguuuguaucgccuggagcaguuccucuugccaugaugguaaagcauggcuccacgugugugucaccggguaugacaagaaugccacagcuagcuucauuuacgauggacggcugguggacuccauaggcucauggagucagaacauccugcgcacccaagagagcgaaugcguauguauuaauggcacgugcacuguugugaugacagaugggucugcauccgguagagccgacaccaaaauccucuuuauagaggagggaaagauuguccacaucucaccuuuaagcggcagugcucagcauguggaagagugcucuuguuauccaagguacccgggggugcggugcaucugucgcgauaacuggaaaggauccaaucgacccgucguugacauuaacgugaaggacuacagcaucgauucgucuuauguaugcuccggccuggugggugacacuccuagaaagaacgauaggucaaguaauagcuacugucggaacccaaauaacgaaaaagggaaucacggagucaagggcugggccuucgacgauggcaacgacguguggauggggcguacaauuuccgaggauucucgcagcggauaugaaaccuuuaaaguuauagguggcuggucaacgcccaauaguaaacuucagaucaacagacaggugauugucgacuccgauaauaggagcggguacucuggaaucuucucaguggagggcaagaguugcaucaaccgguguuuuuauguagaguugauucgaggucgcgaacaagagaccagaguuugguggacaagcaauuccauaguggucuucugcgggacuucuggcaccuacggagcgggcucguggccugacggggcagauaucaaccugaugccaauuuga

SEQ ID NO: 143840 - RNA, 1410 nt, Artificial Sequence; identical to SEQ ID NO: 142162
  derived and/or modified CDS sequence (opt3) from neuraminidase__InfluenzaA__ABO52327

SEQ ID NO: 143841 - RNA, 1410 nt, Artificial Sequence
  derived and/or modified CDS sequence (opt3) from neuraminidase__InfluenzaA__ABO52338
augaaccccaaucagaagaucauuaccauaggcagcgugucccugacaaucgccacuauuugcuuccucaugcaaaucgcuauucuugucacgaccguuacacugcacuuuaaacaguacgagugugacucuccugcaaacaaucaggugaugccaugcgaaccgaucauaaucgagagaaacauuacugaaaucguauauuugaccaauacaaccauugagaaggaaaucugucccaaauuaguggaguacaggaacuggucaaagccucagugcaaaauaacuggguucgccccauuuaguaaggauaauagcauucggcuguccgcgggaggugacaucugggucacacgcgagcccuaugugucuugugauccuggcaagugcuaccaauucgcucuagggcagggaaccacgcucgacaacaaacauucgaaugauacuauucacgaccgaaccccacaucguacacugcuuaugaacgaacugggcguucccuuucacuuggguacuagacagguguguaucgccuggucaagcaguuccugccaugaugggaaggcauggcuccacgucugugugaccggauaugacaaaaaugccacagcuucuuucaucuacgauggcaggcugguagacagcauuggcuccuggucaaagaacauacugcggacccaggagagugaaugcguuuguaucaaugggacgugcacuguggucaugacagauggaagcgcaucuggucgcgccgacaccaaaauucucuuuaucgaggagggcaagauagugcacauuuccccuuuaucagggagcgcucaacauguggaagagugcaguuguuauccaagauacccgggagucaggugcaucugucgggauaacuggaagggcucuaaucgccccguuguggacaucaacguaaaagacuacuccauugauagcucguaugugugcucuggucuggucggggacacuccucgaaacaaugauagauccucaaguagcuacuguaggaacccaaauaacgaaaagggaaaucacggcgugaaaggcugggccuucgacgaugggaacgacguuuggaugggacggacaaucuccgaggauucucguagcgguuaugaaaccuuuaaggugauuggcggguggucaacgcccaauaguaaacuucagauaaaccgccaggucaucguggacuccgauaauagaagcggauacucuggcauuuucucaguagaggguaagaguugcaucaacagguguuuuuauguugaguugauccgggggcgagaacaggagacccgcgugugguggacaagcaauuccauugucguguucugcggcacuucuggaaccuacggcacagggucguggccugacggagcggauauaaaccugaugccaaucuga

SEQ ID NO: 143842 - RNA, 1410 nt, Artificial Sequence
  derived and/or modified CDS sequence (opt3) from neuraminidase__InfluenzaA__ABO52349
augaaccccaaucagaagaucauuaccauaggcagcgugucccugacaaucgccacuauuugcuuccucaugcaaaucgcuauucuugucacgaccguuacacugcacuuuaaacaguacgagugugacucuccugcaaacaaucaggugaugccaugcgaaccgaucauaaucgagagaaacguaacugaaauuguguauuugaccaauacaaccaucgagaaggaaauuugucccaaauuagucgaguacaggaacuggucaaagccucagugcaaaaucacuggguucgccccauuuaguaaggauaauagcauacggcuguccgcgggaggugacauuugggugacacgcgagcccuauguuucuugugauccuggcaagugcuaccaauucgcucuagggcagggaaccacgcucgacaacaaacauucgaaugauacuauccacgaccgaaccccauaucguacacugcuuaugaacgaacugggcgugcccuuucauuuggguacuagacaggucuguauugccuggucaagcaguuccugccacgaugggaaggcauggcuccauguguguguaaccggauacgacaaaaaugccacagcuucuuucaucuaugauggcaggcugguugacagcaucggcuccuggucaaagaacauucugcggacccaggagagugaaugcguguguauaaaugggacgugcacugucgugaugacagauggaagcgcaucugagcgcgccgacaccaaaauccucuuuauugaggaagguaagaucauacacauuuccccuuuaucaggcagcgcucaacacguggaggaaugcaguuguuacccaagauacccgggggucaggugcaucugucgggauaacuggaagggaucuaaucgccccguuguggacaucaacaugcgagacuauuccauuguaagcucguacgugugcucuggccuggucggugauacuccuaggaaaaacgacagauccucaaguagcuauugucggaauccaaacaaugagaaggggaaccauggagugaaaggcugggccuucgaugacggcaaugauguuuggauggggcguacaaucuccgaagagucucgcagcggauacgagaccuuuaaggugauugguggcuggucaacgcccaacaguaaacuucagauaaauagacaggucaucguggacuccaacaauaggagcggguauucuggaauuuucucaguagaaggcaagaguugcaucaaccgguguuuuuacguugaguugauccgaggucgcgaacaggagaccagagugugguggacaagcaauuccauugucguguucugcgggacuucuggcaccuauggaacaggcucguggccugauggggcggacauaaaccugaugccaaucuga

SEQ ID NO: 143843 - RNA, 1410 nt, Artificial Sequence
  derived and/or modified CDS sequence (opt3) from neuraminidase__InfluenzaA__ABO52360
augaaccccaaucagaagaucauuaccauaggcagcgugucccugacaaucgccacugucugcuuccucaugcaaauugcuauccuuguuacgaccgugacacugcacuuuaaacaguacgagugugacucuccugcaucaaaccagguaaugccaugcgaaccgauuaucauagagagaaauaucacugaaauuguguauuugaacaauaccacaaucgagaaggaaauuugucccaaagucguggaguacaggaacuggaguaagccucagugccaaaucaccggguucgccccauuuagcaaagauaauuccauacgguuaucugcgggaggugacauuuggguuacucgcgagcccuaugugucgugugaucauggcaagugcuaccaguucgcucuggggcagggaacaacccuagacaacaagcacucaaaugauacgauccaugaccguauuccucaccgaacucuccugaugaacgaacuuggcgucccauuucaucuggguaccagacagguguguaucgccuggagcaguuccucuugccacgaugggaaagcaugguugcacguauguaucacaggagacgauaagaaugccacugcuagcuucauuuaugacggcaggcucguugauuccauaggcucauggagucaaaacauccugcggacccaggagagcgaaugcguguguauuaaugggacaugcaccgucgugaugacggacggaucugcauccggucgcgccgauacuagaauccuguuuauagaggagggcaaaauugugcauaucucaccccucagcgggagugcucagcacgucgaagagugcucuuguuacccuagguauccaggaguucggugcaucugucgcgacaacuggaagggcuccaaucgaccggugguagacauuaacauggaagauuacagcaucgacucgucuuacgugugcuccgguuuagucggggauacacccagaaacgacgauaggucaaguaauagcaacugucggaauccuaacaaugagcguggaaaccagggcgugaaaggcugggccuucgacaaugggaacgauguuuggaugggacgcaccauuuccaaggaccugagaucugguuaugaaacuuuuaaggugauaggcggguggagcacaccaaauucaaaaagucaaaucaacaggcaggucauuguggauuccgacaaucggagcggauacucuggcaucuucucaguagaggguaagaguugcaucaaccgauguuuuuauguugagcuuauucgcgggagaaaacaggaaaccagggugugguggacgagcaauuccauagucguguucugcggcaccucuggaacauacggcacugggucguggcccgauggagcgaacaucaauuuuaugccuauuuga

SEQ ID NO: 143844 - RNA, 1410 nt, Artificial Sequence
  derived and/or modified CDS sequence (opt3) from neuraminidase__InfluenzaA__ABO52371
augaaccccaaucagaagaucauuaccauaggcagcgugucccugacaaucgccacugucugcuuccucaugcaaauugcuauccuuguuacgaccgugacacugcacuuuagacaguacgagugugacucuccugcaaacaaucagguaaugccaugcgaaccgauuaucauagagaggaacaucacugaaauuguguauuugaauaacaccacaaucgagaaagaaauuugucccaaguuagucgaguaccggaauuggucaaaaccucagugcaagaucaccggguucgccccauuuaguaaagauaacagcauacgccuguccgcgggaggugacauuugggugacucgagagcccuauguuucuugugauccuggcaagugcuaccaauucgcucuagggcagggaacaacccucgacaauaagcauucgaacgauacgauccacgaccguauuccacauagaacucugcuuaugaaugaacugggcgugcccuuucacuuggguaccaggcaggucuguaucgccuggucaagcaguuccugccaugaugggaaagcauggcuccacguguguguaacaggagacgauaagaacgccacugcuucuuucaucuaugacggcaaacugguugauagcauuggcuccuggucacagaauauacugcggacccaagagagugaaugcguguguaucaacgggacaugcaccgucgugaugacggacggaagcgcaucuggucgcgccgauacuaggauucucuuuaucgaggagggcaagauagugcacauuuccccuuuaucagggagcgcucagcaugucgaagagugcaguuguuacccaagguauccgggaguucggugcaucugucgcgacaauuggaaaggcucuaaccgacccgugguagacaucaacguggaagauuacuccauugacagcucguacgucugcucuggucuggugggggauacaccuagaaauaacgacagguccggaaauucaaacugucggaauccaaacaaugagcguggcaaccacggcguuaaggggugggccuucgaugacggaaaugauguguggaugggucgcaccaucaacaaggaccuuagaaguggcuaugaaacuuuuaaagucauugggggauggagcacacccaauuccaagucucagauaaacagacaggugaucguagauagcgacaaucggucaggcuacagugguauuuucuccguugaggggaaaagcugcaucaaccgauguuuuuauguggaguugauccgcggcagagaacaagagaccagggucugguggacgucuaauucaauuguggucuucugcggaaccaguggcacauacgggacuggaagcuggccugauggugcggacauaaaccugaugccaaucuga

SEQ ID NO: 143845 - RNA, 1413 nt, Artificial Sequence
  derived and/or modified CDS sequence (opt3) from neuraminidase__InfluenzaA__ABO52800
augaaccccaaucagaagaucauuaccauaggcagcaucugcaugacaauugggaucauuucccugauccuccaaauaggaaacaucauuucuaucugggugucacacaguauucagacugguagccagaaucauacgggcaucuguaaccagagaauaauuaccuacgaaaauuccacaugggucaaccaaacuuauguuaauaucaacaauaccaacgugguagccgggaaagacacaaccucugugacucuugcuggaaauucgucacugugcccuauuaggggcugggcaaucuacagcaaggauaacaguauccggauugguuccaaaggggacgucuucgugauacgcgagccauuuaucucuuguagccacuuggagugccgaacauucuuuuuaacccagggagcccugcuaaaugauaagcauuccaacggcacgguuaaagaccguucaccguauagagcgcucaugaguugucccauuggcgaagcuccuagcccauacaauucuagguucgaguccguggccuggucagcaagcgccugccacgaugggaugggauggcugacuaucgguauaaguggccccgacgauggggcugucgcagugcuuaaguauaacggaauuaucaccgaaacaaucaagucuuggcggaaacgcauucugagaacucaggaguccgaguguguaugcguuaacggcagcuguuuuaccaucaugacagacgguccuucgaaugggccagccucuuacaggauuuucaagauagaaaaaggaaagaucaccaaauccauugaguuggaugcucccaacucacauuaugaagagugcaguuguuacccugacacgggcacugugaugugcgucugccgggauaauuggcacggcagcaaccgcccauggguguccuuuaaucagaaccucgacuaccaaaucggguauaucuguucuggaguguucggugauaauccgcgacccaaggacggcaaggggagcugcgacccugucacaguugauggagccgacggcgugaaagguuuuucauacagauaugggaacggcguauggauuggaaggaccaagaguaauuccagccggaaaggcuucgagaugauaugggauccaaacggguggacugacacagauucuaauuuucuggugaagcaggacgucguggcgaugaccgauuggucaggauacagugguagcuucguucagcaccccgaacugacgggccucgacuguaugcguccuugcuuuuggguggaguuaauccgcgggagaccaagggaacggaccacaauuuggacuuccggaucuucgaucagcuucuguggcgucaacuccgauaccgcaaauuggucauggcccgacggugccgagcugccguucacaauugauaaauga

SEQ ID NO: 143846 - RNA, 1413 nt, Artificial Sequence; identical to SEQ ID NO: 142876
  derived and/or modified CDS sequence (opt3) from neuraminidase__InfluenzaA__ABP49220

SEQ ID NO: 143847 - RNA, 1413 nt, Artificial Sequence
  derived and/or modified CDS sequence (opt3) from neuraminidase__InfluenzaA__ABP49319
augaaccccaaucagaagaucauuaccauaggcagcaucugcauggccauugggaucauuucccugauccuccaaauaggaaacaucauuucuaucugggugucacacaguauucagacagguagccagaaucauacuggcaucuguaaccagagaauaauuacguacgagaauaacaccugggucaaucaaacauauguuaacaucuccaauacuaacgugguagcugggaaagacaccacaucuaugauucuugcaggaaauucgucacugugcccuaucaggggcugggccaucuacagcaaggauaacaguauucggauagguuccaaaggggacguguucgucauccgcgaaccauuuauuucuuguagccacuuggagugccgaaccuucuuuuuaacucagggagcgcugcuaaaugauaagcauuccaacggcacagugaaagaccguucaccguauagagcucucaugaguugucccaucggcgaagccccuagcccauacaauucuagguucgaguccguugcauggucagccagcgcuugccacgaugggaugggauggcugaccauagguauuaguggccccgacgauggggcaguggccguccuuaaguauaacggaaucaucacggaaacuauuaagucuuggcggaaacagauccugcgcacccaggaguccgagugugugugcguaaacggcagcuguuuuacaauuaugacugacgguccuucggaugggccagcuucuuacagaauauucaagaucgaaaaaggaaagauuaccaaauccaucgaguuggacgcccccaauucacauuaugaagagugcaguuguuacccugauacaggcaagguuaugugcgugugcagggacaacuggcacggcagcaaucggccaugggucuccuuuaaccaaaaucucgauuaccagaucggguauauuuguucuggaguguucggugacaacccgcgccccaaggacggcaaagggagcugcgauccugugaaugucgacggagcggauggcguuaaggguuuuucauaccgauaugggaacggcguguggauaggaagaaccaaaaguaauuccagcaggaagggcuucgagaugaucugggacccaaacggguggacggauacugacggaaauuuucugguaaaacaggauguggucgcaaugacagacuggucugguuacucaggcaguuucgugcagcaccccgaacugaccgggcucgauuguaugcggccuugcuuuuggguugaguuaauucguggacgcccaagagaaaagacuacaaucuggaccagcggcuccucuauuucguucuguggugugaacagcgacacggucaauugguccuggcccgauggggccgagcugccguucaccaucgacaaauga

SEQ ID NO: 143848 - RNA, 1410 nt, Artificial Sequence
  derived and/or modified CDS sequence (opt3) from neuraminidase__InfluenzaA__ABP49330
augaaccccaaucagaagaucauuaccauaggcagcaucugcaugguggucgggauuaucucccugauucuccaaaucggaaacauaaucucuauuuggaucucacacaguauucagacagguagccagaaucauacuggcaucuguaaccaguccauaauuacguacaaaaauucuaccuggguuaaccaaacauaugugaauaucucgaacacuaauguaguggccgggaagggaaccacaccugucauucuugcuggcaacucaagccugugcccaaucagagguugggcaaucuacaguaaagacaaugggauuaggauaggauccaagggcgauguguucguuauccgggagccguuuauuucuuguagccacuuggaaugccgcaccuucuuuuuaacucagggcgcccugcuaaacgacaaacauuccaaugggacagugaaggaucgaucacccuaucgugcgcucaugaguuguccugucggagaggcuccaagccccuacaacucuagauucgaauccguggccuggucagcaugcgccugucacgacgguaugggcuggcugaccaucgggauaagcggaccugaugacgaggcuguagcaguucuuaaguauaauggcauuaucacggaaacuaucaaaaguuggaggaagaaaauucugcggacccaggagucugagugcgugugugucaacgguuccugcuuuacaaucaugacugaugggccaagcgacggacccgccucguacaagauuuucaaaauagaaaagggcaaggugaccaaaucuaucgaguuggaugcuccuaacucccauuaugaagaguguucaugcuacccagacacaggcaaggugaugugcgucugucgcgauaauuggcacgggaguaacagaccguggguuagcuuugaccagaaucucgauuaccaaauuggauauaucugcuccgguguguucggcgacaaccccaggccuaaagacgggaagggaucuuguggcccaguauacguggauggugccaauggggucaaaggcuuuagcuaucgguacggaaacggcguguggaucgggcgcauuaagucaaauaguucccgacagggauucgagaugauaugggaccccaacgguuggaccgaaacggauagcucauuuuucguuaaacaggacguggucgcgaugacugauuggucuggcuauagugggagcuuugugcagcacccugagcugacaggacuggacugcaugagaccauguuucuggguagaacucaucaggggccggcccaaggagaagaccauuuggacuuccgguucuucgaucagcuucugcgggguuaauuccgauacaguggacuggucauggccggauggcgcagaauuaccuuuuaccauugacaaauga

SEQ ID NO: 143849 - RNA, 1413 nt, Artificial Sequence
  derived and/or modified CDS sequence (opt3) from neuraminidase__InfluenzaA__ABP49352
augaaccccaaucagaagaucauuaccauaggcagcaucugcaugacaauugggaucauuucccugauccuccaaauaggaaacaucauuucuaucugggugucacacaguauucagacugguagccagaaucauacgggcaucuguaaccagagaauaauuaccuacgaaaauuccacaugggucaaccaaacuuauguuaauaucaacaauaccaacgugguagccgggaaagacacaaccucuguggcucuugcaggaaauucgucacugugcccuauuaggggcugggccaucuacagcaaggauaacaguauccggauugguuccaaaggggacgucuucgugauacgcgagccauuuaucucuuguagccacuuggagugccgaacuuucuuuuuaacacagggagcgcugcuaaaugauaagcauuccaacggcaccguuaaagaccguucaccguauagagcucucaugaguugucccauuggcgaagccccuagcccauacaauucuagguucgaguccguggcauggucagccagcgcuugccacgaugggaugggauggcugacgaucgguauaaguggccccgacgauggggcagucgccgugcuuaaguauaacggaauuaucacugaaaccaucaagucuuggcggaaacgcauucugagaacacaggaguccgaguguguaugcguuaacggcagcuguuuuacuaucaugaccgacgguccuucggaugggccagcuucuuacaggauuuucaagauagaaaaaggaaagaucacaaaauccauugaguuggacgcccccaauucacauuaugaagagugcaguuguuacccugauaccggcacggugaugugcgucugccgggacaacuggcacggcagcaaucgcccauggguguccuuuaaccagaaucucgauuaccaaaucggguauaucuguucuggaguguucggugacaacccgcgacccaaggacggcaaggggagcugcggaccugucacuguugauggcgcggacggugugaaaggguuuucauacaaguauggcaauggaguauggauuggcagaacaaaaaguaacuccagcaggaagggguucgagaugauaugggauccaaauggauggaccgacacugauucuaacuuucuggugaaacaggacgucguggcaaugacagauuggucagguuacaguggcagcuucguucagcaccccgaacugaccgggcucgacuguaugcggccuugcuuuuggguggaguuaauccguggacgcccaagagaaaggacgaccauuuggacauccgguucuucgaucagcuucuguggcgucgauuccgacacugccaauuggucauggcccgauggggcugagcugccguucaccauugacaaguga

SEQ ID NO: 143850 - RNA, 1413 nt, Artificial Sequence; identical to SEQ ID NO: 143746
  derived and/or modified CDS sequence (opt3) from neuraminidase__InfluenzaA__ABP49363

SEQ ID NO: 143851 - RNA, 1410 nt, Artificial Sequence; identical to SEQ ID NO: 142778
  derived and/or modified CDS sequence (opt3) from neuraminidase__InfluenzaA__ABP49374

SEQ ID NO: 143852 - RNA, 1413 nt, Artificial Sequence
  derived and/or modified CDS sequence (opt3) from neuraminidase__InfluenzaA__ABP49385
augaaccccaaucagaagaucauuaccauaggcagcaucuccguggccauugggaucauuaaccugacacuccaaaucggaaauauaaucucuauuugggcuucacacaguauccagacugguagccagaacuacacgggcauuugcaaucagagaaucauaaccuaugagaacaggacaugggucaaucaaacuuacguuaacauuaauaacaccaaugugguagcagggaaagacaagacauccaugacccuugccggaaacucuucgcuguguccuauccggggcugggcgauuuauacuaaagauaauucaauccgcaucgguagcaagggggacguguucgucauucgagaaccauuuauaaguugcucccauuuggagugucguacauucuuuuuaacccagggagcucugcuaaacgauaaacacucuaauggcacgaucaaggacagaagcccguucagggcccucauguccugcccccugggcgaagcaccuucaccauacaacagucgguuugagagcguggccuggucugcuuccgcaugucaugaugggcuuggauggcugacuauugguaucucaggccccgacaacggggccguugcuguguugaaguauaauggaauaauuaccgaaacaaucaaaagcuggaagaaacagauccuccgcacucaggagagugagugcgucugugugaacggcucuugcuucaccauuaugacagaugguccuuccaauagagccgcgagcuacaggaucuuuaagauugaaaaagggcggguaaccaagucgauagagcuggacgcaccaaacuaucacuacgaagaguguucuugcuaccccgauacgggaacuguuaugugugugugccgcgacaauuggcauggcuccaaccgaccuugggucucauucaaucaaaaccuggauuaucagaucggcuacauuugcagugggguguuuggagacaauccaagaccgaaggauggugagggcagcuguaaccccgugacagucgacggggccgacggaguuaaaggcuucuccuauagguacgguaaugggguguggaucggccggaccaagucuaaccgucuccgcaaaggauuugaaaugaucugggauccuaauggcuggacugacacagauagcgacuucucaaugaagcaggauguaguggcuaugaccgacuggaguggguauuccggauccuuuguccagcacccagaguuaacgggucuggauugcaugagacccuguuucuggguggaacuuguuaggggcuugccucgggagaacaccacaauuuggacuucugggucaaguaucagcuucugcggagugaauagcgaaaccgccaacuggucuuggccagacggcgcagagcugcccuuuacaauagauaaauga

SEQ ID NO: 143853 - RNA, 1413 nt, Artificial Sequence; identical to SEQ ID NO: 142434
  derived and/or modified CDS sequence (opt3) from neuraminidase__InfluenzaA__ABP49396

SEQ ID NO: 143854 - RNA, 1410 nt, Artificial Sequence
  derived and/or modified CDS sequence (opt3) from neuraminidase__InfluenzaA__ABP49407
augaaccccaaucagaagaucauuaccauaggcagcgugucccugacaaucucuacuauuugcuucuuuaugcaaaucgccauucucaucacgaccgucacacuucacuucaaacaguacgaguuuaacucaccuccaaauaaccagguuaugcugugugaaccgacuauaaucgagagaaauauuaccgaaaucguguauuugacaaacaccacuauugagaaggaaaucugccccaaauuagcugaguacaggaauuggaguaagccucagugugacauaacaggguucgcaccauuuagcaaagauaacuccauucggcugucugccggaggugacaucuggguaacccgcgagcccuaugugucgugcgauccugacaaguguuaccaauucgcgcuaggccaggggacgacucucaauaacguccauucaaaugauaccgugcacgaccgaacaccauaucguacucugcuuaugagcgaacugggaguucccuuucauuugggcaccaaacaggugugcauugcuuggaguuccucuagcugucacgaugguaaggccuggcuccaugucugcgugacaggggacgauaagaacgcaaccgccuccuucaucuacaauggaagacugguagacucaaucguuaguuggagcaaagagauucugaggacgcaggaaucugagugugugugcauaaacggcacuuguacagucgugaugaccgauggcuccgcuucagggaaggcagacacuaaaauccucuuuauugaggaaggaaagaucgugcacacaagcaccuuaagugguucugcccaacacgucgaggaaugcuccugcuauccucgguacccaggcguucgcugugugugcagagauaauuggaaggggagcaacaggccgauaguagacauuaacaucaaagacuacucgaucgugucuuccuaugucuguucaggacuggugggcgauacgccccggaagaaugacaguagcuccucuagccauugccuugauccuaacaaugaggaaggugggcacggaguuaaaggcugggcuuucgacgauggcaacgacguguggauggggcgcaccauuucagagaaguugcgaaguggauacgagacauuuaaagucaucgaagguugguccaauccaaacagcaagcugcagauuaauagacaggugauaguagauaggggcaaccggucuggguauucaggaaucuucaguguugagggcaaaauuuguaucaaucguugcuuuuacguggaacuaauccgcgguagaaaggaggaaacugagguccucuggaccagcaacuccauuguggucuucugugggacaucuggcacuuauggaaccggcucguggcccgacggggccgauauaaaucugaugccuaucuga

SEQ ID NO: 143855 - RNA, 1410 nt, Artificial Sequence; identical to SEQ ID NO: 142778
  derived and/or modified CDS sequence (opt3) from neuraminidase__InfluenzaA__ABP49418

SEQ ID NO: 143856 - RNA, 1410 nt, Artificial Sequence; identical to SEQ ID NO: 142778
  derived and/or modified CDS sequence (opt3) from neuraminidase__InfluenzaA__ABP49429

SEQ ID NO: 143857 - RNA, 1410 nt, Artificial Sequence
  derived and/or modified CDS sequence (opt3) from neuraminidase__InfluenzaA__ABP49440
augaaccccaaucagaagaucauuaccauaggcagcgugucccugacaaucgccacugucugcuuccucauucaaaucgcuauucuugcaacgaccguuacacugcacuuuaaacagcaugagugugacucuccugccucaaaccaggugaugccaugcgaaccgaucauaaucgagagaaauauuacugaaaucguauacuugaacaauaccacaauugagaaggaaaucugucccgagguggucgaguauaggaacuggaguaaaccucagugccaaauaaccggguucgcgccauuuagcaaggauaauuccauucgguuaucugcuggaggugacaucugggugacucgcgaacccuacguuucgugugauccuggcaaaugcuaucaguucgcccuggggcagggaacaacccuagacaacaagcacucaaauggcacgauucaugaucgaaucccacaccguacucuccugaugaacgagcuuggugugcccuuucaucuggggaccaagcaggucuguguggcauggagcaguuccucuugccacgacggaaaagccugguugcacguauguguuacaggcgaugacagaaaugcuacugccagcuucaucuacgauggcaggcucguggacuccauugggucauggagucaaaacauacugcggacccaggaaagcgagugcgucuguaucaauggaacaugcaccguggugaugacggaugguucugcauccggccgcgcugacacuaggauucuguuuaucaaggaggggaaaauaguccauauuucaccucucagcggaagugcccagcacaucgaagagugcucuuguuauccaagauacccggauguucggugcaucugucgcgacaacuggaagggcuccaaucgacccgugauugacaucaacauggaagauuauagcauugacucgucuuacguaugcuccgguuuagugggggauacaccuagaaacgacgauucaaguagcaauuccaacuguagggacccaaauaacgagcggggaaaucccggcgucaaaggcugggcguucgauaacggggacgauguguggaugggacguaccauaucuaaggacagccgcucagguuacgaaacuuuuaagguuaucggcggguggaguacaccuaauuccaaaagccaggcaaacagacaagugauugucgauaagaauaacuggucuggauauucaggcaucuucaguguggaggguaaaagcugcaucaauagguguuuuuacguagagcugauucgggggcgaccacaggaaacccgcguuugguggacguccaacucuauaguggucuucugcggcaccucgggaacauauggcacugggagcuggcccgacggagccaauaucaacuuuaugccgauuuga

SEQ ID NO: 143858 - RNA, 1413 nt, Artificial Sequence; identical to SEQ ID NO: 142999
  derived and/or modified CDS sequence (opt3) from neuraminidase__InfluenzaA__ABP49451

SEQ ID NO: 143859 - RNA, 1410 nt, Artificial Sequence
  derived and/or modified CDS sequence (opt3) from neuraminidase__InfluenzaA__ABP49462
augaaccccaaucagaagaucauuaccauaggcagcgugucccugacaaucgccacugucugcuucauuaugcaaaucgcuauucucgcaacgaccguuacacuucacuuuaaacagcaugagugugacucuccugccucaaaccaggugaugccaugcgaaccgaucauaaucgagagaaauauuacugaaaucguauaccugaacaauaccacaauugagaaggaaaucugucccgaggcgguggaguauaggaacuggaguaaaccucagugccaaauaaccggguucgcuccauuuagcaaggauaauuccauucgguugucugccggaggugacaucugggucacucgcgaacccuacgugucgugugauccuggcaaaugcuaucaguucgcauuagggcagggaacaacccuggacaacaagcacucaaauggcacgauucaugaucgaaucccacaccguacucuacucaugaacgagcuggguguucccuuucaucuugggaccaaacaggugugugucgccuggagcaguuccucuugccacgacggaaaggcuuggcugcacguguguguaacaggcgaugacagaaaugcaacugccagcuucaucuacgauggcagguugguugacuccauugggucauggagucaaaacauacuccggacccaggaaagcgagugcguguguaucaauggaacaugcaccgucgugaugacggaugguucugcuuccggccgcgccgacacuaggauucuguuuaucaaggaggggaaaauagugcauauuucaccucugagcggaagugcgcagcacaucgaagagugcucuuguuauccaagauacccggauguccggugcaucugucgcgacaacuggaagggcuccaaucgacccguuauugacaucaacauggaagauuauagcauugacucgucuuacgugugcuccggucucguaggggauacaccuagaaacgacgauucaaguagcaauuccaacuguagggacccaaauaacgagcggggaaaucccggcgugaaaggcugggcauucgauaacggggacgaugucuggaugggacguaccauaaauaaggacucucgcagcgguuacgaaacuuuuaaggugaucggcggguggucaacaccuaacaguaaaucccagguuaauagacaagugauugucgauaacaauaacuggagcggauauucuggcaucuucucaguggaggguaagaguugcaucaauagguguuuuuacguagaguuaauucgggggcgaccacaggaaacccgcguuugguggacgagcaacuccauaguggucuucugcggcaccucuggaacauauggcacugggucguggcccgacggagccaauaucaacuuuaugccgauuuga

SEQ ID NO: 143860 - RNA, 1410 nt, Artificial Sequence; identical to SEQ ID NO: 143808
  derived and/or modified CDS sequence (opt3) from neuraminidase__InfluenzaA__ABP49473

SEQ ID NO: 143861 - RNA, 1410 nt, Artificial Sequence
  derived and/or modified CDS sequence (opt3) from neuraminidase__InfluenzaA__ABP49495
augaaccccaaucagaagaucauuaccauaggcagcgugucccugacaaucgccacuauuugcuuccucaugcaaaucgcuauucuugucacgaccguuacacugcacuuuaaacaguacgagugugacucuccugcaaacaaucaggugaugccaugcgaaccgaucauaaucgagagaaacauuacugaaaucguauauuugaccaauacaaccauugagaaggaaaucugucccaaauuaguggaguacaggaacuggucaaagccucagugcaaaauaacuggguucgccccauuuaguaaggauaauagcauucggcuguccgcgggaggugacaucugggucacacgcgagcccuaugugucuugugauccuggcaagugcuaccaauucgcucuagggcagggaaccacgcucgacaacaaacauucgaaugauacuauucacgaccgaaccccacaucguacacugcuuaugaacgaacugggcguucccuuucacuuggguacuagacagguguguaucgccuggucaagcaguuccugccaugaugggaaggcauggcuccacgucugugugaccggauaugacaaaaaugccacagcuucuuucaucuacgauggcaggcugguagacagcauuggcuccuggucacagaacauacugcggacccaagagagugaaugcguuuguaucaaugggacgugcacuguggucaugacagauggaagcgcaucuggucgcgccgacaccaagauucucuuuaucgaggagggcaaaauagugcacacuuccccuuuaucagggagcgcucagcauguggaagagugcaguuguuauccaagauacccgggagucaggugcauuugucgggauaacuggcgcggcucuaaucgacccguuguggacaucaacguaaaggacuacuccaucgauagcucguaugugugcucuggucuggucggggacacaccuagaaacaaugauagguccucaaguagcuacugucggaacccaaauaacgaaaagggaacccacggcgugaaaggcugggccuucgacgaugggaaugacguuuggaugggacguacgauuuccgaggauucucgcagcgguuaugaaaccuuuaaggugaucggcggguggucaacacccaacaguaaacuucagauuaauagacaggucauaguggacuccgauaacaggagcggauacucuggcaucuucucaguagaggguaagaguugcauuaaucgguguuuuuauguugaguugauccgagggcgcgaacaagagacuagagugugguggaccagcaacuccaucgucguguucugcggcacaucuggaacuuacggcaccgggucguggccugacggagcggauauuaaucugaugccaauauga

SEQ ID NO: 143862 - RNA, 1410 nt, Artificial Sequence; identical to SEQ ID NO: 142151
  derived and/or modified CDS sequence (opt3) from neuraminidase__InfluenzaA__ABP49506

SEQ ID NO: 143863 - RNA, 1410 nt, Artificial Sequence; identical to SEQ ID NO: 142143
  derived and/or modified CDS sequence (opt3) from neuraminidase__InfluenzaA__ABP49517

SEQ ID NO: 143864 - RNA, 1413 nt, Artificial Sequence
  derived and/or modified CDS sequence (opt3) from neuraminidase__InfluenzaA__ABQ01314
augaaccccaaucagaagaucauuaccauaggcagcaucugcauggccauugggacaaucucccugauucuccaaaucggaaacauaaucucuauuugggugucacacaguauccagacugguagccagaaucauacgggcauuuguaaccagagaaucauaaccuacgagaauaacacaugggucaaucaaacuuauguuaacauuuccaauaccaacgugguagcugggaaagacacaaccucuaugauccuugcaggaaauucgucacugugcccuauuaggggcugggccaucuacagcaaggauaacaguauccggauugguuccaaaggggacguguucgucauacgcgaaccauuuaucucuuguagccacuuggagugccgaacuuucuuuuuaacacagggagcgcugcuaaaugauaagcauuccaacggcaccgugaaagaccguucaccguauagagcucucaugaguugucccauuggcgaagccccuagcccauacaauucuagguucgaguccguugcauggucagccagcgcuugccacgaugggaugggauggcugacgaucgguauaaguggccccgacgauggggcaguggccguccuuaaguauaacggaauuaucacugaaaucauuaagucuuggcggaaacagauccugcgcacccaggaguccgagugugugugcguaaacggcagcuguuuuacaauuaugacugacgguccuucggaugggccagcuucuuacagaauauucaagaucgaaaaaggaaagauuaccaaauccaucgaguuggacgcccccaauucacauuaugaagagugcaguuguuacccugauacaggcaagguuaugugcgugugcagggacaacuggcacggcagcaaucggccaugggucuccuuuaaccaaaaucucgauuaccagaucggguauauuuguucuggaguguucggugacaacccgcgccccaaggacggcaaagggagcugcgauccugugaaugucgacggagcggauggcguuaaggguuuuucauaccgauaugggaacggcguguggauaggaagaaccaaaaguaauuccagcaggaagggcuucgagaugaucugggacccaaacggguggacggauacugacggaaauuuucugguaaaacaggauguggucgcaaugacagacuggucugguuacucaggcaguuucgugcagcaccccgaacugaccgggcucgauuguaugcggccuugcuuuuggguugaguuaauucguggacgcccaagagaaaagacuacaaucuggaccagcggcuccucuauuucguucuguggugugaacagcgacacggucaauugguccuggcccgauggggccgagcugccguucaccaucgacaaauga

SEQ ID NO: 143865 - RNA, 1413 nt, Artificial Sequence
  derived and/or modified CDS sequence (opt3) from neuraminidase__InfluenzaA__ABQ01325
augaaccccaaucagaagaucauuaccauaggcagcaucugcauggccauugggaucauuucccugauccuccaaauaggaaacaucauuucuaucugggugucacacaguauucagacagguagccagaaucauacuggcaucuguaaccagagaauaauuacguacgaaaauuccaccugggucaaccaaacauauguuaauaucucuaacacuaaugugguagcugggaaagacaccacaucgaugacccuugcaggaaacucaagccugugcccuauuaggggcugggccaucuacaguaaggauaauuccauccggauugguucuaaaggggacguguucgucauacgcgaaccauuuaucagcuguucccacuuggagugccgaacuuucuuuuuaacacagggagcgcugcuaaacgauaagcauucaaauggcaccgugaaagaccguaguccguauagagcucucaugagcugucccauuggcgaagccccuucuccauacaacuccagguucgagucaguugcauggagcgccagugcuugccacgaugggaugggauggcugacgaucgguauaucuggccccgacgauggggcaguggccguccuuaaguauaauggaauuaucacugaaaccaucaaguccuggcggaaacagauucugcgcacacaggagagcgagugugugugcguaaacggcucguguuuuacuaucaugaccgacgguccuucugaugggcaggcuuccuacagaauuuucaagauagaaaaaggaaagaucacaaaaucaauugaguuggacgccccaaacagucauuaugaagagugcagcuguuaccccgauaccggcacgguuaugugcgugugcagggacaauuggcacggcuccaaccggccuugggucucuuuuaaucaaaaccucgauuaccagaucggguauaucuguagcggaguguucggugacaauccacgcccgaaggacggcaaggggucaugcgaucccgugaacgucgacggagcggauggcguuaaagguuuuaguuaccgauaugggaauggcguguggauuggaagaacuaaguccaacagcucuaggaaaggcuucgagaugauaugggacccuaauggguggacagauaccgacucaaacuuucugguaaagcaggauguggucgcaaugacugacuggaguggauacagcgguuccuucgugcaacacccagaacugacaggccucgauuguaugcggcccugcuuuuggguugaguuaauccgugggcgcccuagagagaaaaccacgauuuggaccucuggaucgagcaucuccuucuguggcgucaauucagacacagugaacuggaguuggccagauggugccgagcugcccuucacuauugacaaguga

SEQ ID NO: 143866 - RNA, 1410 nt, Artificial Sequence; identical to SEQ ID NO: 142778
  derived and/or modified CDS sequence (opt3) from neuraminidase__InfluenzaA__ABQ01336

SEQ ID NO: 143867 - RNA, 1410 nt, Artificial Sequence; identical to SEQ ID NO: 142778
  derived and/or modified CDS sequence (opt3) from neuraminidase__InfluenzaA__ABQ01347

SEQ ID NO: 143868 - RNA, 1410 nt, Artificial Sequence
  derived and/or modified CDS sequence (opt3) from neuraminidase__InfluenzaA__ABQ01358
augaaccccaaucagaagaucauuaccauaggcagcgugucccugacaaucgccacugucugcuuccucaugcaaauugcuauccuugcaacgaccguuacacugcacuuuaaacagcaugaguguaacucuccugccucaaaucaggugaugccaugcgaaccgauuaucauagagagaaacaucacugaaauuguauacuugaauaacaccacaaucgagaaggaaauuugucccgagguggucgaguauaggaauuggaguaaaccucagugccaaaucaccggguucgcgccauuuagcaaggacaacuccauacgguuaucugcuggaggugauauuugggugacucgcgaacccuacguuucgugugacccuggcaaaugcuaucaguucgcccuggggcagggaacaacccuagauaauaagcacucaaacggcacgauccaugaccguauuccacaccgaacucuccugaugaaugagcuuggugugcccuuucaucuggggaccaagcaggucuguguggcauggagcaguuccucuugccacgauggaaaagccugguugcacguauguguuacaggcgacgauagaaacgcuacugccagcuucaucuacgacggcaggcucgaagauuccaucgggucauggagucaaaauauucugcggacccaggagagcgagugcguguguauaaacggaacaugcaccgucgugaugacggacgguaaugcaucuggccgcgcugauacuagaauccuguuuauuaaggaagggaaaaucgugcauauauccccucucucaggaagcgcccagcacauugaggaaugcaguuguuauccaagguacccggacguccggugcaucugucgcgauaacuggaagggcucuaaccgacccguuuuagacaucuccauggaggacuauagcauugauucgucuuacgugugcuccggucugguaggggacacaccuagaaaugaugacucaaguagcaacuccaauuguagggauccaaacaaugaacggggaaaccccggcgugaaaggcugggcguucgacaauggggaugacgucuggaugggacguaccaucucuaaggaucuucgcagcgguuacgagacuuuuaaggugauuggcggguggucaacaccuaacaguaaaucccagguuaauagacaagugauagucgacaacaauaacuggagcggauauucuggcaucuucucaguggaggguaagaguugcauuaauagguguuuuuacguagaauugauccgggggcgaagccaggagacccgcguuugguggacguccaacucuaucguggucuucugcggcaccucgggaacauauggcacugggagcuggccagauggagcaaauauuaacuuuaugcccauauga

SEQ ID NO: 143869 - RNA, 1410 nt, Artificial Sequence
  derived and/or modified CDS sequence (opt3) from neuraminidase__InfluenzaA__ABQ01369
augaaccccaaucagaagaucauuaccauaggcagcgugucccugacaaucgccacuauuugcuucgucaugcaaaucgcuauucucguuacgaccgugacacuucacuuuaaacaguacgagugugacucuccugcaaacaaucagguaaugccaugcgaaccgaucauaaucgagagaaacauuacugaaaucguguaucugaccaauacaaccauugagaaggaaaucugucccaaauuggucgaguacaggaacuggucaaagccucagugcaaaauaacuggguucgccccauuuaguaaggauaauagcauucgguuauccgcgggaggugacaucugggugacacgcgagcccuauguuucuugugauccuggcaagugcuaccaauucgcucuggggcagggaaccacgcuagacaacaaacauucgaaugauacuauucacgaccgaaccccacaucguacacuccugaugaacgaacuuggcgugcccuuucaccuggguacuagacaggucuguaucgccuggucaagcaguuccugccaugaugggaaggcaugguugcacguguguguaaccggauaugacaaaaaugccacagcuucuuucaucuacgauggcaggcucguugacagcauuggcuccuggucacagaacauacugcggacccaagagagugaaugcguguguaucaaugggacgugcacugucgugaugacagauggaagcgcaucuggucgcgccgacaccaagauucuguuuaucgaggagggcaaaauagugcacacuuccccucucucagggagcgcucagcaugucgaagagugcaguuguuauccaagauacccgggaguuaggugcauuugucgggauaacuggaagggcucuaaucgccccgugguagacaucaacgugaaggacuacuccaucgauagcucguaugucugcucugguuuagugggggacacaccucgaaagaacgauagauccucaaguagcuacuguaggaauccaaacaaugaaaaaggaacccacggcguuaaaggcugggccuucgacgaugggaacgacguguggaugggacggacgauuuccgaggauucucguagcgguuaugaaaccuuuaaggucaucggcggguggucaacacccaauaguaaacugcagauuaaccgccaggugauaguagacuccgauaauagaagcggauacucuggcaucuucucaguugaggguaagaguugcauuaacagguguuuuuauguggagcuuauccgggggcgagaacaagagacucgcgucugguggaccagcaauuccaucguggucuucugcggcacaucuggaacuuacggcaccgggucguggccugacggagcggauauuaacuugaugccaauauga

SEQ ID NO: 143870 - RNA, 1410 nt, Artificial Sequence
  derived and/or modified CDS sequence (opt3) from neuraminidase__InfluenzaA__ABQ44386
augaaccccaaucagaagaucauuaccauaggcagcgugucccugacaaucgccacuauuugcuuccucaugcaaaucgcuauucuugucacgaccguuacacugcacuuuaaacaguacgaguguaacucuccuccaaauaaccaggugauguugugcgaaccgacuaucauagagagaaauaucaccgaaauuguauauuuaacaaacaccacuaucgagaaggaaauuugucccaaacuggcagaguacaggaauuggucaaagccucagugcaacaucacaggguucgccccauuuaguaaagacaauagcauacggcuauccgcgggaggugauauuugggugacccgcgagcccuaugucucuugugacccugauaagugcuaccaauucgcucucggccaggggacgacucugaacaauggacauucgaacgacaccgugcacgaucgaacaccauaucguacucuucugaugaaugaauugggcguucccuuucaucucgguaccaaacagguguguaucgccuggucaagcaguuccugccacgacgggaaggcauggcugcaugucugugugacaggagaugacgagaacgccaccgcuucuuucauuuacaauggcagacugguagauagcaucggcuccuggucaaagaaaauccucaggacgcaggaaagugagugcguuuguauuaacgggacuugcacaguggucaugaccgacggaagcgcaucugguaaggccgauacuaaaauauuauuuaucgaggaaggcaagauugugcacacauccucacugagcgggagugcucaacacguggaggaaugcucuuguuauccucgguacccaggaguccgcugcguuuguagagacaacuggaagggcuccaauaggccgaucguggauauaaacguaaaagacuacagcauugugucgucuuaugucugcuccggucuugugggggacacgccccggaagaaugauucaaguagcuccucucauuguuuggacccuaacaaugaggaaggaggccacggcguuaaagggugggccuucgaugacggaaacgauguguggaugggucgcaccaucagcgagaagcugcgaucaggcuacgagaccuuuaaagucaucgaaggguggaguaagccaaauuccaaacuacagauuaacagacaggugaucguagacaggggaaaucggagcggcuauucugguauuuucucaguugagaguaagagcugcauaaaccguuguuuuuacguggaacucauccgcgggagaaagcaggagaaugaaguccuguggacauccaacucuauuguggucuucugcggcacuucgggaaccuauggcacagggagcuggcccgauggagcggacaucaaucuuaugccuaucuga

SEQ ID NO: 143871 - RNA, 1410 nt, Artificial Sequence; identical to SEQ ID NO: 142762
  derived and/or modified CDS sequence (opt3) from neuraminidase__InfluenzaA__ABQ44408

SEQ ID NO: 143872 - RNA, 1413 nt, Artificial Sequence
  derived and/or modified CDS sequence (opt3) from neuraminidase__InfluenzaA__ABQ44419
augaaccccaaucagaagaucauuaccauaggcagcaucugcauggccauugggaucauuucccugauccuccaaauaggaaacaucgugucuauuuggaucucacacaguauucagaaugguagccagaacuacacaggcaucuguaaucagagaauaauuacuuaugagaacuccacgugggucaaucaaaccuacguuaacaucaauaacacaaaugugguagcugggcaggacacuaccucuguggcacuugccggaaacucgucacugugcccuauuagcggcugggcgaucuauaguaaagauaauuccaucaggauugguucuaagggggacgucuucgugauacgggaaccauuuaucagcuguucccauuuggagugccgcacauucuuuuuaacccagggagcucugcuaaacgauaaacacucaaauggcacuguuaaggaccgaaguccguaccgugcccucaugagcugucccauuggcgaagcaccuucuccauauaacuccagauucgagucaguggccuggagcgcuagugcaugccaugaugggaugggauggcugacaaucgguauaucuggccccgacgauggggccgucgcugugcuuaaauacaacggaauuaucaccgaaacgaucaaguccuggaggaagcggauucugcgcacucaggagagcgaguguguaugcguuaauggcucguguuuuaccaucaugacagacgguccuaacaaugggccagccucuuauaaaauuuucaagauagaaaaaggaaagaucacuaaauccauugaguuggaugcgcccaacucacacuacgaagagugcaguuguuacccugacgcaggcaccgugaugugcgucugcagagauaauuggcauggcagcaacaggccauggguguccuuuaaucaaaaccucgacuaucagaucggguacaucuguucuggaguguucggugauaauccgcggcccaaggacggcaaggggagcugcggaccugucacaguugacggcgccgauggugugaaaggguuuucauaucgcuacggcaacggaguauggauuggccgaaccaagaguaauuccagcagaaggggguucgagaugauaugggacccaaacggauggacggauacugacucuaaauuucuggugaagcaggaugucguggcuaugacagacuggucagguuauaguggcagcuucguucagcaccccgaacugaccgggcucgauuguaugcggccuugcuuuuggguggaguuaauccguggacgcccaagagaaaauacuacaauuuggaccuccgguucuucgaucagcuucuguggcgucaacggggacacggccaauugguccuggcccgauggcgcagagcugccguucaccauugacaaauga

SEQ ID NO: 143873 - RNA, 1410 nt, Artificial Sequence; identical to SEQ ID NO: 142394
  derived and/or modified CDS sequence (opt3) from neuraminidase__InfluenzaA__ABQ44430

SEQ ID NO: 143874 - RNA, 1410 nt, Artificial Sequence; identical to SEQ ID NO: 143824
  derived and/or modified CDS sequence (opt3) from neuraminidase__InfluenzaA__ABQ44441

SEQ ID NO: 143875 - RNA, 1410 nt, Artificial Sequence; identical to SEQ ID NO: 143808
  derived and/or modified CDS sequence (opt3) from neuraminidase__InfluenzaA__ABQ44463

SEQ ID NO: 143876 - RNA, 1413 nt, Artificial Sequence
  derived and/or modified CDS sequence (opt3) from neuraminidase__InfluenzaA__ABQ44474
augaaccccaaucagaagaucauuaccauaggcagcaucugcaugacaauugggacuaucucccugauucuccaaaucggaaacauaaucucuauuugggugucacacaguauccagacggguagccagaaucauaccggcauuuguaaccagagaaucauaacauacgagaauaacacuugggucaaucaaaccuauguuaacauuuccaauacaaacgugguagccgggaaagacaccacuucuaugauccuugcuggaaauucgucacugugcccuauuaggggcugggcaaucuacagcaaggauaacaguauccggauugguuccaaaggggacguguucgucauacgcgaaccauuuaucucuuguagccacuuggagugccgaacauucuuuuuaacccagggagcccugcuaaaugauaagcauuccaacggcacggugaaagaccguucaccguauagagcgcucaugaguugucccauuggcgaagcuccuagcccauacaauucuagguucgaguccguugccuggucagcaagcgccugccacgaugggaugggauggcugacuaucgguauaaguggccccgacgauggggcuguggcaguccuuaaguauaacggaauuaucaccgaaaucauuaagucuuggcggaaacagauccugcgcacacaggaguccgagugugugugcguaaacggcagcuguuuuacuauuaugaccgacgguccuucggaugggccagccucuuacagaauauucaagaucgaaaaaggaaagauuacaaaauccaucgaguuggacgcucccaauucacauuaugaagagugcaguuguuacccugauaccggcaagguuaugugcgugugcagggacaacuggcacggcagcaaucggccaugggucuccuuuaaccaaaaucucgauuaccagaucggguauauuuguucuggaguguucggugacaacccgcgccccaaggacggcaaagggagcugcgauccugugaaugucgacggagccgauggcguuaaggguuuuucauaccgauaugggaacggcguguggauaggaagaacgaaaaguaauuccagcaggaagggcuucgagaugaucugggacccaaacggguggacugauacagacggaaauuuucugguaaaacaggauguggucgcgaugaccgacuggucugguuacucaggcaguuucgugcagcaccccgaacugacugggcucgauuguaugcggccuugcuuuuggguugaguuaauucguggacgcccaagagaaaagacaaccaucuggacgagcggcuccucuauuucguucuguggugugaacagcgacaccgucaauugguccuggcccgauggggcagagcugccguucacaaucgacaaauga

SEQ ID NO: 143877 - RNA, 1410 nt, Artificial Sequence; identical to SEQ ID NO: 142143
  derived and/or modified CDS sequence (opt3) from neuraminidase__InfluenzaA__ABR15800

SEQ ID NO: 143878 - RNA, 1413 nt, Artificial Sequence; identical to SEQ ID NO: 143864
  derived and/or modified CDS sequence (opt3) from neuraminidase__InfluenzaA__ABR15811

SEQ ID NO: 143879 - RNA, 1413 nt, Artificial Sequence; identical to SEQ ID NO: 142876
  derived and/or modified CDS sequence (opt3) from neuraminidase__InfluenzaA__ABR15910

SEQ ID NO: 143880 - RNA, 1410 nt, Artificial Sequence; identical to SEQ ID NO: 142202
  derived and/or modified CDS sequence (opt3) from neuraminidase__InfluenzaA__ABR15932

SEQ ID NO: 143881 - RNA, 1410 nt, Artificial Sequence
  derived and/or modified CDS sequence (opt3) from neuraminidase__InfluenzaA__ABR15943
augaaccccaaucagaagaucauuaccauaggcagcgugucccugacaaucgccacuauuugcuuccucaugcaaaucgcuauucuugucacgaccguuacacugcacuuuagacaguacgaguguaacucuccuccaaauaaccaggugauguugugcgaaccgacuaucauagagaggaauaucaccgaaauuguauauuuaacaaacaccacuaucgagaaagaaauuugucccaagcuggcagaguaccggaauuggucaaaaccucagugcaacaucacaggguucgccccauuuaguaaggacaauagcauacgccuauccgcgggaggugauauuugggugacccgagagcccuaugucucuugugacccugauaaaugcuaccaauucgcucucggccaggggacgacucugaacaauggacauucgaacgacaccgugcacgaucguacaccauauagaacucuucugaugaaugaauugggcguucccuuucaucucgguacccgacagguguguaucgccuggucaagcaguuccugccacgacgggaaggcauggcugcaugucugugugacaggagaugacgagaacgccaccgcuucuuucauuuacaauggccggcugguagauagcaucggcuccuggucaaagaaaauccuccgcacgcaggaaagugagugcguuuguauuaacgggacuugcacaguggucaugaccgacggaagcgcaucugguaaggccgauacuaaaauauuauuuaucgaggaaggcaagauugugcacaucuccacacugucagggagcgcucaacacguggaggaaugcaguuguuauccuagauacccaggagucaggugcguuugucgggacaacuggaaaggcucuaaucgcccgauaguggauauuaacguaaaggacuacuccaucgugagcucguaugucugcucuggucuugugggggacacccccaggaagaaugauuccuucucaaguagccauuguuuggacccuaacaaugaggaaggaggccacggcguuaaagggugggccuuugaugacggaaacgauguguggauggguagaacgaucuccgagaagcugaggucuggcuacgagaccuucaaagucauugaaggguggagcaagccaaauucaaaacuacagacaaaccgucaggugaucguagagcggggaaaucgcaguggcuauuccgguauuuuuagcguugaagggaagucuugcauaaacagauguuucuacguggagcucaucaggggccggaaagaagagacugaggucugguggaccucaaauaguauuguggucuuuugcggaacaagcggcacuuaugggaccggauccuggcccgacggugcggauaucaaccugaugccuaucuga

SEQ ID NO: 143882 - RNA, 1410 nt, Artificial Sequence
  derived and/or modified CDS sequence (opt3) from neuraminidase__InfluenzaA__ABR15954
augaaccccaaucagaagaucauuaccauaggcagcgugucccugacaaucgccacuauuugcuuccucaugcaaaucgcuauucuugucacgaccguuacacugcacuuuaaacaguacgaguguaacucuccuccaaauaaccaggugauguugugcgaaccgacuaucauagagagaaauaucaccgaaauuguauauuuaacaaacaccacuaucgagaaggaaauuugucccaaacuggcagaguacaggaauuggucaaagccucagugcaacaucacaggguucgccccauuuaguaaagacaauagcauacggcuauccgcgggaggugauauuugggugacccgcgagcccuaugucucuugugacccugauaagugcuaccaauucgcucucggccaggggacgacucugaacaauggacauucgaacgacaccgugcacgaucgaacaccauaucguacucuucugaugaaugaauugggcguucccuuucaucucgguaccagacagguguguaucgccuggucaagcaguuccugccacgacgggaaggcauggcugcaugucugugugacaggagaugacgagaacgccaccgcuucuuucauuuacaauggcaggcugguagauagcaucggcuccuggaguaaaaagauccuccggacgcaggaaucagagugcguuuguauuaacgggacuugcacaguggucaugaccgacggaagcgcaucugguaaagccgauacuaagauauuauuuaucgaggaaggcaaaauugugcacaucuccacacugucagggagcgcucaacacguggaggaaugcaguuguuauccucgcuacccaggagucagaugcguuuguagggacaacuggaagggcucuaaucggccgauaguggauauuaacguaaaggacuacuccaucgugagcucguaugucugcucuggucuugugggggacacccccaggaaaaauaacuccuucucaaguagccauuguuuggauccuaauaacgaggaaggaggccacggcguuaaggggugggccuuugacgauggaaaugacguguggaugggucgaacgaucuccgagaaacugagaucuggcuacgagaccuucaaggucauugaaggguggagcaaaccaaacucaaagcuacagacaaaucgccaggugaucguagagcggggaaaccguaguggcuauuccgguauuuuuagcguugaagggaaaucuugcauaaaucgcuguuucuacguggagcucaucagaggcaggaaggaagagacugaggucugguggaccucaaacaguauuguggucuuuugcggaacaagcggcacuuaugggaccggauccuggcccgauggugcggacaucaaucugaugccuaucuga

SEQ ID NO: 143883 - RNA, 1410 nt, Artificial Sequence; identical to SEQ ID NO: 142202
  derived and/or modified CDS sequence (opt3) from neuraminidase__InfluenzaA__ABR15965

SEQ ID NO: 143884 - RNA, 1410 nt, Artificial Sequence
  derived and/or modified CDS sequence (opt3) from neuraminidase__InfluenzaA__ABR22243
augaaccccaaucagaagaucauuaccauaggcagcgugucccugacaaucgccacuauuugcuuccucaugcaaaucgcuauucuugucacgaccguuacacugcacuuuaaacaguacgaguguaacucuccuccaaauaaccaggugauguugugcgaaccgacuaucauagagagaaauaucaccgaaauuguauauuuaacaaacaccacuaucgagaaggaaauuugucccaaacuggcagaguacaggaauuggucaaagccucagugcaacaucacaggguucgccccauuuaguaaagacaauagcauacggcuauccgcgggaggugauauuugggugacccgcgagcccuaugucucuugugacccugauaagugcuaccaauucgcucucggccaggggacgacucugaacaauggacauucgaacgacaccgugcacgaucgaacaccauaucguacucuucugaugaaugaauugggcguucccuuucaucucgguaccaaacagguguguaucgccuggucaagcaguuccugccacgacgggaaggcauggcugcaugucugugugacaggagaugacgagaacgccaccgcuucuuucauuuacaauggcagacugguagauagcaucggcuccuggucaaagaaaauccucaggacgcaggaaagugagugcguuuguauuaacgggacuugcacaguggucaugaccgacggaagcgcaucugguaaggccgauacuaaaauauuauuuaucgaggaaggcaagauugugcacacauccccucugucagggagcgcucaacacguggaggaaugcaguuguuauccacgguacccgggaguccgcugcguuuguagagacaacuggaagggcucuaauaggcccaucguggauauaaacguaaaagacuacuccauugugagcucguaugucugcucuggucuugugggggacaccccucggaagacggauuccucaaguagcucccauuguuuggacccaaauaacgaggaaggaggccacggcguuaaagggugggccuucgaugacggaaaugauguguggaugggucgcaccaucucugaaaagagccgaucaggcuacgagacauuuaaagucaucgagggguggaguaagcccaacuccaaacugcagauuaauagacaggugaucguagacaggggaaaccggagcggcuauucugguauuuucucaguugaggggaagaguugcauaaaucguuguuuuuacguggaacuaauccgcggcagaaagcaggagacugaaguccucuggaccagcaacuccauuguggucuucugcggaacaucuggcacuuaugggaccggaucguggccugauggugcggaccugaaucuuaugccaaucuga

SEQ ID NO: 143885 - RNA, 1410 nt, Artificial Sequence; identical to SEQ ID NO: 142778
  derived and/or modified CDS sequence (opt3) from neuraminidase__InfluenzaA__ABR28518

SEQ ID NO: 143886 - RNA, 1410 nt, Artificial Sequence; identical to SEQ ID NO: 142624
  derived and/or modified CDS sequence (opt3) from neuraminidase__InfluenzaA__ABR28595

SEQ ID NO: 143887 - RNA, 1413 nt, Artificial Sequence
  derived and/or modified CDS sequence (opt3) from neuraminidase__InfluenzaA__ABR28771
augaaccccaaucagaagaucauuaccauaggcagcaucuccauugccaucgggauuaucucucugaugcuccaaauaggaaacaucauuucaaucugggcuagucacagcauucagacagguucccagaaucauacuggcaucugcaaccagagaauaauuacguacgaaaauucuaccugggugaaccacacauaugucaauaucaacaauacuaacguuguggcagggaaagacaagaccucgguaacacuugccggaaauucaagccuguguaguauuuccggcugggcgaucuacaccaaagauaacucuaucaggauugguagcaagggggacguguucgucauacgggagccuuuuaucuccugcucacauuuggagugucgcacuuucuuuuuaacacaaggagcucugcuaaaugauaaacacaguaacggcaccgugaaggaccgaagcccauaucgugcccucaugucuugcccgcugggcgaagcacccuccccuuacaauucaaaguucgagagcguugccuggagugcuucugcaugucaugaugggaugggauggcuuacgauugguaucuccggcccagacaacggggccguggcuguccugaaauauaacggaauaauuacugaaaccaucaagagcuggaaaaagagaaucuugaggacacaggagucggagugcguguguguaaauggcucuugcuuuacuauuaugaccgauggucccuccaacggggccgcgucauacaaaaucuucaagauugaaaagggaaaaguuacaaagagucgggagcucaaugcaccuaacuuucacuaugaagaguguagcugcuacccagacaccggcacggugaugugugucugccgcgauaauuggcacggcuccaacagacccugggugucuuucaaucagaaccuggacuaccagauaggguauaucugcagcggaguguuuggugauaauccuaggccaaaagacggcgaggggucauguaacccggucacuguugauggagccgacggcgugaaggguuucaguuacaaauaugggaauggcguauggauuggacggacaaaguccaaccgccugcgaaaaggcuuugaaaugaucugggaccccaauggguggaccgauacugacagcaacuucucugugaagcaagaugucguggcuaucacagacuggucaggauacagugguagcuuuguucagcauccugagcucaccggcuuagauugcauuagaccauguuucuggguggaacuggucagggggcuuccccgggagaauacgaccauauggacauccggaucuucgaucagcuucugcggcgugaacuccgacacugccaacuggucauggccugauggugcagaauugccauuuaccauugacaaguga

SEQ ID NO: 143888 - RNA, 1413 nt, Artificial Sequence
  derived and/or modified CDS sequence (opt3) from neuraminidase__InfluenzaA__ABR28782
augaaccccaaucagaagaucauuaccauaggcagcaucuccauugccaucgggauucugucucucaugcuucaaaucggaaacauaaucucaauuugggcuagucacagcauccagacagguucccagaaucauacuggcauuugcaaccagagaaucauaacguacgagaauagcaccugggugaaccacacauaugucaauauuaacaauacuaacguuguggcagggaaagacaagaccucgguaacacuggccggaaauucaucuuuguguaguaucuccggcugggcgauuuacaccaaagauaacucuaucaggaucgguagcaagggggacguguucgucauucgggaaccuuuuauauccugcucacauuuagagugucgcacuuucuuucugacacaaggagcucuacucaaugauaaacacaguaacggcaccgugaaggaccgaagcccauaucgugcccugaugucuugcccgcuuggcgaagcacccuccccuuacaauucaaaguucgagagcguugccuggagugcuucugcaugucaugaugggaugggauggcugacgaucgguauuuccggcccagacaacggggccguggcugucuugaaauauaacggaaucauaacugaaaccauuaagagcuggaaaaagagaauccucaggacacaggagucggagugcguguguguaaauggcucuugcuuuacuaucaugaccgauggucccuccaacggggccgcgucauacaaaauuuucaagaucgaaaagggaaaaguuacaaagaguauugagcugaaugcaccuaacuuucacuaugaagaguguagcugcuacccagacaccggcacggugaugugugucugccgggauaauuggcacggcuccaaccgccccugggugucuuucaaucagaaccuggacuaccagauaggguauaucugcagcggaguguuuggugauaauccuagaccaaaagacggcgaggggucauguaacccggucacuguugauggagccgacggcgugaaggguuucaguuacaaauaugggaauggcguauggauuggaaggacaaaguccaaccggcuccgcaaaggcuuugaaaugaucugggaccccaauggguggaccgauacugacagcaacuucucugugaagcaagaugucguggcuaucacagacuggucaggauacagugguagcuuuguucagcauccugaguuaaccggccuggauugcauucgaccauguuucuggguggaacuugucagaggguugcccagggagaauacgaccauauggacauccggaucuucgaucagcuucugcggcgugaacuccgacacugccaacuggucauggccugauggugcagaacugccauuuaccauugacaaguga

SEQ ID NO: 143889 - RNA, 1410 nt, Artificial Sequence; identical to SEQ ID NO: 142892
  derived and/or modified CDS sequence (opt3) from neuraminidase__InfluenzaA__ABR28793

SEQ ID NO: 143890 - RNA, 1413 nt, Artificial Sequence; identical to SEQ ID NO: 142876
  derived and/or modified CDS sequence (opt3) from neuraminidase__InfluenzaA__ABR28804

SEQ ID NO: 143891 - RNA, 1410 nt, Artificial Sequence; identical to SEQ ID NO: 142778
  derived and/or modified CDS sequence (opt3) from neuraminidase__InfluenzaA__ABR28815

SEQ ID NO: 143892 - RNA, 1410 nt, Artificial Sequence; identical to SEQ ID NO: 142202
  derived and/or modified CDS sequence (opt3) from neuraminidase__InfluenzaA__ABR28826

SEQ ID NO: 143893 - RNA, 1413 nt, Artificial Sequence; identical to SEQ ID NO: 142444
  derived and/or modified CDS sequence (opt3) from neuraminidase__InfluenzaA__ABR28837

SEQ ID NO: 143894 - RNA, 1413 nt, Artificial Sequence
  derived and/or modified CDS sequence (opt3) from neuraminidase__InfluenzaA__ABR28848
augaaccccaaucagaagaucauuaccauaggcagcaucuccauugccaucgggauuaucucucugaugcuccaaauaggaaacaucauuucaaucugggcuagucacagcauucagacagguucccagaaucauacuggcgugugcaaccagagaaucauaacguacgaaaauucuaccugggucaaccacacauauguuaauauuaacaauacuaacgugaucguagggaaagacaagaccucggugacacuugcaggaaauucaagccuguguaguauuuccggcugggccaucuacaccaaagauaacucuaucaggauugguagcaagggggacgucuucgugauacgggagccuuuuaucuccugcucacauuuggagugucgcacuuucuuuuuaacacaaggagcgcugcuaaaugauaaacacaguaacggcaccguuaaggaccgaagcccauaucgugcucucaugucuugcccgcugggcgaagcccccuccccuuacaauucaaaguucgagagcguggcauggagugccucugcuugucaugaugggaugggauggcuuacgauugguaucuccggcccagacaacggggcagucgccgugcugaaauauaacggaauaauuacugaaaccaucaagagcuggaaaaagcagaucuugagaacacaggagucggagugcguauguguuaauggcucuugcuuuacuauuaugaccgauggucccuccaacggggcugccucauacaaaaucuucaagauugaaaagggaaaaauaacaaagaguaucgagcucaaugcgccuaacuuucacuaugaagaguguagcugcuacccagacaccggcacggugaugugugucugcagggauaauuggcacggcuccaaccggcccugggugucuuucaaucagaaccuggacuaccaaauuggguauaucugcagcggaguguuuggugauaauccucgcccaaaagacggcgaggggucauguaacccggucacuguugauggagcaaauggcgugaaggguuucaguuacaaauaugggaacggcguauggaucggaagaacaaaguccaauaggcugcggaaaggcuuugaaauggugugggaccccaacggguggaccgacacugauagcgacuucucugucaagcaggaugugguugccauuacagacuggucaggauacagugguagcuuugugcagcauccugagcucaccggcuuaaauugcauacgcccauguuucugggucgaacuggugcgagggcuucccaaggagaacacgaccaucuggacauccggaucuucgauuagcuucugcggcguaaacuccgauacugcuaauuggucauggccugacggugccgaauugccauuuaccaucgauaaauga

SEQ ID NO: 143895 - RNA, 1410 nt, Artificial Sequence
  derived and/or modified CDS sequence (opt3) from neuraminidase__InfluenzaA__ABR28859
augaaccccaaucagaagaucauuaccauaggcagcgugucccugacaaucgccacuauuugcuuccucaugcaaaucgcuauucuugucacgaccguuacacugcacuuuaaacaguacgaguguaacucuccuccaaauaaccaggugauguugugcgaaccgacuaucauagagagaaauaucaccgaaauuguauauuuaacaaacaccacuaucgagaaggaaauuugucccaaacuggcagaguacaggaauuggucaaagccucagugcaacaucacaggguucgccccauuuaguaaagacaauagcauacggcuauccgcgggaggugauauuugggugacccgcgagcccuaugucucuugugacccugauaagugcuaccaauucgcucucggccaggggacgacucugaacaauggacauucgaacgacaccgugcacggccgaacaccauaucguacucuucugaugaaugaauuggguguucccuuucaucucgggaccagacagguguguaucgccuggucaagcaguuccugccacgauggaaaggcauggcugcaugucugugugacaggcgacgaugagaacgccaccgcuucuuucauuuacaauggcaggcugguagacagcaucggguccuggaguaaaaagauccuccggacgcaggaaucagagugcguuuguauuaacggaacuugcacaguggucaugaccgaugguagcgcaucuggcaaagccgacacuaagauauuauuuaucgaggaagggaaaauugugcacaucuccacacugucaggaagcgcucaacacguggaggaaugcaguuguuauccucgcuacccaggcgucagaugcguuuguagggauaacuggaaggguucuaaucggccgauaguggacauuaacguaaaggauuacuccaucgugagcucguaugucugcucugggcuugugggagacacccccaggaaaaaugacuccuucucaaguagccauuguuuggauccuaacaaugaggaaggcggccacgggguuaagggaugggccuuugacgaugguaacgacguguggaugggccgaacgaucuccgagaaacugagaucuggguacgagaccuucaaggucauugaaggauggagcaaaccaaauucaaagcuacagaucaaccgccaggugauuguagagcggggcaaucguagugguuauuccgggauauuuagcguugaaggcaaaucuugcaucaaccgcuguuucuacguggagcucauuagaggaaggaaggaagagacagaggucugguggacuucaaauaguaucguggucuuuugcggcaccagcgggacauauggaacugguuccuggcccgauggcgcggacaucaaccugaugccuauuuga

SEQ ID NO: 143896 - RNA, 1410 nt, Artificial Sequence
  derived and/or modified CDS sequence (opt3) from neuraminidase__InfluenzaA__ABR28870
augaaccccaaucagaagaucauuaccauaggcagcgugucccugacaaucgccacuauuugcuuccucaugcagaucgcuauucuugucacgaccguuacacugcacuuuaaacaguacgaguguaacucuccuccaaauaaccaggugauguugugcgaaccgacuaucauagagagaaauaucaccgaaacaguauauuuaaccaacacuacaauugagaaggaaaucugucccaaacuggcagaguacaggaauuggucaaagccucagugcaacauuaccggguucgccccauuuaguaaagacaauagcauccggcuauccgcgggaggugauauaugggugacgcgcgagcccuaugucucuugugacccugauaagugcuaccaauucgcucucggccaggggacuacccugaacaauggacauucgaacgacacagugcacgaucgaacuccauaucguacccuucugaugaaugaauugggcguucccuuucaucucgguacaagacagguguguauugccuggucaagcaguuccugccacgacgggaaggcauggcugcaugucugugugaccggagaugacgagaacgccacggcuucuuucaucuacaauggcaggcugguagauagcauuggcuccuggaguaaaaagauccuccggacucaggaaucagagugcguuuguaucaacgggacaugcaccguggucaugacugacggaagcgcaucugguaaagccgauacaaagauuuuauuuauagaggaaggcaaaaucgugcacauuuccacccugucagggagcgcucaacacguggaggaaugcaguuguuauccucgcuacccaggagucagaugcguuuguagggacaacuggaagggcucuaaucggccgaucguggauauaaacguaaaggacuacuccauugugagcucguaugucugcucuggucuugugggggacacgccccgcaaaaaugauuccuucucaaguagccauuguuuggacccuaacaaugaggaaggaggccacggcguuaaggggugggccuuugaugacggaaacgauguguggaugggucgaaccaucuccgagaaacugagaucuggcuacgagacauucaaggucaucgaaggguggagcaaaccaaauucaaagcuacagauuaacaggcaagugaucguagagcggggaaaucguaguggcuauuccgguauuuuuagcguugaagggaaaucuugcauaaaccgcuguuucuacguggagcucaucagaggcaggaaggaagagacugaggucugguggaccucaaauaguauuguggucuuuugcggaacaagcggcacuuaugggaccggauccuggcccgacggugcggauaucaaccugaugccuaucuga

SEQ ID NO: 143897 - RNA, 1410 nt, Artificial Sequence
  derived and/or modified CDS sequence (opt3) from neuraminidase__InfluenzaA__ABR28881
augaaccccaaucagaagaucauuaccauaggcagcgugucccugacaaucgccacugucugcuuccucaugcaaauugcuauccuuguuacgaccgugacacugcacuuuaaacaguacgaguguaacucuccuccaaauaaccagguaauguugugcgaaccgacuauuaucgagagaaauauaaccgaaaucguguauuuaacaaacaccacuauugagaaggaaaucugucccaaacuggcagaguacaggaauuggucaaagccucagugcaacauuacaggguucgccccauuuaguaaagacaauagcauccggcuauccgcgggaggugauauaugggucacccgcgagcccuaugugucuugugacccugauaagugcuaccaauucgcucucggccaggggacgacucugaacaauggacauucgaacgacaccguucacgaucgaacaccauaucguacucuucugaugaaugaauugggcgugcccuuucaucucgguaccagacaggucuguauugccuggucaagcaguuccugccacgacgggaaggcauggcugcauguguguguaacaggagaugacgagaacgccaccgcuucuuucaucuacaauggcaggcugguugauagcauuggcuccuggaguaaaaagauccuccggacgcaggaaucagagugcguguguaucaacgggacuugcacagucgugaugaccgacggaagcgcaucugguaaagccgauacuaagauuuuauuuauagaggaaggcaaaaucgugcacauuuccacacugucagggagcgcucaacacgucgaggaaugcaguuguuauccucgcuacccaggaguuagaugcguguguagggacaacuggaagggcucuaaucggccgaucguagauauaaacgugaaggacuacuccauugucagcucguaugugugcucuggucuuguuggggacacgccccgcaaaaaugauuccuucucaaguagccauuguuuggacccuaacaaugaggaaggaggccacggcgugaaggggugggccuuugaugacggaaacgaugucuggaugggucgaaccaucuccgagaaacugagaucuggcuacgagaccuucaaggugaucgaaggguggagcaaaccaaauucaaagcuacagacaaacaggcagguaauuguugagcggggaaaucguaguggcuauuccgguaucuuuagcguggaagggaaaucuugcauuaaccgcuguuucuacgucgagcucauaagaggcaggaaggaagagacugaggugugguggaccucaaauaguaucgucguguuuugcggaacaagcggcacuuaugggaccggauccuggcccgacggugcggauauuaaccugaugccuaucuga

SEQ ID NO: 143898 - RNA, 1410 nt, Artificial Sequence; identical to SEQ ID NO: 142762
  derived and/or modified CDS sequence (opt3) from neuraminidase__InfluenzaA__ABR28892

SEQ ID NO: 143899 - RNA, 1413 nt, Artificial Sequence; identical to SEQ ID NO: 142434
  derived and/or modified CDS sequence (opt3) from neuraminidase__InfluenzaA__ABR28903

SEQ ID NO: 143900 - RNA, 1410 nt, Artificial Sequence
  derived and/or modified CDS sequence (opt3) from neuraminidase__InfluenzaA__ABR28925
augaaccccaaucagaagaucauuaccauaggcagcgugucccugacaaucucuacuauuugcuucuuuaugcaaaucgccauucucaucacgaccgucacacuucacuucaaacaguacgaguuuaacucaccuccaaauaaccagguuaugcugugugaaccgacuauaaucgagagaaauauuaccgaaaucguguauuugacaaacaccacuauugagaaggaaaucugccccaaauuagcugaguacaggaauuggaguaagccucagugugacauaacaggguucgcaccauuuagcaaagauaacuccauucggcugucugccggaggugacaucuggguaacccgcgagcccuaugugucgugcgauccugacaaguguuaccaauucgcgcuaggccaggggacgacucucaauaacguccauucaaaugauaccgugcacgaccgaacaccauaucguacucugcuuaugaacgaacugggaguucccuuucauuugggcaccaaacaggugugcauugcuuggagcaguuccucuugucacgaugguaaggccuggcuccaugucugcgugacaggggacgauaagaaugcaaccgccagcuucaucuacaacggaagacugguagacuccaucguuucauggaguaaagaggugcugaggacgcaggaaagcgagugugucugcauuaauggcacuuguacaguggugaugaccgauggcucugcuuccgggaaggcagacacuaaaauacucuuuaucgaggaaggaaagauuguccacacaucaaccuuaagcgguagugcccaacacguugaggaaugcucuugcuauccucgguacccaggcgugcgcuguguaugcagagauaacuggaagggguccaacaggccgaucguggacauaaauauuaaagacuacagcaucgucucgucuuauguguguuccggacugguuggcgauacgccccggaagaacgacucaaguagcuccucucauugccuugauccuaauaacgaggaaggugggcacggagugaaaggcugggcuuucgacgauggcaaugacgucuggauggggcgcaccaucagcgagaaguugcgaucaggauacgagacauuuaaagugauugaagguuggaguaacccaaauuccaagcugcagaucaacagacagguaauuguugauaggggcaaucggagcggguauucuggaauauucucaguggagggcaaaaguuguaucaaccguugcuuuuacgucgaacuaauucgcgguagaaaggaggaaacugaggugcucuggaccagcaauuccaucgucguguucugugggacaucuggcacuuauggaaccggcucguggcccgacggggccgauaucaaccugaugccuauuuga

SEQ ID NO: 143901 - RNA, 1410 nt, Artificial Sequence
  derived and/or modified CDS sequence (opt3) from neuraminidase__InfluenzaA__ABR88082
auggaccccaaccagaagaucauuaccauaggcagcgugucccugacaaucucuacuauuugcuucuuuaugcaaacggccauccucauuaccacagucacucuucacuucaaacaguacgaguuuaauucaccuccaaacaaucagguuaugcugugugaaccgaccaucauagagagaaacaucacagaaauuguguauuugaccaauacuaucauugagaaggaaaucugccccaaauuagcugaguacaggaacuggaguaagccucagugugauauaacaggguucgcaccauuuagcaaagacaauuccauucggcugucugccggaggugauaucuggguaacccgcgagcccuaugugucgugcgacccugauaaguguuaccaauucgcgcuaggccaggggacgacucucaacaauguccauucaaacgacaccgugcacgaucgaacaccauaucguacucugcuuaugaaugaacugggaguucccuuucauuugggcaccaaacaggugugcauugcuuggagcaguuccucuugucacgacgguaaggccuggcuccaugucugcgugacaggggaugacaagaacgcaaccgccagcuucaucuacaauggaagacugguagauuccguugugucauggaguaaagacauccugaggacgcaggagagcgaaugugucugcauuaacggcacuuguacaguggugaugaccgauggcucugcuuccgggaaggcagacacuaaaauacucuuuaucgaggagggaaagauuguccacacaucaaccuuaagcgguagugcccaacacguugaagagugcucuugcuauccucgguacccaggcgugcgcuguguaugcagagacaauuggaagggguccaacaggccgaucguggauauaaacauuaaaaauuacagcaucgucucgucuuauguguguuccggacugguuggcgacacgccccggaagaccgauucaaguagcuccucucauugccuugacccuaacaaugaagagggugggcacggagugaaaggcugggcuuucgaugacggcaacgaugucuggauggggcgcacaaucagcgaaaaguugcgacugggauacgagacuuuuaaagugauugaggguuggucaaauccaaacaguaagcuacagaucaauagacagguaauuguugacaggggcaaccgguccggguauagcggaauauucucuguggaaggcaaaucauguaucaaucguugcuuuuacgucgagcucauucgcgguagaaaggaagagaccgaagugcuguggacaaguaacagcaucgucguguucugugggacuuccggcaccuauggaacaggcucuuggcccgauggggccgacaucaaucuuaugccuauuuga

SEQ ID NO: 143902 - RNA, 1413 nt, Artificial Sequence
  derived and/or modified CDS sequence (opt3) from neuraminidase__InfluenzaA__ABS00324
augaaccccaaucagaagaucauuaccauaggcagcaucugcauggccauugggaucauuucccugauccuccaaauaggaaacaucgugucuauuuggaucucacacaguauucagacagguagccagaauuacacuggcaucuguaaccagagaauaauuacguaugaaaauuccaccugggucaaccaaacauacguuaauaucaacaauacuaacgugguagcugggcaggacaccacaucuguggcacuugccggaaauucgucacugugcccuauuagcggcugggcgaucuauaguaaagauaacuccaucaggauugguucuaagggggacgucuucgugauacgggagccauuuaucagcuguucccauuuggagugccgcaccuucuuuuuaacucagggagcucugcuaaaugauaaacacucaaacggcacaguuaaggaccgaaguccguaccgugcccucaugagcugucccauuggcgaagcaccuucuccauauaauuccagauucgagucaguggccuggagcgcuagugcaugccaugaugggaugggauggcugaccaucgguauaucuggccccgacgauggggccgucgcugugcuuaaauacaacggaauuaucacggaaacuaucaaguccuggaggaagcggauucugcgcacccaggagagcgaguguguaugcguuaacggcucguguuuuacaaucaugacugacgguccuaauaacgggccagccucuuauaaaauuuucaagauagaaaaaggaaagaucaccaaauccauugaguuggaugcgcccaauucacacuacgaagagugcaguuguuacccugacgcaggcacagugaugugcgucugcagagauaacuggaggggcagcaaucggccauggguguccuuuaaccaaucucucgacuaucagaucggguacaucuguagcggaguguucggugauaauccgcgccccaaggacggcaaggggucaugcgacccugucaccguugauggagccgacggcgugaaagguuuuaguuaucgauacgggaacggcguauggauuggaagaacgaaguccaauagcucuaggcggggcuucgagaugauaugggauccaaacggguggacugacacagauucaaaauuucuggugaagcaggacgucguggcuaugaccgauuggaguggauauagcgguuccuucguucagcaucccgaacugacuggccucgacuguaugcguccuugcuuuuggguggaguuaauccgcgggagaccaagggaaaauacaaccauuuggacgucuggaucgagcaucuccuucuguggcgucaacggugauaccgccaauuggucauggcccgacgggagugagcugccguucacaauugauaaauga

SEQ ID NO: 143903 - RNA, 1410 nt, Artificial Sequence; identical to SEQ ID NO: 142162
  derived and/or modified CDS sequence (opt3) from neuraminidase__InfluenzaA__ABS49902

SEQ ID NO: 143904 - RNA, 1410 nt, Artificial Sequence
  derived and/or modified CDS sequence (opt3) from neuraminidase__InfluenzaA__ABS49913
augaaccccaaucagaagaucauuaccauaggcagcgugucccugacaaucgccacugucugcuuccucaugcaaauugcuauccuuguuacgaccgugacacugcacuuuagacaguacgagugugacucuccuacuaacaaucagguaaugccaugcgaaccgauuaucauagagaggaacaucaccgaaauuguguauuugaauaacacaaccaucgagaaagaaauuugucccaaguuagucgaguaccggaauuggucaaaaccucagugcaagaucacuggguucgcaccauuuaguaaagauaacagcauacgccuguccgccggaggugacauuugggugacacgagagcccuauguuucuugugauccuggcaagugcuaccaauucgcgcuagggcagggaaccacgcucgacaauaagcauucgaacgauacuauccacgaccguauuccacauagaacccugcuuaugaaugaacugggcgugcccuuucacuuggguacaaggcaggucuguaucgcuuggucaagcaguuccugccaugaugggaaagccuggcuccacguguguguaacuggagacgauaagaacgcaaccgccucuuucaucuaugacggccggcugguugauagcauuggcuccuggucacagaauauacugcgcacacaagagagugaaugcguguguaucaacgggaccugcacggucgugaugacugacggaagcgcuucugguagagcagauacaaggauucucuuuaucgaggagggcaaaauagugcacauuuccccuuuaucagggagcgcccagcaugucgaagagugcaguuguuacccacgguauccgggaguucgcugcaucugucgagacaauuggaagggcucuaacagacccgugguagacaucaacguggaagauuacuccauugacagcucguacgucugcucuggucuggugggggauaccccuaggaauaacgaccgguccucaaauaguaacugucguaauccaaacaaugagcgcggaaaccacggcguuaaaggcugggcuuucgaugacgggaaugauguguggaugggaagaacuaucagcaaggaccuuagguccgguuaugaaacauuuaaggucauuggcggguggucuacccccaacagcaaaucacagauaaaucgacaggugaucguagauagugacaaccgguccggauacagcggcauuuucucuguugaggguaagucaugcaucaaucgcuguuuuuauguggaguugaucagagggagggaacaagagacgcgggucugguggaccaguaacagcauuguggucuucugcggcacauccggaacuuacggcaccgggucuuggccugauggagccgacauaaaucugaugccaaucuga

SEQ ID NO: 143905 - RNA, 1410 nt, Artificial Sequence; identical to SEQ ID NO: 142892
  derived and/or modified CDS sequence (opt3) from neuraminidase__InfluenzaA__ABS49968

SEQ ID NO: 143906 - RNA, 1413 nt, Artificial Sequence; identical to SEQ ID NO: 143888
  derived and/or modified CDS sequence (opt3) from neuraminidase__InfluenzaA__ABS49979

SEQ ID NO: 143907 - RNA, 1413 nt, Artificial Sequence
  derived and/or modified CDS sequence (opt3) from neuraminidase__InfluenzaA__ABS49990
augaaccccaaucagaagaucauuaccauaggcagcaucuccauugccaucgggauuaucucucugaugcuccaaauaggaaacaucauuucaaucugggcuagucacagcauucagacagguucccagaaucauacuggcaucugcaaccagagaauaauuacguacgaaaauucuaccugggugaaccacacauaugucaauaucaacaauacuaacguuguggcagggaaagacaagaccucgguaauucuugccggaaauucaagccuguguaguaucuccggcugggcgaucuacacaaaagauaacucuauuaggauagguagcaagggggacguguucgucauccgggagccuuuuauuuccugcucacauuuggagugucgcaccuucuuuuuaacucaaggagcucugcuaaaugauaaacacaguaacggcacagugaaggaccgaagcccauaucgugcccucaugucuugcccgcugggcgaagcacccuccccuuacaauucaaaguucgagagcguugccuggagugcuucugcaugucaugaugggaugggauggcuuaccaucgguauauccggcccagacaacggggccguggcuguccugaaauauaacggaauuaucacggaaacuaucaagagcuggaaaaagagaauuuugaggacccaggagucggagugcguguguguaaauggcucuugcuuuacaaucaugacugauggucccuccaacggggccgcgucauacaaaauuuucaagauagaaaagggaaaaguuaccaagaguaucgagcucaaugcaccuaacuuucacuaugaagaguguagcugcuacccagacacaggcaccgugaugugugucugccgggauaauuggcacggcuccaaccgccccugggugucuuucaaucagaaccuggacuaccagauuggguauaucugcagcggaguguuuggugauaauccuagaccaaaagacggcgaggggucauguaacccggucacgguugauggagccgacggcgugaaggguuucaguuacaaauaugggaauggcguauggaucggaaggacuaaguccaaccggcugcgcaaaggcuuugaaaugauuugggaccccaauggguggacagauaccgacagcaacuucucugugaagcaagaugucguggcuauaacugacuggucaggauacagugguagcuuuguucagcauccugagcucacaggcuuagauugcauccgaccauguuucuggguggaacuggucagagggcuucccagggagaauaccacgauuuggaccuccggaucuucgaucagcuucugcggcgugaacuccgacacagccaacuggucauggccugauggugcagaauugccauuuacuauugacaaguga

SEQ ID NO: 143908 - RNA, 1410 nt, Artificial Sequence; identical to SEQ ID NO: 142778
  derived and/or modified CDS sequence (opt3) from neuraminidase__InfluenzaA__ABS50001

SEQ ID NO: 143909 - RNA, 1410 nt, Artificial Sequence; identical to SEQ ID NO: 142778
  derived and/or modified CDS sequence (opt3) from neuraminidase__InfluenzaA__ABS50012

SEQ ID NO: 143910 - RNA, 1410 nt, Artificial Sequence
  derived and/or modified CDS sequence (opt3) from neuraminidase__InfluenzaA__ABS50023
augaaccccaaucagaagaucauuaccauaggcagcgugucccugacaaucgccacuauuugcuuccucaugcaaaucgcuguccuuguuacgaccgugacacugcacuuuaaacaguacgaguguaacccuccaccgaauaaccagguaauguugugcgaacccacuauuaucgagagaaauauaaccgaaaucguguauuuaacaaacaccacuauugagaaggaaaucuguccuaaacuggcagaguacaggaauuggucuaagccacagugcaacauuacaggguucgcccccuuuucaaaagacaauaguauccggcuaagcgcgggaggugauauaugggucacccgcgagccuuauguguccugugacccagauaagugcuaccaauucgcucucggccaggggacgacucugaacaauggacauucuaacgacauuguucacgaucgaacccccuaucguacacuucugaugaaugaauugggcgugccuuuucaucucgguacuaagcaggucuguaucgccuggucgucaagcaguugccacgacgggaaagcauggcugcauguguguguaaccggagaugacgagaacgccacagcuuccuucauuuacaauggcagacugguugauucuaucggcagcugguccaagaaaauccucaggacccaggaaucagagugcguguguauuaacgggacgugcacugucgugaugacagacggaagugcaagcgguaaggccgauaccaaaauauuauuuaucgaggaaggcaagauugugcacacuucucugcuuuccgggucagcucaacacgucgaggaaugcagcuguuauccacgguacccgggaguucgcugcguguguagagacaacuggaagggcaguaauaggcccaucguagauauaaacgugaaagacuacucuauugucuccagcuaugugugcucggguuugguuggggacacaccucggaagaaugauucuuccucaaguagccauugucuggacccaaacaaugaggaaggaggccacggcgugaaagggugggccuucgaugacggaaacgaugucuggaugggucgcaccaucuccgagaagcuacgaucuggcuacgagacguuuaaagugaucgaaggguggagcaagcccaauucaaaacuccagauuaacagacagguaaucguugacaggggaaaucggaguggcuauuccgguauuuucagcguggaggggaagucuugcauaaaccguuguuuuuacgucgaacugauccgcggcagaaagcaggagaccgaagugcuuuggacaucaaauaguauugucguguucugcggaacuagcggcaccuaugggacaggauccuggccugauggugcggacaucaaccugaugccaaucuga

SEQ ID NO: 143911 - RNA, 1410 nt, Artificial Sequence; identical to SEQ ID NO: 142778
  derived and/or modified CDS sequence (opt3) from neuraminidase__InfluenzaA__ABS50034

SEQ ID NO: 143912 - RNA, 1410 nt, Artificial Sequence
  derived and/or modified CDS sequence (opt3) from neuraminidase__InfluenzaA__ABS50045
augaaccccaaucagaagaucauuaccauaggcagcgugucccugacaaucgccacuauuugcuuccucaugcaaacggcuauccuugucaccacaguuacucugcacuuuaaacaguacgaguguaacucuccuccaaauaaccaggugauguugugcgaaccgaccauuaucgagagaaauauaacagaaaucguauauuuaaccaacacuacaauugagaaggaaaucugucccaaacuggcagaguacaggaauuggucaaagccucagugcaacauuaccggguucgccccauuuaguaaagacaauagcauccggcuauccgcgggaggugauauaugggugacgcgcgagcccuaugucucuugugacccugauaagugcuaccaauucgcucucggccaggggacuacccugaacaauggacauucgaacgacacaauucacgaucgaacuccauaucguacccuucugaugaaugaauugggcgugcccuuucaucucgguacaagacagguuuguaucgccuggucaagcaguuccugccacgacgggaaggcauggcugcaugugugugucaccggagaugacgagaacgccacggcuucuuucauuuacaauggcaggcugguggauagcaucggcuccuggaguaaaaagauccuccggacucaggaaucagagugcguauguauuaacgggacaugcaccguugugaugacugacggaagcgcaucugguaaagccgauacaaagauauuauuuaucgaggaaggcaaaauuguccacaucuccacccugucagggagcgcucaacacguggaggaaugcaguuguuauccucgcuacccaggagugagaugcgucuguagggacaacuggaagggcucuaaucggccgauaguugauauuaacgugaaggacuacuccaucguaagcucguaugugugcucuggucuugucggggacacgccccgcaaaaaugauuccuucucaaguagccauuguuuggacccuaacaaugaggaaggaggccacggcgugaaggggugggccuuugaugacggaaacgauguuuggaugggucgaaccaucuccgagaaacugagaucuggcuacgagacauucaaggugauugaaggguggagcaaaccaaauucaaagcuacagaucaacaggcaggucauuguggagcggggaaaucguaguggcuauuccgguauauuuagcguagaagggaaaucuugcaucaaccgcuguuucuacguugagcucauuagaggcaggaaggaagagacugaggugugguggaccucaaauaguaucgucguguuuugcggaacaagcggcacuuaugggaccggauccuggcccgacggugcggauaucaaccugaugccuauuuga

SEQ ID NO: 143913 - RNA, 1410 nt, Artificial Sequence; identical to SEQ ID NO: 142202
  derived and/or modified CDS sequence (opt3) from neuraminidase__InfluenzaA__ABS50056

SEQ ID NO: 143914 - RNA, 1410 nt, Artificial Sequence; identical to SEQ ID NO: 142228
  derived and/or modified CDS sequence (opt3) from neuraminidase__InfluenzaA__ABS50067

SEQ ID NO: 143915 - RNA, 1410 nt, Artificial Sequence; identical to SEQ ID NO: 142762
  derived and/or modified CDS sequence (opt3) from neuraminidase__InfluenzaA__ABS50078

SEQ ID NO: 143916 - RNA, 1413 nt, Artificial Sequence
  derived and/or modified CDS sequence (opt3) from neuraminidase__InfluenzaA__ABS71644
augaagcccaaccagaaaaucauuaccauaggcagcaucuccauugccaucgggauuaucucucugauacuccaaaucggaaauauuaucucaauuugggcuagucacagcauccagacagagucccagaaccauacugguauaugcaaucagagaauuaucacguacgaaaacucuaccugggugaauaacacauaugucaauauuaacaauacuaacguuguggcagagaaggacaaaaccucgguaacacuugccggcaauucaagccuguguaguaucuccgggugggcgaucuacaccaaggauaacucuauuaggauaggaagcaaaggcgacguguucgucauccgggaaccuuuuauuuccugcucacacuuggagugucgcacuuucuuuuuaacacaaggugcucugcuaaaugauaagcauaguaacgggaccgugaaggaccgaagcccauaucgugcccucaugucuugcccgcugggagaagcacccuccccuuacaauucaagauucgagagcguugccuggagugcuucugcaugucacgauggcaugggcuggcuuacgaucgggauauccggaccagacaacggugccguggcuguccugaaauauaacggcauuaucacugagaccaucaagagcuggaaaaagaggauuuugcggacacaggaaucggagugcguguguaugaaugggucuugcuuuacuaucaugaccgauggacccuccaacggcgccgcgucauacaaaauuuucaagauagaaaaggguaaaguaacaaagaccauggagcucaaugcaccuaacuuucauuaugaggaauguaguugcuacccagacacggggacuguuaugugugugugccgcgauaauuggcacggaagcaacagacccugggucuccuucaaucagaaccuggacuaccagaucggcuauauuugcucuggcguguuuggggauaauccuaggccaaaagacggagaggguagcuguaacccggugacagucgauggcgccgacgggguuaagggauucucauacaaauauggcaaugguguguggauggggcggaccaagaguaaccgccugcgaaaaggcuuugaaaugaucugggaccccaauggauggacuaacacagauuccgacuucagcguaaagcaagauguggucgcuaucaccgacuggucuggcuacucagggaguuuugugcagcacccugagcucacgggauuagauugcauuagaccauguuucuggguugaacuggugaggggucuuccccgggagaauaccacaauauggacuagcggcuccucuaucucguucugcggggucaacagcggaaccgccaacugguccuggccugacggcgcagaguugccauuuacaauugauaaguga

SEQ ID NO: 143917 - RNA, 1413 nt, Artificial Sequence
  derived and/or modified CDS sequence (opt3) from neuraminidase__InfluenzaA__ABS71646
augaaccccaaucagaagaucauuaccauaggcagcaucuccauugccaucgggauuaucucucugauacuccaaaucggaaacauuaucucaauuugggcuagucacagcauccagacagagucccagaaucauacugguauaugcaaccagagaauuaucacguacgaaaauucuaccugggugaacaauacauaugucaacauuaauaacacuaauguuguggcagagaaagacaagaccucgguaacacuugccggcaacucaagccuguguaguaucuccgggugggcgaucuacaccaaagauaauucuauuaggauaggaagcaagggcgacguguucgucauccgggaaccuuuuauuuccugcucacacuuggagugucgcacuuucuuuuuaacacaaggugcucugcuaaacgauaaacauaguaaugggaccgugaaggaccgaagcccauaucgugcccucaugucuugcccgcugggagaagcacccuccccuuacaacucaagauucgagagcguugccuggagugcuucugcaugucacgauggcaugggcuggcuuacgaucgggauauccggaccagacaacggugccguggcuguccugaaguauaauggcauuaucacugagaccaucaaaagcuggaagaaaaggauuuugcggacacaggaaucggagugcguguguaugaacgggucuugcuuuacuaucaugaccgauggacccuccaauggcgccgcgucauacaagauuuucaaaauagaaaaggguaagguaacaaaaaccauggagcucaacgcaccuaauuuucauuaugaggaauguaguugcuacccagacacggggacuguuaugugugugugccgcgauaacuggcacggaagcaauagacccugggucuccuucaaccagaaucuggacuaccagaucggcuauauuugcucuggcguguuuggggauaacccuaggccaaaggacggagaggguagcuguaauccggugacagucgauggcgccgacgggguuaaaggauucucauacaaguauggcaacgguguguggauggggcggaccaaaaguaaucgccugcgaaagggcuuugaaaugaucugggaccccaacggauggacuaauacagauuccgacuucagcguaaaacaagauguggucgcuaucaccgacuggucuggcuacucagggaguuuugugcagcacccugagcucacgggauuagauugcauuagaccauguuucuggguugaacuggugaggggucuuccccgggagaacaccacaauauggacuagcggcuccucuaucucguucugcggggucaacagcggaaccgccaauugguccuggccugacggcgcagaguugccauuuacaauugauaaguga

SEQ ID NO: 143918 - RNA, 1413 nt, Artificial Sequence
  derived and/or modified CDS sequence (opt3) from neuraminidase__InfluenzaA__ABS71647
augaaccccaaucagaagaucauuaccauaggcagcaucuccauugccaucgggauuaucucucugauacuccaaaucggaaacauuaucucaauuugggcuagucacagcauccagacagagucccagaaucauacugguauaugcaaccagagaauuaucacguacgaaaauucuaccugggugaacaauacauaugucaacauuaauaacacuaauguuguggcagagaaagacaagaccucgguaacacuugccggcaacucaagccuguguaguaucuccgggugggcgaucuacaccaaagauaauucuauuaggauaggaagcaagggcgacguguucgucauccgggaaccuuuuauuuccugcucacacuuggagugucgcacuuucuuuuuaacacaaggugcucugcuaaacgauaaacauaguaaugggaccgugaaggaccgaagcccauaucgugcccucaugucuugcccgcugggagaagcacccuccccuuacaacucaagauucgagagcguugccuggagugcuucugcaugucacgauggcaugggcuggcuuacgaucgggauauccggaccagacaacggugccguggcuguccugaaguauaauggcauuaucacugagaccaucaaaagcuggaggaagcggauuuugcgcacacaggaaucggagugcguguguaugaacgggucuugcuuuacuaucaugaccgauggacccuccaauggcgccgcgucauacaaaauuuucaagauagaaaaagguaagguaacaaagaccauggagcucaacgcaccuaauuuucauuaugaggaauguaguugcuacccagacacggggacuguuaugugugugugcagagauaacuggcacggaagcaauaggcccugggucuccuucaaccagaaucuggacuaccagaucggcuauauuugcucuggcguguuuggggauaacccucggccaaaagacggagaggguagcuguaauccggugacagucgauggcgccgacgggguuaagggauucucauacaaauauggcaacgguguguggauggggcgcaccaagaguaaucgacugagaaaaggcuuugaaaugaucugggaccccaacggauggacuaauacagauuccgacuucagcguaaagcaagauguggucgcuaucaccgacuggucuggcuacucagggaguuuugugcagcacccugagcucacgggauuagauugcauuaggccauguuucuggguugaacuggugcggggucuuccccgugagaacaccacaauauggacuagcggcuccucuaucucguucugcggggucaacagcggagccgcaaauugguccuggccugacggcgcugaguugccauuuaccauugauaaauga

SEQ ID NO: 143919 - RNA, 1413 nt, Artificial Sequence
  derived and/or modified CDS sequence (opt3) from neuraminidase__InfluenzaA__ABS71648
augaaccccaaucagaagaucauuaccauaggcagcaucuccauugccaucgggauuaucucucugauacuccaaaucggaaacauuaucucaauuugggcuagucacagcauccagacagguaaucagaaccauacuggcauaugcaaucagagaauuaucacguacgagaacuccaccugggugaauaacacauaugucaauauuaacaauacuaacguuguggcagaaaaagacaagaccucuguaacacuugccgggaauaguucacuguguagcaucaguggaugggcgaucuacaccaaagauaacuccauuaggauaggcucuaagggugacguguucgucauccgggagccuuuuauuagcugcucccacuuggaaugucgcacuuucuuuuuaacacaaggggcucugcuaaaugauaaacauucaaacggaaccgugaaggaccgaaguccauaucgugcccucaugagcugcccgcugggcgaggcacccucuccuuacaacuccagauucgaaucaguugccuggagcgcuagugcaugucacgauggcaugggguggcuuacgaucggaauaucugguccagacaauggcgccguggcuguccugaaguauaacgggauuaucacugagaccaucaaauccuggaagaaaaggauuuugcggacacaggagagcgaaugcguguguaugaauggaucgugcuuuacuaucaugaccgauggccccucuaacggugccgcguccuacaagauuuucaaaauagagaaggggaagguaacaaaaaccaucgaacucaaugcaccuaacuuucauuaugaggaguguucaugcuacccagacacgggaacuguuaugugugugugccgcgauaauuggcacggcaguaacagacccugggucagcuucaaucagaaccuggacuaccagauuggcuauaucugcuccgggguguuuggagauaauccuaggccaaaggacggugaaggcucuuguaacccggugacagucgauggggccgacggaguuaaaggcuucagcuacaaguaugguaaugggguguggaucggccggaccaaaucaaaccgccugcgaaagggauuugagaugauuugggaccccaauggcuggacuaacacagauagugacuucuccguaaaacaagauguggucgcuauaaccgacuggagcggguacucuggaucauuugugcagcacccugaacucacggguuuagauugcaucagaccauguuucuggguugagcuggugaggggccuucccaaggaaaacaccacaauuuggacuucggggagcuccaucucuuucugcggagucaauucgggcaccgccaacuggagcuggccugacggugcagaguugccauuuacaauugauaaguga

SEQ ID NO: 143920 - RNA, 1413 nt, Artificial Sequence
  derived and/or modified CDS sequence (opt3) from neuraminidase__InfluenzaA__ABS71649
augaaccccaaucagaagaucauuaccauaggcagcaucuccauugccaucgggauuaucucucugaugcuccaaauaggaaacaucauuucaaucugggcuagucacagcauucagacagguucccagaaucauacuggcaucugcaaccagagaauaauuacguacgaaaauucuaccugggugaaccacacauaugucaauaucaacaauacuaacguuguggcagagaaagacaagaccucgguaacacuugccggcaauucaagccuguguaguauuuccggaugggcgaucuacaccaaagauaacucuaucaggauuggcagcaagggugacguguucgucauacgggagccuuuuaucuccugcucacauuuggaaugucgcacuuucuuuuuaacacaaggggcucugcuaaaugauaaacacaguaacggaaccgugaaggaccgaagcccauaucgugcccucaugucuugcccgcugggcgaggcacccuccccuuacaauucaaaguucgaaagcguugccuggagugcuucugcaugucaugauggcaugggguggcuuacgauuggaaucuccgguccagacaacggcgccguggcuguccugaaauauaacgggauaauuacuggaaccaucaagagcuggaaaaagcagaucuugagaacacaggagucggagugcguguguaugaauggcucuugcuuuacuauuaugaccgauggucccuccaacagggccgcgucauacaaaaucuucaagauugaaaaggggaaaguaacaaagaguauagagcucaaugcaccuaacuuucacuaugaagaguguagcugcuacccagacaccggaaucguuaugugugugugccgggauaauuggcacggcuccaaccgccccugggucucuuucaaucagaaccuggacuaccaaauuggcuauaucugcagcgggguguuuggagauaauccuagaccaaaagacggugagggcucauguaacccggugacggucgauggggccgacggaguuaagggcuucaguuacaaauaugacaaugguguguggaucgggaggacuaaguccaaccggcugcgcaaaggcuuugaaaugauuugggaucccaauggauggacaaacaccgacagcgauuucucuguaaagcaggacguggucgcuauaacugauuggucaggcuacagugggagcuuugugcagcauccugagcucacaggauuagacugcauccgaccauguuucuggguugaacuggugagaggucuucccagggagaauaccacgauuuggaccuccgggucuucgaucagcuucugcggggucaacuccgauacagccaacuggucauggccugacggagcagaauugccauuuacuauugauaaguga

SEQ ID NO: 143921 - RNA, 1413 nt, Artificial Sequence
  derived and/or modified CDS sequence (opt3) from neuraminidase__InfluenzaA__ABS71651
augaaccccaaucagaagaucauuaccauaggcagcaucuccauugccaucgggauuaucucucugaugcuccaaauaggaaacaucauuucaaucugggcuagucacagcauucagacagguucccagaaucauacuggcaucugcaaccagagaauaauuacguacgagaauaacaccugggugaaucacacauaugucaacaucaauaacacuaauguuguggcagggaaagacaagaccucuguaacacuugccggaaacucgucacuguguagcgugaguggcugggcgauuuacaccaaagauaauuccaucaggaucgguucuaagggggacgucuucgugauucgggaaccuuuuauaagcugcucccauuuggagugucgcacuuucuuuuuaacacaaggagcucugcuaaacgauaaacacucaaauggcaccguuaaggaccgaaguccauaucgugcccucaugagcugcccgcugggcgaagcacccucuccuuacaacuccaaguucgagucaguggccuggagcgcuagugcaugucaugaugggaugggauggcuuacgaucgguauuucuggcccagacaacggggccgucgcugugcugaaauauaauggaaucauaacuggcaccauuaaguccuggaaaaagagaaucuugaggacacaggaaagcgagugcguauguaugaacgguucgugcuuuacuaucaugaccgaugggcccucuaauggagccgcguccuacaaaauuuucaagaucgagaagggcaaaguuacaaagucaauugaacucaacgcaccuaguuuucacuaugaggaauguagcugcuacccagacaccggcacggugaugugugucugccgggauaauuggcacggguccaaccgccccugggugucuuucaaucagaaccuggacuaccagauaggauauaucugcagcgguguguuuggcgauaauccuagaccaaaagacggggagggaucauguaacccggucacuguugauggcgccgacggugugaagggguucaguuacaaauauggcaauggaguauggcugggcaggacaaaguccaaccggcuccgcaaaggguuugagaugauuugggaccccaauggauggaccaacacugauagcgacuucucugugaagcaagaugucguggcuaucacagacuggucagguuacaguggcagcuuuguucagcauccugaauuaaccgggcuggauugcauccgaccauguuucuggguggagcuugucagaggauugcccagggaaaauacgaccauuuggacauccggcagcucgauaucuuucugcggugugaacuccaacacugccaauuggucauggccugacggggcagagcugccauuuaccaucgauaaguga

SEQ ID NO: 143922 - RNA, 1413 nt, Artificial Sequence
  derived and/or modified CDS sequence (opt3) from neuraminidase__InfluenzaA__ABS71652
augaaccccaaucagaagaucauuaccauaggcagcaucuccauugccaucgggauuaucucucugaugcuccaaauaggaaacaucauuucaaucugggcuagucacagcauucagacagguucccagaaucauacuggcaucugcaaccagagaauaauuacguacgagaauaacaccugggugaaucacacauaugucaacaucaauaacacuaauguuguggcagggaaagacaagaccucuguaacacuugccggaaacucgucacuguguagcgugaguggcugggcgauuuacaccaaagauaauuccaucaggaucgguucuaagggggacgucuucgugauucgggaaccuuuuauaagcugcucccauuuggagugucgcacuuucuuuuuaacacaaggagcucugcuaaacgauaaacacucaaauggcaccguuaaggaccgaaguccauaucgugcccucaugagcugcccgcugggcgaagcacccucuccuuacaacuccaaguucgagucaguggccuggagcgcuagugcaugucaugaugggaugggauggcuuacgaucgguauuucuggcccagacaacggggccgucgcugugcugaaauauaauggaaucauaacugaaaccauuaaguccuggaaaaagagaaucuugaggacacaggagagcgagugcguauguaugaacggcucgugcuuuacuaucaugaccgauggucccucuaauggggccgcguccuacaaaauuuucaagaucgaaaagggaaaaguuacaaagucaauugagcucaacgcaccuaguuuucacuaugaagaguguagcugcuacccagacaccggcacggugaugugugucugccgggauaauuggcacggcuccaaccgccccugggugucuuucaaucagaaccuggacuaccagauaggguauaucugcagcggaguguuuggugauaauccuagaccaaaagacggcgaggggucauguaacccggucacuguugauggagccgacggcgugaaggguuucaguuacaaauaugggaauggcguauggauuggaaggacaaaguccaaccggcugcgcaaaggcuuugaaaugaucugggaccccaauggguggaccaacacugauagcgacuucucugugaagcaagaugucguggcuaucacagacuggucaggauacagugguagcuuuguucagcauccugagcucaccggcuuagauugcauucgaccauguuucuggguggaacuggucagagggcuucccagggagaauacgaccauauggacauccggaucuucgaucagcuucugcggcgugaacuccaacacugccaauuggucauggccugacggugcagaauugccauuuaccauugauaaguga

SEQ ID NO: 143923 - RNA, 1413 nt, Artificial Sequence
  derived and/or modified CDS sequence (opt3) from neuraminidase__InfluenzaA__ABS71653
augaaccccaaucagaagaucauuaccauaggcagcaucuccauugccaucgggauuaucucucugaugcuccaaauaggaaacaucauuucaaucugggcuagucacagcauucagacagguucccagaaucauacuggcaucugcaaccagagaauaauuacguacgaaaauucuaccugggugaaccacacauaugucaauaucaacaauacuaacguuguggcagggaaagacaagaccucgguaacacuugccggaaauucaagccuguguaguauuuccggcugggcgaucuacaccaaagauaacucuaucaggauugguagcaagggggacguguucgucauacgggagccuuuuaucuccugcucacauuuggagugucgcacuuucuuuuuaacacaaggagcucugcuaaaugauaaacacaguaacggcaccgugaaggaccgaagcccauaucgugcccucaugauuugcccgcugggcgaagcacccucuccuuacaauuccaaguucgagucaguugccuggagcgcuagugcaugucaugaugggaugggauggcuuacgaucgguauaucuggcccagacaacggggccguggcuguccugaaauauaacggaauuaucacugaaaccaucaaguccuggaaaaagagaauuuugaggacacaggagagcgagugcguguguguaaauggcucgugcuuuacuaucaugaccgauggucccucuaacggggccgcguccuacaaaauuuucaagauagaaaagggaaaaguuacaaagucacgggagcucaaugcaccuaacuuucacuaugaagaguguaguugcuacccagacaucggcaccgugaugugugucugccgcgauaauuggcacggcagcaacagacccuggguguccuucaaucagaaccuggacuaccagauuggguauaucugcucuggaguguuuggugauaauccuaggccaaaagacggcaaggggagcuguaacccggucacggccgauggagcugacggcguuaaagguuucucauacaaguaugggaauggcguguggaucggacggacuaaaaguaaccgccugcgaaagggcuuugagaugauuugggaccccaauggguggacagauaccgacuccgauuucagcguaaagcaagacguggucgccauaacugauuggucuggauacucagguaguuuugugcagcauccugaacucacaggcuuagacugcaucagaccauguuucuggguugagcuggugagggggcuuccccgggaaaacaccacgauuuggaccagcggauccucuaucucguucugcggcgucgauagcgacacagcaaauugguccuggccugauggugcugaguugccauuuacuauugacaaauga

SEQ ID NO: 143924 - RNA, 1410 nt, Artificial Sequence
  derived and/or modified CDS sequence (opt3) from neuraminidase__InfluenzaA__ABS71655
augaaccccaucaagaaaauuauaaccaucggcagcgugucccugacaauuucuacuaucugcuucuuuaugcagauugccauccucauaacgaccgucacacuucacuucaagcaauacgaguuuaauucaccuccaaacaaucagguuaugcugugugaaccgacuaucauugagagaaacaucaccgaaauuguguauuugacaaauaccacuaucgagaaagaaauaugccccaaguuagcugaguacaggaacuggaguaaaccucaguguaauauuacaggguucgcaccauuuagcaaggacaacuccauccggcugucugccggaggugauauuuggguaacccgcgagcccuaugugucgugcgacccugauaaguguuaccaguucgcgcuaggccaagggacgacucucaauaacguccauucaaaugacaccgugcacgaucgaacaccauaucguacucugcuuaugaacgaacugggaguucccuuucauuugggcaccaaacaggugugcaucgcuuggagcaguuccucuugucacgacgguaaggccuggcuccaugucugcgugacaggggaugacaaaaaugcaaccgccagcuucaucuacaacggaagacugguagauuccauuguuucauggaguaaggagauacugaggacgcaggaaagcgagugugugugcaucaauggcacuuguacagucgugaugaccgacggcucugcuuccgggaaagcagauacuaagauucucuuuaucgaggaaggaaagauagugcacacaucaaccuuaagcgguagugcccagcacgucgaggaaugcucuugcuauccucgguacccaggcguucgcugugugugcagagacaacuggaaaggguccaacaggccgauuguagauaucaauaucaaggacuacagcauugugucgucuuaugucuguuccggacuggugggcgacacgccccggaaaaacgauucaaguagcuccucucauugccuugacccuaauaacgaggaaggugggcacggaguuaagggcugggcuuucgaugacggcaaugauguguggauggggcgcaccaucagcgagaaauugcgaucaggauacgagacauuuaaggucauugaagguuggaguaacccaaauuccaaacugcaaauaaacagacaggugaucguagacaggggcaaucggagcggguauucuggaauuuucucaguugagggcaagaguuguaucaaccguugcuuuuacguggaacuaauccgcgguagaaaggaggaaacugagguccucuggaccagcaauuccauuguggucuucugugggacaucuggcacuuauggaaccggcucguggcccgauggggccgacauaaaccugaugccuaucuga

SEQ ID NO: 143925 - RNA, 1410 nt, Artificial Sequence
  derived and/or modified CDS sequence (opt3) from neuraminidase__InfluenzaA__ABS71657
augaaccccaaucagaagaucauuaccauaggcagcgugucccugacaaucucuacuauuugcuucuuuaugcaaaucgccauucucaucacgaccgucacacuucacuucaaacaguacgaguuuucaaguccuccaaacaaucagguuaugcugugugaaccgacuauaaucgagagaaacauuaccgaaaucguguauuugacaaauaccacuauugagaaggaaaucugccccaaauuagcugaguacaggaacuggagcaagccucagugugacauaacaggguucgcaccauuuuccaaagauaauucuauucggcugucggccggaggugacaucuggguaacccgcgagcccuaugugucaugcgauccugacaaguguuaccaauucgcgcuaggccaggggacgacucucaacaauguccauagcaacgauaccgugcacgaccgaacaccauaucguacucugcuuaugaaugaacugggaguucccuuucauuugggcaccaaacaggugugcauugcuuggaguuccucuagcugucacgaugguaaggccuggcuccaugucugcgugacaggggacgauaagaacgcaaccgccuccuucaucuacaauggaagacugguagacucaaucguuaguuggagcaaagagauucugaggacgcaggaaucugagugugugugcauaaacggcacuuguacagucgugaugaccgauggcuccgcuucagggaaggcagacacuaaaauccucuuuauugaggaaggaaagaucgugcacacaagcaccuuaagugguucugcccaacacgucgaggaaugcuccugcuauccucgguacccaggcguucgcugugugugcagagauaauuggaaggggagcaacaggccgauaguagacauuaacaucaaagacuacucgaucgugucucgguaugucuguuccggacuggugggcgauacgccccgcaagaaugacucaaguagcuccucucauugccuugauccuaacaaugaggaaggugggcacggaguuaaaggcugggcuuucgacgauggcaacgacgccuggauggggcgaaccauuagcgagaagucaagaaguggauacgagacauuuaaagugaucgaagguugguccaauccaaacagcaaguugcagauuaauaggcaggucauaguggaucggggcaaccguucuggguauucaggaaucuucaguguagagggcaaaagcuguauuaaucgcugcuuuuacguugaacugaucagagguaggaaggaggaaacugaggugcuauggaccuccaacucuaucgucguguucugugggacaucgggcacuuauggaaccggcagcuggcccgacggggcggauauuaaucucaugccuauauga

SEQ ID NO: 143926 - RNA, 1410 nt, Artificial Sequence
  derived and/or modified CDS sequence (opt3) from neuraminidase__InfluenzaA__ABS71659
augaaccccaucaagaaaauuauaaccaucggcagcgugucccugacaauuucuacuaucugcuucuuuaugcagauugccauccucauaacgaccgucacacuucacuucaagcaguacgaguuuucaaguccuccaaauaaccagguuaugcugugugaaccgacuaucauugagagaaauaucaccgaaauuguguauuugacaaacaccacuaucgagaaagaaauaugccccaaguuagcugaguacaggaauuggagcaaaccucagugugacauuacaggguucgcaccauuuuccaaggauaacucuauccggcugucggccggaggugacauuuggguaacccgcgagcccuaugugucaugcgauccugacaaguguuaccaguucgcgcuaggccaagggacgacucucaauaacguccauagcaaugauaccgugcacgaccgaacaccauaucguacucugcuuaugaacgaacugggaguucccuuucauuugggcaccaaacaggugugcaucgcuuggaguuccucuagcugucacgaugguaaggccuggcuccaugucugcgugacaggggacgauaaaaaugcaaccgccuccuucaucuacaacggaagacugguagacucaauuguuaguuggagcaaggagauacugaggacgcaggaaucugagugugugugcaucaauggcacuuguacagucgugaugaccgauggcuccgcuucagggaaagcagacacuaagauucucuuuaucgaggaaggaaagauagugcacacaagcaccuuaagugguucugcccagcacgucgaggaaugcuccugcuauccucgguacccaggcguucgcugugugugcagagauaacuggaaagggagcaauaggccgauuguagacaucaacaucaaggacuacucgauugugucucgguaugucuguuccggacuggugggcgauacgccccgcaaaaacgacucaaguagcuccucucauugccuugauccuaauaacgaggaaggugggcacggaguuaagggcugggcuuucgacgauggcaaugacguguggauggggcgaaccaucggagagaaaagcagaucagguuacgagacauuuaaggucauugaaggcuggaguaacccaaauuccaaauugcaaauaaacaggcaagugaucguagaucgggggaaucguagcggauauucuggcauuuucucaguugaggguaagaguuguaucaaccgcugcuuuuacguggaacugaucagagggaggaaggaggaaacugagguccuauggaccagcaauuccauuguggucuucuguggcacaucuggaacuuauggcaccgggucguggcccgacggagccgauauaaaccauaugccuaucuga

SEQ ID NO: 143927 - RNA, 1410 nt, Artificial Sequence
  derived and/or modified CDS sequence (opt3) from neuraminidase__InfluenzaA__ABS71660
augaaccccaucaagaaaauuauaaccaucggcagcgugucccugacaauuucuacuaucugcuucuuuaugcagauugccauccucauaacgaccgucacacuucacuucaagcaguacgaguuuucaaguccuccaaauaaccagguuaugcugugugaaccgacuaucauugagagaaauaucaccgaaauuguguauuugacaaacaccacuaucgagaaagaaauaugccccaaguuagcugaguacaggaauuggagcaaaccucagugugacauuacaggguucgcaccauuuuccaaggauaacucuauccggcugucggccggaggugacauuuggguaacccgcgagcccuaugugucaugcgauccugacaaguguuaccaguucgcgcuaggccaagggacgacucucaauaacguccauagcaaugauaccgugcacgaccgaacaccauaucguacucugcuuaugaacgaacugggaguucccuuucauuugggcaccaaacaggugugcaucgcuuggaguuccucuagcugucacgaugguaaggccuggcuccaugucugcgugacaggggacgauaaaaaugcaaccgccuccuucaucuacaacggaagacugguagacucaauuguuaguuggagcaaggagauacugaggacgcaggaaucugagugugugugcaucaauggcacuuguacagucgugaugaccgauggcuccgcuucagggaaagcagacacuaagauucucuuuaucgaggaaggaaagauagugcacacaagcaccuuaagugguucugcccagcacgucgaggaaugcuccugcuauccucgguacccaggcguucgcugugugugcagagauaacuggaaagggagcaauaggccgauuguagacaucaacaucaaggacuacucgauugugucucgguaugucuguuccggacuggugggcgauacgccccgcaaaaacgacucaaguagcuccucucauugccuugauccuaauaacgaggaaggugggcacggaguuaagggcugggcuuucgacgauggcaaugacguguggauggggcgaaccaucagcgagaaaucaagaaguggauacgagacauuuaaggucauugaagguugguccaacccaaauagcaaauugcaaauaaacaggcaagugaucguagaucggggcaaucguucuggguauucaggaauuuucaguguugagggcaagagcuguaucaaccgcugcuuuuacguggaacugaucagagguaggaaggaggaaacugagguccuauggaccuccaauucuauuguggucuucugugggacaucgggcacuuauggaaccggcagcuggcccgacggggccgauauaaaccucaugccuaucuga

SEQ ID NO: 143928 - RNA, 1410 nt, Artificial Sequence
  derived and/or modified CDS sequence (opt3) from neuraminidase__InfluenzaA__ABS71661
auguaccccaucaagaaaauuauaaccaucggcagcgugucccugacaauuucuacuaucugcuucuuuaugcagauugccauccucauaacgaccgucacacuucacuucaagcaguaugaguuuucaaguccuccaaacaaucagguuaugcugugugaaccgacuaucauugagagaaacaucaccgaaauuguguacuugacaaauaccacuaucgagaaagaaauaugccccaaguuagcugaguauaggaacuggagcaaaccucagugugacauuacaggguucgcaccauuuuccaaggauaauucuauccggcugucggccggaggugacauuuggguaacccgcgagcccuacgugucaugcgauccugacaaguguuaucaguucgcgcuaggccaagggacgacucucaacaauguccauagcaacgauaccgugcacgaccgaacaccauaccguacucugcuuaugaaugaacugggaguucccuuucauuugggcaccaaacaggugugcaucgcuuggaguuccucuagcugucacgaugguaaggccuggcuccaugucugcgugacaggggacgauaaaaacgcaaccgccuccuucaucuauaauggaagacugguagacucaauuguuaguuggagcaaggagauacugaggacgcaggaaucugagugugugugcaucaacggcacuuguacagucgugaugaccgauggcuccgcuucagggaaagcagacacuaagauucucuuuaucgaggaaggaaagauagugcacacaagcaccuuaagugguucugcccagcacgucgaggaaugcuccugcuacccucgguacccaggcguucgcugugugugcagagauaauuggaaagggagcaacaggccgauuguagacaucaauaucaaggacuauucgauugugucucgguacgucuguuccggacuggugggcgauacgccccgcaaaaacgacucaaguagcuccucucauugccuugauccuaacaaugaggaaggugggcacggaguuaagggcugggcuuucgacgauggcaacgacguguggauggggcgaaccaucagcgagaaaucaagaaguggauaugagacauuuaaggucauugaagguugguccaauccaaacagcaaauugcaaauaaauaggcaagugaucguagaucggggcaaccguucuggguacucaggaauuuucaguguugagggcaagagcuguaucaaucgcugcuuuuauguggaacugaucagagguaggaaggaggaaacugagguccuauggaccuccaacucuauuguggucuucugugggacaucgggcacuuacggaaccggcagcuggcccgacggggccgauauaaaucucaugccuaucuga

SEQ ID NO: 143929 - RNA, 1410 nt, Artificial Sequence
  derived and/or modified CDS sequence (opt3) from neuraminidase__InfluenzaA__ABS71662
augaaccccaucaagaaaauuauaaccaucggcagcgugucccugacaauuucuacuaucugcuucuuuaugcagauugccauccucauaacgaccgucacacuucacuucaagcaauacgaguuuaauucaccuccaaacaaucagguuaugcugugugaaccgacuaucauugagagaaacaucaccgaaauuguguauuugacaaauaccacuaucgagaaagaaauaugccccaaguuagcugaguacaggaacuggaguaaaccucagugugacauuacaggguucgcaccauuuagcaaggauaauuccauccggcugucugccggaggugacauuuggguaacccgcgagcccuaugugucgugcgauccugacaaguguuaccaguucgcgcuaggccaagggacgacucucaacaauguccauucaaacgauaccgugcgagaccguacaccauauagaacucugcuuaugaaugaacugggaguucccuuucacuugggcaccaaacaggugugcaucgcuuggagcaguuccucuugucaugaugguaaggccuggcuccacgucugcaucacaggggacgauaaaaacgcaaccgccagcuucauuuacaauggaaggcugguggacuccauaguaucauggaguaaggagauccugcggacgcaggaaagcgaguguguuugcauuaacggcacuuguacaguggucaugaccgauggcucugcuuccgggaaagcagacacuaagauccucuuuauagaggaaggaaagauugugcauacaucaaccuuaagcgguagugcccagcacguggaggaaugcucuugcuauccucgcuacccaggcgucagauguguuugcagggauaauuggaaaggguccaaccggccgaucguggacaucaacauuaaggaccacagcaucguaucgucuuacguguguuccggacuggucggcgauacgccccgcaaaaaugacucaaguagcuccucucauugccuugauccuaacaaugaggaaggugggcacggagugaagggcugggcuuucgacgauggcaacgacguuuggauggggcgaaccauuagcgagaaaucaagauugggauaugagacauuuaaggugauagaagguuggaguaauccaaacuccaaacugcaaaucaauaggcaggucauuguggaucggggcaaccguagcggguacucuggaaucuucucaguagagggcaagaguuguaucaaucgcugcuuuuauguugaacuaauuagagguaggaaggaggaaacugaggugcucuggaccagcaacuccauagucguguucugugggacaucuggcacuuacggaaccggcucguggcccgacggggccgauaucaaucugaugccuauuuga

SEQ ID NO: 143930 - RNA, 1410 nt, Artificial Sequence
  derived and/or modified CDS sequence (opt3) from neuraminidase__InfluenzaA__ABS71663
auguaccccaucaagaaaauuauaaccaucggcagcgugucccugacaauuucuacuaucugcuucuuuaugcagauugccauccucauaacgaccgucacacuucacuucaagcaauaugaguuuaacucaccuccaaauaaccagguuaugcugugugaaccgacuaucauugagagaaauaucaccgaaauuguguacuugacaaacaccacuaucgagaaagaaauaugccccaaguuagcugaguauaggaauuggaguaaaccucagugugacauuacaggguucgcaccauuuagcaaggauaacuccauccggcugucugccggaggugacauuuggguaacccgcgagcccuacgugucgugcgauccugacaaguguuaucaguucgcgcuaggccaagggacgacucucaauaacguccauucaaaugauaccgugcgagaccguacaccauacagaacucugcuuaugaacgaacugggaguucccuuucacuugggcaccaaacaggugugcaucgcuuggagcaguuccucuugucaugaugguaaggccuggcuccacgucugcaucacaggggacgaucagaaugcaaccgccagcuucauuuauaacggaaggcugguggacuccauaguaucauggaguaaagagauccugcggacgcaggaaagcgaguguguuugcauuaauggcacuuguacaguggucaugaccgauggcucugcuuccgggaaggcagacacuaaaauccucuuuauagaggaaggaaagauugugcauacaucaaccuuaagcgguagugcccaacacguggaggaaugcucuugcuacccucgcuacccaggcgucagauguguuugcagggauaacuggaagggguccaaucggccgaucguggacaucaacauuaaagaccacagcaucguaucgucuuauguguguuccggacuggucggcgauacgccccgcaagaacgacucaaguagcuccucucauugccuugauccuaauaacgaggaaggugggcacggagugaaaggcugggcuuucgacgauggcaaugacguuuggauggggcgaaccauuagcgagaagucaagauugggauacgagacauuuaaagugauagaagguuggaguaacccaaauuccaagcugcagaugaacaggcaggucaucguggaucggggcaaucguagcggguauucuggaauuuucucaguagagggcaaaaguuguaucaaccgcugcuuuuacguugaacuaaucagagguaggaaggaggaaacugaggugcucuggaccagcaauuccauugucguguucugugggacaucuggcacuuauggaaccggcucguggcccgacggggccgauauaaaccugaugccuaucuga

SEQ ID NO: 143931 - RNA, 1410 nt, Artificial Sequence
  derived and/or modified CDS sequence (opt3) from neuraminidase__InfluenzaA__ABU40956
augaaccccaaucagaagaucauuaccauaggcagcgugucccugacaaucucuacuauuugcuucuuuaugcagaucgccauucucaucacgaccgucacacuucacuucaaacaguacgaguuuaacucaccuccaaauaaccagguuaugcugugugaaccgacuauaaucgagagaaauauuaccgaaaucguguauuugacaaacaccacuauugagaaggaaaucugccccaaauuagcugaguacaggaauuggaguaagccucagugugacauaacaggguucgcaccauuuagcaaagauaacuccauucggcugucugccggaggugacaucuggguaacccgcgagcccuaugugucgugcgauccugacaauuguuaccaauucgcgcuaggccaggggacgacucucaacaauguccauucaaacgauaccgugcgagaccguacaccauauagaacucugcuuaugaaugaacugggaguucccuuucacuugggcaccaaacaggugugcauugcuuggagcaguuccucuugucaugaugguaaggccuggcuccacgucugcaucacaggggacgauaagaacgcaaccgccagcuucaucuacaauggaaggcugguggacuccauuguaucauggaguaaggagauacugcggacgcaggaaagcgaguguguuugcaucaacggcacuuguacaguggucaugaccgauggcucugcuuccgggaaagcagacacuaagauucucuuuaucgaggaaggaaaaauagugcauacaucaaccuuaagcgguagugcccaacacguggaggaaugcucuugcuauccucgcuacccaggcgucagauguguuugcagggauaacuggaagggguccaaucggccgauuaucgacaucaacauuaaggaccacagcaucgugucgucuuacguauguuccggacuggugggcgauacgccccgcaaaaaugacucaaguagcuccucucauugccuugauccuaacaaugaggaaggugggcacggagucaagggcugggcuuucgacgauggcaacgacguguggauggggcgaaccauuagcgagaaaucaagauugggauaugagacauuuaagguuauagaagguuggaguaauccaaaauccaagcugcagaucaacaggcaagugauugucgaucggggcaaucguagcggguacucuggaaucuucucaguggagggcaaaaguuguaucaaccgcugcuuuuauguagaacuaauuagagguaggaaggaggaaacugagguucucuggaccagcaauuccauaguggucuucugugggacaucuggcacuuacggaaccggcucguggcccgacggggccgauaucaaccugaugccuauuuga

SEQ ID NO: 143932 - RNA, 1410 nt, Artificial Sequence
  derived and/or modified CDS sequence (opt3) from neuraminidase__InfluenzaA__ABU50651
augaaccccaaucagaagaucauuaccauaggcagcgugucccugacaaucucuacuauuugcuucuuuaugcaaaucgccauucucaucacgaccgucacacuucacuucaaacaguacgaguuuaacucaccuccaaauaaccagguuaugcugugugaaccgacuauaaucgagagaaauauuaccgaaaucguguauuugacaaacaccacuauugagaaggaaaucugccccaaauuagcugaguacaggaauuggaguaagccucagugugacauaacaggguucgcaccauuuagcaaagauaacuccauucggcugucugccggaggugacaucuggguaacccgcgagcccuaugugucgugcgauccugacaaguguuaccaauucgcgcuaggccaggggacgacucucaauaacguccauucaaaugauaccgugcgagaccguacaccauauagaacucugcuuaugaacgaacugggaguucccuuucacuugggcaccaaacaggugugcauugcuuggagcaguuccucuugucaugaugguaaggccuggcuccacgucugcaucacaggggacgauaagaaugcaaccgccagcuucaucuacaacggaaggcugguggacuccauuguaucauggaguaaagagauacugcggacgcaggaaagcgaguguguuugcaucaauggcacuuguacaguggucaugaccgauggcucugcuuccgggaaggcagacacuaaaauucucuuuaucgaggaaggaaagauagugcauacaucaaccuuaagcgguagugcccaacacguggaggaaugcucuugcuauccucgcuacccaggcgucagauguguuugcagggauaacuggaagggguccaaccggccgauuguggacaucaauaucaaagaccacagcauuguaucgucuuacguguguuccggacuggucggcgauacgccccgcaagaacgacucaaguagcuccucucauugccuugauccuaauaacgaggaaggugggcacggagugaaaggcugggcuuucgacgauggcaaugacguuuggauggggcgaaccaucagcgagaagucaagauugggauaugagacauuuaaagugauugaagguuggaguaacccaaaguccaaacugcagauaaauaggcaggucaucguggaucggggcaaccguagcggguacucuggaauuuucucaguagagggcaagaguuguaucaaucgcugcuuuuauguugaacuaaucagagguaggaaggaggaaacugaggugcucuggaccagcaacuccauugucguguucugugggacaucuggcacuuacggaaccggcucguggcccgacggggccgauauaaaucugaugccuaucuga

SEQ ID NO: 143933 - RNA, 1410 nt, Artificial Sequence
  derived and/or modified CDS sequence (opt3) from neuraminidase__InfluenzaA__ABU80180
augaaccccaaucagaagaucauuaccauaggcagcgugucccugacaaucgccacuauuugcuuccucaugcaaaucgcuauucuugucacgaccguuacacugcacuuuaaacaguacgaguguaacucuuucccuaauaaccaggugauguugugcgaaccaacuaucauagagagaaauaucaccgaaauuguauauuuaacaaacaccacuaucgagaaggaaauuuguccgaaacuggcagaguacaggaauuggucaaagccccagugcaacaucacaggguuugccccuuucaguaaagacaauagcauacggcuauccgcgggaggugauauuugggugacccgcgagccauaugucucuugugaccccgauaagugcuaccaauuugcucucggccaggggacgacucugaacaauggacauucgaacgacaccgugcacgaucgaacaccuuaucguacucuucugaugaaugaauugggcguuccauuccaucucgguaccaaacagguguguaucgccuggucaagcaguuccugccacgacgggaaggcauggcugcaugucugugugacaggagaugacgagaacgccaccgcuucuuuuauuuacaauggcagacugguagauagcaucggcuccuggucaaagaaaauccucaggacgcaggaaagugagugcguuuguauuaacgggacuugcacaguggucaugaccgacggaagcgcaucugguaaggccgauacuaaaauauuauucaucgaggaaggcaagauugugcacacauccucacugagcgggagugcucaacacguggaggaaugcucuuguuauccccgguacccuggaguccgcugcguuuguagagacaacuggaagggcuccaauaggccaaucguggauauaaacguaaaagacuacagcauugugucgucuuaugucugcuccggucuugugggggacaccccgcggaagaaugauucaaguagcuccucucauuguuuggaccccaacaaugaggaaggaggccacggcguuaaagggugggccuuugaugacggaaacgauguguggaugggucgcacgaucagcgagaagcugcgaucaggcuacgagaccuucaaagucaucgaaggguggaguaagccuaauuccaaacuacagauuaacagacaggugaucguagacaggggaaaucggagcggcuauucugguauauuuucaguugaggggaagaguugcauuaaccguuguuucuacguggaacucauccgcggcagaaagcaggagacagaaguccuguggacuagcaauuccauuguggucuuuugcggaaccucuggcacauaugggacuggaucguggccagauggugcggacaucaaccuuaugcccaucuga

SEQ ID NO: 143934 - RNA, 1413 nt, Artificial Sequence; identical to SEQ ID NO: 142876
  derived and/or modified CDS sequence (opt3) from neuraminidase__InfluenzaA__ABU80301

SEQ ID NO: 143935 - RNA, 1413 nt, Artificial Sequence
  derived and/or modified CDS sequence (opt3) from neuraminidase__InfluenzaA__ABU80312
augaacaccaaucagaagaucauuacaauaggcagcaucuccauugccaucgggauuaucucucugaugcuccaaauaggaaacaucauuucaaucugggcuagucacagcauucagacugguucccagaaucauacgggcaucugcaaccagagaauaauuaccuacgaaaauucuacaugggugaaccacacuuaugucaauaucaacaauaccaacguuguggcagggaaagacaagacaucgguaacccuugccggaaauucaagccuguguaguauuuccggcugggcgaucuacacuaaagauaacucuaucaggauugguagcaagggggacguguucgucaugcgggagcccuuuauauccugcucacauuuggagugucgcacauucuuuuuaacccaaggagcucugcuaaaugauaaacacaguaacggcacggugaaggaccgaagcccuuaucgugcccucaugucuugcccacugggcgaagcaccgucccccuacaauucaaaguucgagagcguugccuggagugcuucugcaugucaugaugggaugggauggcuuacuaucgguauuuccggcccugacaacggggccguggcuguccugaaauauaacggaaucauaaccgaaacaauuaagagcuggaaaaagagaaucuugaggacucaggagucggagugcguguguguaaauggcucuugcuuuaccaucaugacagaugguccauccaacggggccgcgucauacaaaauuuucaagaucgaaaagggaaaaguuaccaagaguauugagcucaaugcacccaacuuucacuaugaagaguguagcugcuacccugacacgggcacugugaugugugucugccgggauaauuggcacggcuccaaccgcccaugggugucuuucaaucagaaccuggacuaccagauaggguauaucugcagcggaguguuuggugauaaucccagaccuaaagacggcgaggggucauguaacccagucacaguugauggagccgacggcgugaaggguuucaguuacaaauaugggaauggcguauggauuggaaggaccaaguccaaccggcugcgcaaaggcuuugaaaugaucugggacccgaauggguggacugauacagacagcaacuucucugugaagcaagaugucguggcuaucaccgacuggucaggauacagugguagcuuuguucagcaucccgagcucacgggcuuagauugcauucgaccuuguuucuggguggaacuggucagagggcuuccaagggagaauaccacaauauggacuuccggaucuucgaucagcuucugcggcgugaacuccgacaccgccaacuggucauggcccgauggugcagaauugccuuuuacaauugacaaguga

SEQ ID NO: 143936 - RNA, 1410 nt, Artificial Sequence; identical to SEQ ID NO: 142778
  derived and/or modified CDS sequence (opt3) from neuraminidase__InfluenzaA__ABU80323

SEQ ID NO: 143937 - RNA, 1410 nt, Artificial Sequence
  derived and/or modified CDS sequence (opt3) from neuraminidase__InfluenzaA__ABU80334
augaaccccaaucagaagaucauuaccauaggcagcgugucccugacaaucgccacuauuugcuuccucaugcaaaucgcuauucuugucacgaccguuacacugcacuuuaaacaguacgaguguaacucuccuccaaauaaccaggugauguugugcgaaccgacuaucauagagagaaauaucaccgaaauuguauauuuaacaaacaccacuaucgagaaggaaauuugucccaaacuggcagaguacaggaauuggucaaagccucagugcaacaucacaggguucgccccauuuaguaaagacaauagcauacggcuauccgcgggaggugauauuugggugacccgcgagcccuaugucucuugugacccugauaagugcuaccaauucgcucucggccaggggacgacucugaacaauggacauucgaacgacaccgugcacgaucgaacaccauaucguacucuucugaugaaugaauugggcguucccuuucaucucgguaccagacagguguguaucgccuggucaagcaguuccugccacgacgggaaggcauggcugcaugucugugugacaggagaugacgagaacgccaccgcuucuuucauuuacaauggcaggcugguagauagcaucggcuccuggaguaaaaagacgcuccggacucaggaaucagagugcguuuguaucaacgggacaugcaccguggucaugacugacggaagcgcaucugguaaagccgauacaaagauuuuauuuauagaggaaggcaaaaucauucacaucuccacccugucagggagcgcucaacacguggaggaaugcaguuguuauccucgcuacccaggagugagaugcgucuguagggacaacuggaagggcucuaaucggccgauaguugauauuaacgugaaggacuacuccaucguaagcucguaugugugcucuggucuugucggggacacgccccgcaaaaaugauuccuucucaaguagccauuguuuggacccuaacaaugaggaaggaggccacggcgugaaggggugggccuuugaugacggaaacgauguuuggaugggucgaaccaucuccgagaaacugagaucuggcuacgagacauucaaggugauugaaggguggagcaaaccaaauucaaagcuacagaucaacaggcaggucauuguggagcggggaaaucguaguggcuauuccgguauauuuagcguagaagggaaaucuugcaucaaccgcuguuucuacguugagcucauuagaggcaggaaggaagagacugaggugugguggaccucaaauaguaucgucguguuuugcggaacaagcggcacuuaugggaccggauccuggcccgacggugcggauaucaaccugaugccuauuuga

SEQ ID NO: 143938 - RNA, 1410 nt, Artificial Sequence; identical to SEQ ID NO: 142202
  derived and/or modified CDS sequence (opt3) from neuraminidase__InfluenzaA__ABU92762

SEQ ID NO: 143939 - RNA, 1410 nt, Artificial Sequence
  derived and/or modified CDS sequence (opt3) from neuraminidase__InfluenzaA__ABU92764
augaaccccaaucagaagaucauuaccauaggcagcgugucccugacaaucgccacuauuugcuuccucaugcaaaucgcuauucuugucacgaccguuacacugcacuuuaaacaguacgaguguaacucuccuccaaauaaccaggugauguugugcgaaccgacuaucauggagagaaauauaaccgaaaucguauauuuaacaaacaccacuauugagaaggaaaucugucccaaacuggcagaguacaggaauuggucaaagccucagugcaacgugacaggguucgccccauuuaguaaagacaauagcauucggcuauccgcgggaggugauaucugggucacccgcgagcccuaugugucuugugacccugauaagugcuaccaauucgcucucggccaggggacgacucugaacaauggacauucgaacgacaccguucacgaucgaacaccauaucguacucuucugaugaaugaauugggcgugcccuuucaucucgguaccagacaggucuguauagccuggucaagcaguuccugccacgacgggaaggcauggcugcauguguguguaacaggagaugacgagaacgccaccgcuucuuucauuuacaauggcaggcugguugauagcaucggcuccuggaguaaaaagauucuccggacgcaggaaucagagugcguguguaucaacgggacuugcacagucgugaugaccgacggaagcgcaucugguaaagccgauacuaagaucuuauuuauugaggaaggcaaaauagugcacaucuccacacugucagggagcgcucaacacgucgaggaaugcaguuguuauccucgcuacccaggaguuagaugcguguguagggacaacuggaagggcucuaaucggccgauuguagauaucaacgugaaggacuacuccauagucagcucguaugugugcucuggucuuguuggggacacgccccgcaaaaaugauuccuucucaaguagccauuguuuggacccuaacaaugaggaaggaggccacggcgugaaggggugggccuuugaugacggaaacgaugucuggaugggucgaaccauuuccgagaaacugagaucuggcuacgagaccuucaaggugaucgaaggguggagcaaaccaaauucaaagcuacagaucaacaggcagguaauuguugagcggggaaaucguaguggcuauuccgguaucuuuagcguggaagggaaaucuugcauuaaccgcuguuucuacgucgagcucauaagaggcaagaaggaagagacagaggugugguggacuucaaauaguaucgucguguuuugcggaaccagcggcacauaugggacuggauccuggcccgacggugcggauauuaaccugaugccuaucuga

SEQ ID NO: 143940 - RNA, 1410 nt, Artificial Sequence; identical to SEQ ID NO: 142202
  derived and/or modified CDS sequence (opt3) from neuraminidase__InfluenzaA__ABU92765

SEQ ID NO: 143941 - RNA, 1410 nt, Artificial Sequence; identical to SEQ ID NO: 142202
  derived and/or modified CDS sequence (opt3) from neuraminidase__InfluenzaA__ABU92766

SEQ ID NO: 143942 - RNA, 1410 nt, Artificial Sequence; identical to SEQ ID NO: 142202
  derived and/or modified CDS sequence (opt3) from neuraminidase__InfluenzaA__ABU92767

SEQ ID NO: 143943 - RNA, 1410 nt, Artificial Sequence; identical to SEQ ID NO: 142202
  derived and/or modified CDS sequence (opt3) from neuraminidase__InfluenzaA__ABU92768

SEQ ID NO: 143944 - RNA, 1410 nt, Artificial Sequence; identical to SEQ ID NO: 142109
  derived and/or modified CDS sequence (opt3) from neuraminidase__InfluenzaA__ABU92769

SEQ ID NO: 143945 - RNA, 1410 nt, Artificial Sequence; identical to SEQ ID NO: 142301
  derived and/or modified CDS sequence (opt3) from neuraminidase__InfluenzaA__ABU92770

SEQ ID NO: 143946 - RNA, 1410 nt, Artificial Sequence
  derived and/or modified CDS sequence (opt3) from neuraminidase__InfluenzaA__ABU92771
augaaccccaaucagaagaucauuaccauaggcagcgugucccugacaaucgccacuauuugcuuccucaugcaaaucgcuauucuugucacgaccguuacacugcacuuuaaacaguacgaguguaacucuccuccaaauaaccaggugauguugugcgaaccgacuaucauagagagaaauaucaccgaaauuguauauuuaacaaacaccacuaucgagaaggaaauuugucccaaacuggcagaguacaggaauuggucaaagccucagugcaacaucacaggguucgccccauuuaguaaagacaauagcauacggcuauccgcgggaggugauauuugggugacccgcgagcccuaugucucuugugacccuaacaagugcuaccaauucgcucucggccaggggacgacucugaauaacggacauucgaaugauaccgugcacgaccgaacaccauaucguacucuucugaugaacgaauugggcguucccuuucaucucgguaccaaacagguguguaucgccuggucaagcaguuccugccacgaugggaaggcauggcugcaugucugugugacaggagacgaugagaaugccaccgcuucuuucauuuacaacggcagacugguagacagcaucggcuccuggucaaagaaaauccucaggacgcaggaaagugagugcguuuguauuaacgggacuugcacaguggucaugaccgauggaagcgcaucugguaaggccgacacuaaaauauuauuuaucgaggaaggcaagauugugcacacaucccugcuuucagggagcgcucaacacguggaggaaugcaguuguuauccucgguacccaggaguccgcugcguuuguagagauaauuggaagggcucuaacaggccgaucguggacauaaauguaaaagauuacuccauugugagcucguaugucugcucugguuuggugggggacacuccccggaagaacgacuccucaaguagcucccauugucuggauccuaauaacgaggaaggaggccacggcguuaaagggugggccuucgacgauggaaaugacguguggaugggucgcacgaucucugagaagcuacgaagcggcuacgagaccuuuaaagucaucgaaggguggucaaagccaaacaguaaacuccagauuaauagacaggugaucguagauaggggaaaccgguccggcuauagcgguauuuucucuguugaggggaagucaugcauaaaucguuguuuuuacguggaacugauccgcggcagaaagcaggagacagaaguccuuuggaccaguaacagcauuguggucuucugcggaaccuccggcacauaugggacuggaucuuggcccgacggugcggauaucaaucugaugccuaucuga

SEQ ID NO: 143947 - RNA, 1410 nt, Artificial Sequence
  derived and/or modified CDS sequence (opt3) from neuraminidase__InfluenzaA__ABU92772
augaaccccaaucagaagaucauuaccauaggcagcgugucccugacaaucgccacuauuugcuuccucaugcaaaucgcuauucuugucacgaccguuacacugcacuuuaaacaguacgaguguaacucuccuccaaauaaccaggugauguugugcgaaccgacuaucauagagagaaauaucaccgaaauuguauauuuaacaaacaccacuaucgagaaggaaauuugucccaaacuggcagaguacaggaauuggucaaagccucagugcaacaucacaggguucgccccauuuaguaaagacaauagcauacggcuauccgcgggaggugauauuugggugacccgcgagcccuaugucucuugugacccugauaagugcuaccaauucgcucucggccaggggacgacucugaacaauggacauucgaacgacaccgugcacgaucgaacaccauaucguacucuucugaugaaugaauugggcguucccuuucaucucgguaccagacagguguguaucgccuggucaagcaguuccugccacgacgggaaggcauggcugcaugucugugugacaggagaugacgagaacgccaccgcuucuuucauuuacaauggcaggcugguagauagcaucggcuccuggaguaaaaacauccuccggacgcaggaaucagagugcguuuguauuaacgggacuugcacaguggucaugaccgacggaagcgcaucugguaaggccgauacuaaaauauuauuuaucgaggaaggcaagauugugcacaucuccacacugucagggagcgcucaacacguggaggaaugcaguuguuauccucgcuacccaggagucagaugcguuuguagggacaauuggaaaggcucuaaccggccgauaguggauauuaauguaaaggacuacuccaucgugagcucguaugucugcucuggucuugugggggacacccccaggaagaacgauuccuucucaaguagccauuguuuggacccuaauaacgaggaaggaggccacggcguuaaagggugggccuuugaugacggaaaugauguguggaugggucgaacgaucuccgagaagcugagaucuggcuacgagaccuucaaagucauugaaggguggagcaagccaaacucaaaacuacagaucaaucgccaggugauuguagagcggggaaaccguaguggcuauuccgguauauuuagcguugaagggaagucuugcaucaaucgcuguuucuacguggagcucauuagaggcaggaaagaagagacagaggucugguggacuucaaacaguaucguggucuuuugcggaaccagcggcacauaugggacuggauccuggcccgacggugcggauaucaaucugaugccuauuuga

SEQ ID NO: 143948 - RNA, 1410 nt, Artificial Sequence
  derived and/or modified CDS sequence (opt3) from neuraminidase__InfluenzaA__ABU92773
augaaccccaaucagaagaucauuaccauaggcagcgugucccugacaaucgccacuauuugcuuccucaugcagaucgcuauucuugucacgaccguuacacugcacuuuaaacaguacgaguguaacucuccuccaaauaaccaggugauguugugcgaaccgacuaucauagagagaaauaucaccgaaacaguauauuuaaccaacacuacaauugagaaggaaaucugucccaaacuggcagaguacaggaauuggucaaagccucagugcaacauuaccggguucgccccauuuaguaaagacaauagcauccggcuauccgcgggaggugauauaugggugacgcgcgagcccuaugucucuugugacccugauaagugcuaccaauucgcucucggccaggggacuacccugaacaauggacauucgaacgacacagugcacgaucgaacuccauaucguacccuucugaugaaugaauugggcguucccuuucaucucgguacaagacagguguguauugccuggucaagcaguuccugccacgacgggaaggcauggcugcaugucugugugaccggagaugacgagaacgccacggcuucuuucaucuacaauggcaggcugguagauagcauuggcuccuggaguaaaaagauccuccggacucaggaaucagagugcguuuguaucaacgggacaugcaccguggucaugacugacggaagcgcaucugguaaagccgauacaaagauuuuauuuauagaggaaggcaaaaucgugcacauuuccacccugucagggagcgcucaacacguggaggaaugcaguuguuauccucgcuacccaggagucagaugcguuuguagggacaacuggaagggcucuaaucggccgaucguggauauaaacguaaaggacuacuccauugugagcucguaugucugcucuggucuugugggggacacgccccgcaaaaaugauuccuucucaaguagccauuguuuggacccuaacaaugaggaaggaggccacggcguuaaggggugggccuuugaugacggaaacgauguguggaugggucgaaccaucuccgagaaacugagaucuggcuacgagacauucaaggucaucgaaggguggagcaaaccaaauucaaagcuacagacuaacaggcaagugauuguagagcggggaaaucguaguggcuauuccgguaucuuuagcguugaagggaaaucuugcauuaaccgcuguuucuacguggagcucauaagaggcaggaaggaagagaccgaggucugguggacaucaaauaguaucguggucuuuugcggaacuagcggcaccuaugggacaggauccuggcccgacggugcggauauuaaccugaugccuaucuga

SEQ ID NO: 143949 - RNA, 1410 nt, Artificial Sequence
  derived and/or modified CDS sequence (opt3) from neuraminidase__InfluenzaA__ABU92774
augaaccccaauagaaagaucauuaccauaggcagcgugucccugacaaucgccacuauuugcuuccucaugcagaucgcuauucuugucacgaccguuacacugcacuuuaaacaauacgaguguaacucuccuccaaauaaccaggugauguugugcgaaccgacuaucauagagaggaauaucaccgaaacaguauauuuaaccaacacuacaauugagaaggaaaucugucccaaacuggcagaguaccggaauuggucaaagccucagugcaacauuaccggguucgccccauuuaguaaagacaauagcauccgccuauccgcgggaggugauauaugggugacgcgagagcccuaugucucuugugacccugauaagugcuaccaguucgcucucggccaagggacuacccugaacaauggacauucgaacgacacagugcacgaucguacuccauauagaacccuucugaugaaugaauugggcguucccuuucaucucgguacacgacagguguguauugccuggucaagcaguuccugccacgacgggaaggcauggcugcaugucugugugaccggagaugacgagaacgccacggcuucuuucaucuacaauggccggcugguagauagcauuggcuccuggaguaaaaagauccuccgcacucaggaaucagagugcguuuguaucaacgggacaugcaccguggucaugacugacggaagcgcaucugguaaagccgauacaaagauuuuauuuauagaggaaggcaaaaucgugcacauuuccacccugucagggagcgcucagcacguggaggaaugcaguuguuauccuagauacccaggagucaggugcguuugucgggacaacuggaagggcucuaaucgcccgaucguggauauaaacguaaaggacuacuccauugugagcucguaugucugcucuggucuugugggggacacgcccaggaaaaaugauuccuucucaaguagccauuguuuggacccuaacaaugaggaaggaggccacggcguuaaggggugggccuuugaugacggaaacgauguguggauggguagaaccaucuccgagaaacugaggucuggcuacgagacauucaaggucaucgaaggguggagcaaaccaaauucaaagcuacaaacuaaccgucaggugauuguagagcggggaaaucgcaguggcuauuccgguaucuuuagcguugaagggaaaucuugcauuaacagauguuucuacguggagcucauaaggggccggaaggaagagaccgaggucugguggacaucaaauaguaucguggucuuuugcggaacuagcggcaccuaugggacaggauccuggcccgacggugcggauauuaaccugaugccuaucuga

SEQ ID NO: 143950 - RNA, 1410 nt, Artificial Sequence
  derived and/or modified CDS sequence (opt3) from neuraminidase__InfluenzaA__ABU92775
augaaccccaaucagaagaucauuaccauaggcagcgugucccugacaaucgccacuauuugcuuccucaugcaaaucgcuauucuugucacgaccguuacacugcacuuuaaacaguacgaguguaacucuccuccaaauaaccaggugauguugugcgaaccgacuaucauagagagaaauaucaccgaaauuguauauuuaacaaacaccacuaucgagaaggaaauuugucccaaacuggcagaguacaggaauuggucaaagccucagugcaacaucacaggguucgccccauuuaguaaagacaauagcauacggcuauccgcgggaggugauauuugggugacccgcgagcccuaugucucuugugacccugauaagugcuaccaauucgcucucggccaggggacgacucugaacaauggacauucgaacgacaccgugcacgaucgaacaccauaucguacucuucugaugaaugaauugggcguucccuuucaucucgguaccagacagguguguaucgccuggucaagcaguuccugccacgacgggaaggcauggcugcaugucugugugacaggagaugacaaaaacgccaccgcuucuuucauuuacaauggcaggcugguagauagcaucggcuccuggucaaagaaaauccuccggacgcaggagagugaaugcguuuguauuaacgggacuugcacaguggucaugaccgacggaagcgcaucugguaaggccgauacuaaaauauuauuuaucgaggagggcaagauugugcacaucuccacacugucagggagcgcucaacacguggaagagugcaguuguuauccucgcuacccaggagucagaugcguuuguagggacaacuggaagggcucuaaucggccgauaguggauauuaacguaaaagacuacuccaucgugagcucguaugucugcucuggucuugugggggacacccccaggaagaaugauuccuucucaaguagccauuguuuggacccuaacaaugaagagggaggccacggcguuaaagggugggccuuugaugacggaaacgauguguggaugggucgaacgaucuccgaaaagcugagaucuggcuacgagaccuucaaagucauugagggguggagcaagccaaauucaaaacuacagaucaaccgccaggugauuguagaacggggaaaucguaguggcuauuccgguauauuuagcguugaggggaagucuugcaucaaccgcuguuucuacguggaacucauuagaggcaggaaggaggaaacagaggucugguggacuucaaauaguaucguggucuuuugcggaaccagcggcacauaugggacuggauccuggcccgacggugcggauaucaaccugaugccuauuuga

SEQ ID NO: 143951 - RNA, 1410 nt, Artificial Sequence; identical to SEQ ID NO: 142375
  derived and/or modified CDS sequence (opt3) from neuraminidase__InfluenzaA__ABU92777

SEQ ID NO: 143952 - RNA, 1410 nt, Artificial Sequence
  derived and/or modified CDS sequence (opt3) from neuraminidase__InfluenzaA__ABU92778
augaaccccaaucagaagaucauuaccauaggcagcgugucccugacaaucucuacuauuugcuucuuuaugcaaaucgccauucucaucacgaccgucacacuucacuucaaacaguacgaguuuaacucaccuccaaauaaccagguuaugcugugugaaccgacuauaaucgagagaaauauuaccgaaaucguguauuugacaaacaccacuauugagaaggaaguaugccccaaauuagcugaguacaggaauuggaguaagccucaguguaacaucacaggguucgcaccauuuagcaaagacaauuccauacggcugucugccggaggugauauuugggugacccgcgagcccuaugucucgugcgacccugauaaguguuaccaauucgcgcuaggccaggggacgacucucaacaaugugcauucaaacgacaccguucacgaucgaacaccauaucguacucugcuuaugaaugaacugggagugcccuuucauuugggcaccaagcaggucugcaucgcuuggagcaguuccucuugucacgacgguaaagccuggcuccaugugugcguaacaggggaugacaagaacgcaaccgccagcuucauuuacaauggaagacugguugauuccaucgugucauggaguaaagagauccugaggacgcaggaaagcgagugugucugcauuaacggcacuuguacaguggugaugaccgacggcucugcuuccgggaaggcagauacuaaaauacucuuuaucgaggaaggaaagauuguccacacaucaaccuuaagcgguagugcccaacacguugaggaaugcucuugcuauccucgguacccaggcgugcgcuguguaugcagagacaacuggaagggguccaauaggccgaucguggauauaaacauuaaagacuacagcaucgucucgucuuauguguguuccggacugguuggcgacacgccccggaagaaugauucaaguagcuccucucauugccuugacccuaacaaugaggaaggugggcacggagugaaaggcugggcuuucgaugacggcaacgaugucuggauggggcgcaccaucagcgagaaguugcgaucaggauacgagacauuuaaagugauugaagguuggaguaauccaaacuccaagcugcagaucaauagacagguaauuguugacaggggcaaccggagcggguauucuggaauauucucaguggagggcaaaaguuguaucaaucguugcuuuuacgucgaacuaauucgcgguagaaaggaggaaacugaggugcucuggaccagcaacuccaucgucguguucugugggacaucuggcacuuauggaaccggcucguggcccgauggggccgacaucaaucugaugccuauuuga

SEQ ID NO: 143953 - RNA, 1410 nt, Artificial Sequence; identical to SEQ ID NO: 142273
  derived and/or modified CDS sequence (opt3) from neuraminidase__InfluenzaA__ABU92779

SEQ ID NO: 143954 - RNA, 1410 nt, Artificial Sequence; identical to SEQ ID NO: 142273
  derived and/or modified CDS sequence (opt3) from neuraminidase__InfluenzaA__ABU92780

SEQ ID NO: 143955 - RNA, 1410 nt, Artificial Sequence; identical to SEQ ID NO: 142273
  derived and/or modified CDS sequence (opt3) from neuraminidase__InfluenzaA__ABU92781

SEQ ID NO: 143956 - RNA, 1410 nt, Artificial Sequence
  derived and/or modified CDS sequence (opt3) from neuraminidase__InfluenzaA__ABU92782
augaaccccaaucagaagaucauuaccauaggcagcgugucccugacaaucgccgcuauuugcuuccucaugcagaucgcaauucuugucacuacgguuacccugcacuuuaaacagcaugaguguaacucuccuccaaauaaccaggugauguugugcgaaccgacaaucauagagagaaauaucacugaaauuguauacuuaaccaacacaaccaucgagaaggaaauuugucccaaacuggccgaguauaggaauuggucaaagccucagugcaacaucacuggguucgcgccauuuaguaaagacaauagcauacggcuauccgcuggaggugauauuugggugacacgcgagcccuacgucucuugugacccugauaagugcuaucaauucgcccucggccaggggaccacgcugaacaauggacacucgaacgacacugugcaugaucgaaccccauaccguacacuucugaugaaugaauugggcguucccuuucaccucgguacuagacagguguguaucgcauggucaagcaguuccugccaugacgggaaggccuggcugcacgucugugugaccggagaugacaaaaacgcuacagcaucuuucauuuauaauggcaggcugguagauagcaucggcuccuggucaaagaaaauccuccggacccaggagagugaaugcguuuguauuaacgggacgugcacuguggucaugacagacggaagcgccucugguaaggcugauaccaaaauauuauuuaucgaggagggcaagauugugcacaucuccacucugucagggagcgcccaacauguggaagagugcaguuguuacccucgcuauccaggagucagaugcguuuguagggacaacuggaagggcucuaaucggccgauaguggauauuaacguaaaagacuacuccaucgugagcucguacgucugcucuggucuugugggggacacaccccgcaagaaugauuccuucucaaguagccacuguuuggacccuaacaaugaagagggaggccauggcguuaaagggugggcguuugaugacggaaacgauguguggaugggucgaaccaucuccgaaaagcugagaucuggcuaugagacguucaaagucauugagggguggagcaagccaaauucaaaacuacagaucaacaggcaagugauuguagaacggggaaaucguaguggcuacuccgguauauuuagcguugaggggaagucuugcaucaaccgcuguuucuauguggaacucauuagaggcaggcgggaggaaaccgaggucugguggacaucaaauaguaucguggucuuuugcggaacuagcggcaccuacgggacaggauccuggcccgacggugcagauaucaaccugaugccuauuuga

SEQ ID NO: 143957 - RNA, 1410 nt, Artificial Sequence; identical to SEQ ID NO: 142273
  derived and/or modified CDS sequence (opt3) from neuraminidase__InfluenzaA__ABU92783

SEQ ID NO: 143958 - RNA, 1410 nt, Artificial Sequence; identical to SEQ ID NO: 142273
  derived and/or modified CDS sequence (opt3) from neuraminidase__InfluenzaA__ABU92784

SEQ ID NO: 143959 - RNA, 1410 nt, Artificial Sequence; identical to SEQ ID NO: 142273
  derived and/or modified CDS sequence (opt3) from neuraminidase__InfluenzaA__ABU92785

SEQ ID NO: 143960 - RNA, 1410 nt, Artificial Sequence; identical to SEQ ID NO: 142273
  derived and/or modified CDS sequence (opt3) from neuraminidase__InfluenzaA__ABU92786

SEQ ID NO: 143961 - RNA, 1410 nt, Artificial Sequence
  derived and/or modified CDS sequence (opt3) from neuraminidase__InfluenzaA__ABU92787
augaaccccaaucagaagaucauuaccauaggcagcgugucccugacaaucgccgcuauuugcuuccucaugcagaucgcaauucuugucacuacgguuacccugcacuuuaaacagcaugaguguaacucuccuccaaauaaccaggugauguugugcgaaccgacaaucauagagagaaauaucacugaaauuguauacuuaaccaacacaaccaucgagaaggaaauuugucccaaacuggccgaguauaggaauuggucaaagccucagugcaacaucacuggguucgcgccauuuaguaaagacaauagcauacggcuauccgcuggaggugauauuugggugacacgcgagcccuacgucucuugugacccugauaagugcuaucaauucgcccucggccaggggaccacgcugaacaauggacacucgaacgacacugugcaugaucgaaccccauaccguacacuucugaugaaugaauugggcguucccuuucaccucgguacuagacagguguguaucgcauggucaagcaguuccugccaugacgggaaggccuggcugcacgucugugugaccggagaugacaaaaacgcuacagcaucuuucauuuauaauggcaggcugguagauagcaucggcuccuggucaaagaaaauccuccggacccaggagagugaaugcguuuguauuaacgggacgugcacuguggucaugacagacggaagcgccucugguaaggcugauaccaaaauauuauuuaucgaggagggcaagauugugcacaucuccacucugucagggagcgcccaacauguggaagagugcaguuguuacccucgccacccaggagucagaugcguuuguagggacaacuggaagggcucuaaucggccgauaguggauauuaacguaaaagacuauuccaucgugagcucguacgucugcucuggucuugugggggacacaccccgcaagaaugauuccuucucaaguagccauuguuuggacccuaacaaugaagagggaggccacggcguuaaagggugggcguuugaugacggaaacgauguguggaugggucgaaccaucuccgaaaagcugagaucuggcuacgagacguucaaagucauugagggguggagcaagccaaauucaaaacuacagaucaacaggcaagugauuguagaacggggaaaucguaguggcuauuccgguauauuuagcguugaggggaagucuugcaucaaccgcuguuucuacguggaacucauuagaggcaggaaggaggaaaccgaggucugguggacaucaaauaguaucguggucuuuugcggaacuagcggcaccuaugggacaggauccuggcccgacggugcagauaucaaccugaugccuauuuga

SEQ ID NO: 143962 - RNA, 1410 nt, Artificial Sequence
  derived and/or modified CDS sequence (opt3) from neuraminidase__InfluenzaA__ABU92789
augaaccccaaucagaagaucauuaccauaggcagcgugucccugacaaucucuacuauuugcuucuuuaugcaaaucgccauucucaucacgaccgucacacuucacuucaaacaguacgaguuuaacccuccaccgaauaaccagguuaugcugugugaacccacuauaaucgagagaaauauuaccgaaaucguguauuugacaaacaccacuauugagaaggaaaucugcccuaaauuagcugaguacaggaauuggucaaagccacaguguaguauaacaggguucgcacccuuuagcaaagacaacuccauucggcugucugccggaggugauaucuggguaacccgcgagccuuaugugucgugcgacccagauaaguguuaccaauucgcgcuaggccaggggacgacucucaauaacguccauucaaaugacaccgugcacgaucgaacacccuaucguacucugcuuaugaacgaacugggaguuccuuuucauuugggcaccaaacaggugugcauugcuuggagcaguuccucuugucacgacgguaaggccuggcuccaugucugcgugacaggggaugacaagaaugcaaccgccagcuucaucuacaacggaagacugguagauuccaucguuucauggaguaaagagauucugaggacgcaggaaagcgagugugugugcauaaauggcacuuguacagucgugaugaccgacggcucugcuuccgggaaggcagauacuaaaauccucuuuauugaggaaggaaagaucgugcacacaucaaccuuaagcgguagugcccaacacgucgaggaaugcucuugcuauccacgguacccgggcguucgcugugugugcagagacaacuggaagggguccaacaggcccauaguagauauuaauaucaaagacuacagcaucgugucgucuuaugucuguuccggacuggugggcgacacgccucggaagaacgauucaaguagcuccucucauugccuugacccaaauaacgaggaaggugggcacggaguuaaaggcugggcuuucgaugacggcaaugauguguggauggggcgcaccauuagcgagaagucacgaaguggauacgagacauuuaaagucaucgaagguugguccaaccccaauagcaaguugcagauuaacagacaggugauaguagacaggggcaaucggucuggguauucaggaaucuucaguguugagggcaaaagcuguauuaaccguugcuuuuacguggaacugauccgcgguagaaaggaggaaacugagguccuauggaccuccaauucuaucguggucuucugugggacaucgggcacuuauggaaccggcagcuggccugauggggccgacauuaaccucaugccaauauga

SEQ ID NO: 143963 - RNA, 1410 nt, Artificial Sequence; identical to SEQ ID NO: 142375
  derived and/or modified CDS sequence (opt3) from neuraminidase__InfluenzaA__ABU92790

SEQ ID NO: 143964 - RNA, 1410 nt, Artificial Sequence
  derived and/or modified CDS sequence (opt3) from neuraminidase__InfluenzaA__ABU92791
augaaccccaaucagaagaucauuaccauaggcagcgugucccugacaaucucuacuauuugcuucuuuaugcaaaucgccauucucaucacgaccgucacacuucacuucaaacaguacgaguuuaacucaccuccaaauaaccagguuaugcugugugaaccgacuauaaucgagagaaauauuaccgaaaucguguauuugacaaacaccacuauugagaaggaaaucugccccaaauuagcugaguacaggaauuggaguaagccucagugugacauaacaggguucgcaccauuuagcaaagauaacuccauucggcugucugccggaggugacaucuggguaacccgcgagcccuaugugucgugcgauccugacaaguguuaccaauucgcgcuaggccaggggacgacucucaauaacguccauucaaaugauaccgugcacgaccgaacaccauaucguacucugcuuaugaacgaacugggaguucccuuucauuugggcaccaaacaggugugcauugcuuggagcaguuccucuugucacgaugguaaggccuggcuccaugucugcgugacaggggacgauaagaaugcaaccgccagcuucaucuacaacggaagacugguagacuccaucguuucauggaguaaaaagauucugaggacgcaggagagcgaaugugugugcauaaauggcacuuguacagucgugaugaccgauggcucugcuuccgggaaagcagacacuaagauccucuuuauugaggagggaaagaucgugcacacaucaaccuuaagcgguagugcccaacacgucgaagagugcucuugcuauccucgguacccaggcguucgcugugugugcagagauaacuggaaaggguccaacaggccgauaguagacauuaauaucaaggacuacagcacggugucgucuuaugucuguuccggacuggugggcgauacaccccggaaaaacgacucaaguagcuccucucauugccuugauccuaauaacgaagagggugggcacggaguuaagggcugggcuuucgacgauggcaaugacguguggauggggcgcaccaucagcgaaaaauugcgaucaggauacgagacuuuuaaggucauugaggguuggaguaacccaaauuccaaacugcagaucaacagacaggugauuguagauaggggcaaucggagcggguauucuggaauauucucaguugaaggcaagaguuguaucaaccguugcuuuuacguggagcuaauucgcgguagaaaggaagagaccgaaguccucuggacaagcaauuccaucguggucuucugugggacuucuggcaccuauggaacaggcucguggcccgacggggccgauaucaaccugaugccuauuuga

SEQ ID NO: 143965 - RNA, 1410 nt, Artificial Sequence
  derived and/or modified CDS sequence (opt3) from neuraminidase__InfluenzaA__ABU92792
augaaccccaaucagaagaucauuaccauaggcagcgugucccugacaaucucuacuauuugcuucuuuaugcaaaucgccauucucaucacgaccgucacacuucacuucaaacaguacguuuuuaacucaccuccaaauaaccaggugaugcugugugagccgacuauaaucgaaagaaauauuaccgagaucguauauuugacaaacaccacuauugaaaaggagaucugccccaaauuagcugaauacaggaauuggaguaagccucagugugacauaacaggguucgcaccauuuagcaaagauaacuccauucggcugucugccggaggugacaucugggugacccgcgagcccuaugucucgugcgauccugacaaguguuaccaauucgcgcuaggccaggggacgacucucaauaacgugcauucaaaugauaccguucacgaccgaacaccauaucguacucugcuuaugaacgagcugggagugcccuuucauuugggcaccaagcaggucugcauugcuuggagcaguuccucuugucacgaugguaaagccuggcuccaugugugcguaacaggggacgauaagaaugcaaccgccagcuucaucuacaacggaagacugguugacuccguggucucauggaguaaagauauccugaggacgcaggaaagcgagugugugugcauuaauggcacuuguacaguggucaugaccgacggcucugcuuccgggaaggcagauacuaaaauacucuuuaucgaagagggaaagauuguucacacaucaaccuuaagcgguagugcccaacacguggaggaaugcucuugcuauccucgguacccaggcguacgcugugugugcagagacaacuggaagggguccaacaggccgaucgucgacauaaauauuaaaaacuacagcaucgugucgucuuauguuuguuccggacuggugggcgauacgccccggaagaccgacucaaguagcuccucucauugccuugauccuaauaacgaggaaggugggcacggagucaaaggcugggcuuucgacgauggcaaugacguguggauggggcgcacaaucagcgagaaguugcgacugggauacgaaacuuuuaaaguaauugaggguuggucaaacccaaauaguaagcuacagaucaacagacagguuauuguggauaggggcaaucgguccggguauagcggaauauucucugucgagggcaaaucauguaucaaccguugcuuuuacguggaacucauucgcgguagaaaggaggaaaccgagguccuguggacaaguaauagcaucgugguuuucugugggacuuccggcaccuauggaacaggcucuuggcccgacggggccgauaucaaccuuaugccuauuuga

SEQ ID NO: 143966 - RNA, 1410 nt, Artificial Sequence; identical to SEQ ID NO: 142855
  derived and/or modified CDS sequence (opt3) from neuraminidase__InfluenzaA__ABU92793

SEQ ID NO: 143967 - RNA, 1410 nt, Artificial Sequence; identical to SEQ ID NO: 143962
  derived and/or modified CDS sequence (opt3) from neuraminidase__InfluenzaA__ABU92794

SEQ ID NO: 143968 - RNA, 1410 nt, Artificial Sequence; identical to SEQ ID NO: 142273
  derived and/or modified CDS sequence (opt3) from neuraminidase__InfluenzaA__ABU92795

SEQ ID NO: 143969 - RNA, 1410 nt, Artificial Sequence; identical to SEQ ID NO: 142273
  derived and/or modified CDS sequence (opt3) from neuraminidase__InfluenzaA__ABU92796

SEQ ID NO: 143970 - RNA, 1410 nt, Artificial Sequence
  derived and/or modified CDS sequence (opt3) from neuraminidase__InfluenzaA__ABU92797
augaaccccaaucagaagaucauuaccauaggcagcgugucccugacaaucgccgcuauuugcuuccucaugcaaaucgcaauucuugucacuacgguuacccugcacuuuaaacagcaugaguguaacucuccuccaaauaaccaggugauguugugcgaaccgacaaucauagagagaaauaucacugaaauuguauacuuaaccaacacaaccaucgagaaggaaauuugucccaaacuggccgaguauaggaauuggucaaagccucagugcaacaucacuggguucgcgccauuuaguaaagacaauagcauacggcuauccgcuggaggugauauuugggugacacgcgagcccuacgucucuugugacccugauaagugcuaucaauucgcccucggccaggggaccacgcugaacaauggacacucgaacgacacugugcaugaucgaaccccauaccguacacuucugaugaaugaauugggcguucccuuucaccucgguacuagacagguguguaucgcauggucaagcaguuccugccaugacgggaaggccuggcugcacgucugugugaccggagaugacaaaaacgcuacagcaucuuucauuuauaauggcaggcugguagauagcaucggcuccuggucaaagcggauccuccgcacccaggagagugaaugcguuuguauuaacgggacgugcacuguggucaugacagacggaagcgccucugguaaagcugauaccaagauauuauuuaucgaggagggcaaaauugugcacaucuccacucugucagggagcgcccaacauguggaagagugcaguuguuacccuagauauccaggagucaggugcguuugucgggacaacuggaagggcucuaaucgcccgauaguggauauuaacguaaaggacuacuccaucgugagcucguacgucugcucuggucuugugggggacacaccccggaaaaaugauuccuucucaaguagccacuguuuggacccuaacaaugaagagggaggccauggcguuaaggggugggcguuugaugacggaaacgauguguggauggguagaaccaucaaugaaaaacugagguccggcuaugagacguucaaggucauugagggguggucuaaaccaaacagcaagcuacagaucaaucgacaggugauuguagaacguggaaaccgcucaggcuacagugguauauuuuccguugaggggaaaagcugcaucaauagauguuucuauguggaacucauuaggggccggaaggaggaaaccgaggucugguggacaucuaacucaaucguggucuuuugcggaaccaguggcacuuacgggacaggaagcuggcccgacggugcagauaucaaucugaugccuauuuga

SEQ ID NO: 143971 - RNA, 1410 nt, Artificial Sequence; identical to SEQ ID NO: 142273
  derived and/or modified CDS sequence (opt3) from neuraminidase__InfluenzaA__ABU92798

SEQ ID NO: 143972 - RNA, 1410 nt, Artificial Sequence; identical to SEQ ID NO: 142273
  derived and/or modified CDS sequence (opt3) from neuraminidase__InfluenzaA__ABU92799

SEQ ID NO: 143973 - RNA, 1410 nt, Artificial Sequence; identical to SEQ ID NO: 142273
  derived and/or modified CDS sequence (opt3) from neuraminidase__InfluenzaA__ABU92800

SEQ ID NO: 143974 - RNA, 1410 nt, Artificial Sequence
  derived and/or modified CDS sequence (opt3) from neuraminidase__InfluenzaA__ABU92801
augaaccccaaucagaagaucauuaccauaggcagcgugucccugacaaucgccgcuauuugcuuccucaugcagaucgcaauucuugucacuacgguuacccugcacuuuaaacagcaugaguguaacucuccuccaaauaaccaggugauguugugcgaaccgacaaucauagagagaaauaucacugaaauuguacacuuaaccaacacaaccaucgagaaggaaauuugucccaaacuggccgaguacaggaauuggucaaagccucagugcaacaucacuggguucgcgccauuuaguaaagacaauagcauacggcuauccgcuggaggugauauuugggugacacgcgagcccuaugucucuugugacccugauaagugcuaccaauucgcccucggccaggggaccacgcugaacaauggacauucgaacgacacugugcacgaucgaaccccauaucguacacuucugaugaaugaauugggcguucccuuucaucucgguacuagacagguguguaucgcauggucaagcaguuccugccacgacgggaaggccuggcugcacgucugugugaccggagaugacaaaaacgcuacagcaucuuucauuuacaauggcaggcugguagauagcaucggcuccuggucaaagaaaauccuccggacccaggagagugaaugcguuuguauuaacgggacgugcacuguggucaugacagacggaagcgccucugguaaggcugauaccaaaauauuauuuaucgaggagggcaagauugugcauaucuccacucugucagggagcgcccaacacguggaagagugcaguuguuauccucgcuacccaggagucagaugcguuuguagggacaacuggaagggcucuaaucggccgauaguggauauuaacguaaaagacuauuccaucgugagcucguacgucugcucuggucuugugggggacacaccccgcaagaaugauuccuucucaaguagccauuguuuggacccuaacaaugaagagggaggccacggcguuaaagggugggcguuugaugacggaaacgauguguggaugggucgaaccaucuccgaaaagcugagaucuggcuacgagacguucaaagucauugagggguggagcaagccaaauucaaaacuacagaucaacaggcaagugauuguagaacggggaaaucguaguggcuauuccgguauauuuagcguugaggggaagucuugcaucaaccgcuguuucuacguggaacucauuagaggcaggaaggaggaaaccgaggucugguggacaucaaauaguaucguggucuuuugcggaacuagcggcaccuaugggacaggauccuggcccgacggugcagauaucaaccugaugccuauuuga

SEQ ID NO: 143975 - RNA, 1410 nt, Artificial Sequence; identical to SEQ ID NO: 142273
  derived and/or modified CDS sequence (opt3) from neuraminidase__InfluenzaA__ABU92802

SEQ ID NO: 143976 - RNA, 1410 nt, Artificial Sequence; identical to SEQ ID NO: 142273
  derived and/or modified CDS sequence (opt3) from neuraminidase__InfluenzaA__ABU92804

SEQ ID NO: 143977 - RNA, 1410 nt, Artificial Sequence
  derived and/or modified CDS sequence (opt3) from neuraminidase__InfluenzaA__ABU92805
augaaccccaaucagaagaucauuaccauaggcagcgugucccugacaaucucuacuauuugcuucuuuaugcaaaucgccauucucaucacgaccgucacacuucacuucaaacaguacgaguuuaacucaccuccaaauaaccagguuaugcugugugaaccgacuauaaucgagagaaauauuaccgaaaucguguauuugacaaacaccacuauugagaaggaaaucugccccaaauuagcugaguacaggaauuggaguaagccucaguguaacauaacaggguucgcaccauuuagcaaagacaauuccauucggcugucugccggaggugauaucuggguaacccgcgagcccuaugugucgugcgacccugauaaguguuaccaauucgcgcuaggccaggggacgacucucaacaauguccauucaaacgacaccgugcacgaucgaacaccauaucguacucugcuuaugaaugaacugggaguucccuuucauuugggcaccaaacaggugugcauugcuuggagcaguuccucuugucacgacgguaaggccuggcuccaugucugcgugacaggggaugacgagaacgcaaccgccagcuucaucuacaauggaagacugguagauuccaucguuucauggaguaagaaaauucugaggacgcaggaaagcgagugugugugcauaaacggcacuuguacagucgugaugaccgacggcucugcuuccgggaaggcagauacuaaaauccucuuuauugaggaaggaaagaucgugcacacaucaaccuuaagcgguagugcccaacacgucgaggaaugcucuugcuauccucgguacccaggcguucgcugugugugcagagacaacuggaagggguccaauaggccgauaguagauauuaacaucaaagacuacagcaucgugucgucuuaugucuguuccggacuggugggcgacacgccccggaagaaugauucaaguagcuccucucauugccuugacccuaacaaugaggaaggugggcacggaguuaaaggcugggcuuucgaugacggcaacgauguguggauggggcgcaccauuagcgagaaguugcgaucaggauacgagacauuuaaagucaucgaagguuggaguaauccaaacuccaagcugcagauuaauagacaggugauaguagacaggggcaaccggagcggguauucuggaaucuucucaguugagggcaaaaguuguauuaaucguugcuuuuacguggaacuaauccgcgguagaaagcaggagacugaaguccucuggaccagcaacuccaucguggucuucugugggacaucuggcacuuauggaaccggcucguggcccgauggggccgacauuaaucugaugccuauauga

SEQ ID NO: 143978 - RNA, 1410 nt, Artificial Sequence; identical to SEQ ID NO: 143977
  derived and/or modified CDS sequence (opt3) from neuraminidase__InfluenzaA__ABU92806

SEQ ID NO: 143979 - RNA, 1410 nt, Artificial Sequence
  derived and/or modified CDS sequence (opt3) from neuraminidase__InfluenzaA__ABU92808
augaaccccaaucagaagaucauuaccauaggcagcgugucccugacaaucgccacuauuugcuuccucaugcaaaucacgauucuugucaccacaguuacucugcacuuuaaacaguacgaguguaacucuccuccaaauaaccaggugauguugugcgaaccgaccaucauagagagaaauaucacagaaauuguauauuuaaccaacacuacaaucgagaaggaaauuugucccaaacuggcugaguacaggaauuggucaaagccucagugcaacaucaccggguucgcaccauuuaguaaagacaauagcauacggcuauccgccggaggugauauuugggugacgcgcgagcccuaugucucuugugacccugauaagugcuaccaauucgcgcucggccaggggacuacccugaacaauggacauucgaacgacacagugcacgaucgaacuccauaucguacccuucugaugaaugaauugggcguucccuuucaucucgguacaagacagguguguaucgcuuggucaagcaguuccugccacgacgggaaggccuggcugcaugucugugugaccggagaugacaaaaacgcaacggccucuuucauuuacaauggcaggcugguagauagcaucggcuccuggucaaagaaaauccuccggacucaggagagugaaugcguuuguauuaacgggacaugcaccguggucaugacugacggaagcgcuucugguaaggcagauacaaaaauauuauuuaucgaggagggcaagauuauccacauauccacccugucagggagcgcccaacacguggaagagugcaguuguuauccucgcuacccaggagugagaugcgucuguagggacaacuggaagggcucuaaucggccgauuguugauaucaacgugaaagacuacuccaucguaagcucguaugugugcucuggucuugucggggacacgccccgcaagaaugauuccucaaguagcucccauuguuuggacccuaacaaugaagagggaggccacggcgugaaagggugggcuuucgaugacggaaacgauguuuggaugggucgaaccauuucugaaaagcugagaagcggcuacgagacauuuaaagugaucgagggguggucaaagccaaauaguaaacuacagauuaacaggcaggucauaguggaacggggaaaucguuccggcuauagcgguaucuucucuguagaggggaagucaugcauuaaccgcuguuuuuacguugaacucaucagaggcaggaaggaggaaacugaggugugguggaccaguaauagcaucgucguguucugcggaacauccggcacuuaugggaccggaucuuggcccgacggugccgauauuaaccugaugccuauauga

SEQ ID NO: 143980 - RNA, 1410 nt, Artificial Sequence
  derived and/or modified CDS sequence (opt3) from neuraminidase__InfluenzaA__ABU92809
augaaccccaaucagaagaucauuaccauaggcagcgugucccugacaaucucuacuauuugcuucuuuaugcaaaucgccauucucaucacgaccgucacacuucacuucaaacaguacgaguuuaacucaccuccaaauaaccagguuaugcugugugaaccgacuauaaucgagagaaauauuaccgaaaucguguauuugacaaacaccacuauugagaaggaaaucugccccaaauuagcugaguacaggaauuggaguaagccucaguguaacauaacaggguucgcaccauuuagcaaagacaauuccauucggcugucugccggaggugauaucuggguaacccgcgagcccuaugugucgugcgacccugauaaguguuaccaauucgcgcuaggccaggggacgacucucaacaauguccauucaaacgacaccgugcacgaucgaacaccauaucguacucugcuuaugaaugaacugggaguucccuuucauuugggcaccaaacaggugugcauugcuuggagcaguuccucuugucacgacgguaaggccuggcuccaugucugcgugacaggggaugacaagaacgcaaccgccagcuucaucuacaauggaagacugguagauuccaucguuucauggaguaaagagauucugaggacgcaggaaagcgagugugugugcauaaacggcacuuguacagucgugaugaccgacggcucugcuuccgggaaggcagauacuaaaauccucuuuauugaggaaggaaagaucgugcacacaucaaccuuaagcgguagugcccaacacgucgaggaaugcucuugcuauccucgguacccaggcguucgcugugugugcagagacaacuggaagggguccaauaggccgauaguagauauuaacaucaaagacuacagcaucgugucgucuuaugucuguuccggacuggugggcgacacgccccggaagaaugauucaaguagcuccggucauugccuugacccuaacaaugaggaagggggacacggcguuaaaggcugggcuuucgaugacgggaacgauguguggaugggacgcaccauuucugagaaguugcgaagcgguuacgagacauuuaaagucaucgaaggcuggucaaauccaaacaguaagcugcagauuaauagacaggugauaguagacagggggaaccgguccggauauagcggcaucuucucuguugaggguaaaucauguauuaaucguugcuuuuacguggaacuaauccgcgggagaaaggaggaaacugauguccucuggaccaguaacagcaucguggucuucuguggcacauccggaacuuauggcaccgggucuuggcccgacggagccgauauuaaucugaugccuauauga

SEQ ID NO: 143981 - RNA, 1410 nt, Artificial Sequence
  derived and/or modified CDS sequence (opt3) from neuraminidase__InfluenzaA__ABU92810
augaaccccaaucagaagaucauuaccauaggcagcgugucccugacaaucgccgcuauuugcuuccucaugcagaucgcaauucuugucacuacgguuacccugcacuuuaaacagcaugaguguaacucuccuccaaauaaccaggugauguugugcgaaccgacaaucauagagagaaauaucacugaaauuguauacuuaaccaacacaaccaucgagaaggaaauuugucccaaacuggccgaguauaggaauuggucaaagccucagugcaacaucacuggguucgcgccauuuaguaaagacaauagcauacggcuauccgcuggaggugauauuugggugacacgcgagcccuacgucucuugugacccugauaagugcuaucaauucgcccucggccaggggaccacgcugaacaauggacacucgaacgacacugugcaugaucgaaccccauaccguacacuucugaugaaugaauugggcguucccuuucaccucgguacuagacagguguguaucgcauggucaagcaguuccugccaugacgggaaggccuggcugcacgucugugugaccggagaugacaaaaacgcuacagcaucuuucauuuauaauggcaggcugguagauagcaucggcuccuggucaaagaaaauccuccggacccaggagagugaaugcguuuguauuaacgggacgugcacuguggucaugacagacggaagcgccucugguaaggcugauaccaaaauauuauuuaucgaggagggcaagauugugcacaucuccacucugucagggagcgcccaacauguggaagagugcaguuguuacccucgcuauccaggagucagaugcguuuguagggacaacuggaagggcucuaaucggccgauaguggauauuaacguaaaagacuacuccaucgugagcucguacgucugcucuggucuugugggggacacaccccgcaagaaugauuccuucucaaguagccacuguuuggacccuaacaaugaagagggaggccauggcguuaaagggugggcguuugaugacggaaacgauguguggaugggucgaaccaucuccgaaaagcugagaucuggcuaugagacguucaaagucauugagggguggagcaagccaaauucaaaacuacagaucaacaggcaagugauuguagaaggaggcaaucggagugguuacuccgggauauuuagcguugagggcaagucuugcaucaaccguuguuucuauguggaacucauucgcggaagaaaggaggaaaccgaggucugguggacaucaaauaguaucguggucuuuugcggcacuagcgggaccuacggaacagguuccuggcccgacggcgcagauaucaaccugaugccuauuuga

SEQ ID NO: 143982 - RNA, 1410 nt, Artificial Sequence
  derived and/or modified CDS sequence (opt3) from neuraminidase__InfluenzaA__ABU92811
augaaccccaaucagaagaucauuaccauaggcagcgugucccugacaaucgccgcuauuugcuuccucaugcaaaucgcaauucuugucacuacgguuacccugcacuuuaaacagcaugaguguaacucuccuccaaauaaccaggugauguugugcgaaccgacaaugaucgagagaaauauaacugaaaucguauacuuaaccaacacaaccauugagaaggaaaucugucccaaacuggccgaguauaggaauuggucaaagccucagugcaacauuacuggguucgcgccauuuaguaaagacaauagcauccggcuauccgcugugggagauauaugggucacacgcgagcccuacgugucuugugacccugauaagugcuaucaauucgcccucggucagggcaccacgcugaacaaugggcacucgaacgacacuguucaugaucgaaccccauaccguacacuucugaugaaugaauugggagugcccuuucaccucggcacuagacaggucuguauugcauggucaagcaguuccugccaugacgguaaggccuggcugcacguguguguaaccggggaugacaaaaacgcuacagcaucuuucaucuauaauggaaggcugguugauagcauuggcuccuggucaaagaaaauccuccggacccaggagagugaaugcguguguaucaacggcacgugcacugucgugaugacagacgggagcgccucuggaaaggcugauaccaaaauuuuauuuauagaggaggguaagaucgugcacauuuccacucugucaggcagcgcccaacaugucgaagagugcaguuguuacccucgcuauccagggguuagaugcguguguagggacaacuggaagggaucuaaucggccgaucguagauauaaacgugaaagacuacuccauugucagcucguacgugugcucuggccuuguuggugacacaccccgcaagaaugauuccuucucaaguagccacuguuuggacccuaacaaugaagaagggggacauggcgugaaaggcugggcguuugaugacgggaacgaugucuggaugggacgaaccaucuccgagaagcugagaucugguuaugagacguucaaagugaucgagggcuggagcaagccaaauucaaaacuacagauuaacaggcagguaaucguugaacgggggaaucguaguggauacuccggcauuuuuagcguggaggguaagucuugcauaaaccgcuguuucuaugucgaacucaucagagggaggaaggaggaaaccgaggugugguggacaucaaauaguauugucguguuuugcggcacuagcggaaccuacggcacaggguccuggcccgacggagcagauaucaaccugaugccuaucuga

SEQ ID NO: 143983 - RNA, 1410 nt, Artificial Sequence; identical to SEQ ID NO: 142273
  derived and/or modified CDS sequence (opt3) from neuraminidase__InfluenzaA__ABU92814

SEQ ID NO: 143984 - RNA, 1410 nt, Artificial Sequence; identical to SEQ ID NO: 142762
  derived and/or modified CDS sequence (opt3) from neuraminidase__InfluenzaA__ABU92815

SEQ ID NO: 143985 - RNA, 1410 nt, Artificial Sequence; identical to SEQ ID NO: 142273
  derived and/or modified CDS sequence (opt3) from neuraminidase__InfluenzaA__ABU92816

SEQ ID NO: 143986 - RNA, 1410 nt, Artificial Sequence
  derived and/or modified CDS sequence (opt3) from neuraminidase__InfluenzaA__ABU92817
augaaccccaaucagaagaucauuaccauaggcagcgugucccugacaaucgccgcuauuugcuuccucaugcagaucgcaauucuugucacuacgguuacccugcacuuuaaacagcaugaguguaacucuccuccaaauaaccaggugauguugugcgaaccgacaaucauagagagaaauaucacugaaauuguauacuuaaccaacacaaccaucgagaaggaaauuugucccaaacuggccgaguauaggaauuggucaaagccucagugcaacaucacuggguucgcgccauuuaguaaagacaauagcauacggcuauccgcuggaggugauauuugggugacacgcgagcccuacgucucuugugacccugauaagugcuaucaauucgcccucggccaggggaccacgcugaacaauggacacucgaacgacacugugcaugaucgaaccccauaccguacacuucugaugaaugaauugggcguucccuuucaccucgguacuagacagguguguaucgcauggucaagcaguuccugccaugacgggaaggccuggcugcacgucugugugaccggagaugacaaaaacgcuacagcaucuuucauuuauaauggcaggcugguagauagcaucggcuccuggucaaagaaaauccuccggacccaggagagugaaugcguuuguauuaacgggacgugcacuguggucaugacagacggaagcgccucugguaaggcugauaccaaaauauuauuuaucgaggagggcaagauugugcacaucuccacucugucagggagcgcccaacauguggaagagugcaguuguuacccucgcuauccaggagucagaugcguuuguagggacaacuggaagggcucuaaucggccgauaguggauauuaacguaaaagacuacuccaucgugagcucguacgucugcucuggucuugugggggacacaccccgcaagaaugauuccuucucaaguagccacuguuuggacccuaacaaugaagagggaggccauggcguuaaagggugggcguuugaugacggaaacgauguguggaugggucgaaccaucuccgaaaagcugagaucuggcuaugagacguucaaagucauugagggguggagcaagccaaauucaaaacuacagaucaacaggcaagugauuguagaacggggaaaucguaguggcuacuccgguauauuuagcguugagucuaagucaugcaucaaccgcuguuucuauguggaacucauuagagggaggaaggaggaaaccgaggucugguggacaaguaauagcaucguggucuuuugcggcacuuccggaaccuacggcacagggucuuggcccgacggagcagauaucaaccugaugccuauuuga

SEQ ID NO: 143987 - RNA, 1410 nt, Artificial Sequence; identical to SEQ ID NO: 142273
  derived and/or modified CDS sequence (opt3) from neuraminidase__InfluenzaA__ABU92818

SEQ ID NO: 143988 - RNA, 1410 nt, Artificial Sequence; identical to SEQ ID NO: 142273
  derived and/or modified CDS sequence (opt3) from neuraminidase__InfluenzaA__ABU92819

SEQ ID NO: 143989 - RNA, 1410 nt, Artificial Sequence; identical to SEQ ID NO: 142273
  derived and/or modified CDS sequence (opt3) from neuraminidase__InfluenzaA__ABU92821

SEQ ID NO: 143990 - RNA, 1410 nt, Artificial Sequence; identical to SEQ ID NO: 142273
  derived and/or modified CDS sequence (opt3) from neuraminidase__InfluenzaA__ABU92822

SEQ ID NO: 143991 - RNA, 1410 nt, Artificial Sequence; identical to SEQ ID NO: 142185
  derived and/or modified CDS sequence (opt3) from neuraminidase__InfluenzaA__ABU92823

SEQ ID NO: 143992 - RNA, 1410 nt, Artificial Sequence
  derived and/or modified CDS sequence (opt3) from neuraminidase__InfluenzaA__ABU92824
augaaccccaaucagaagaucauuaccauaggcagcgugucccugacaaucgccgcuauuugcuuccucaugcaaaucgcaauucuugucacuacgguuacccugcacuuuaaacagcaugaguguaacucuccuccaaauaaccaggugauguugugcgaaccgacaaucauagagagaaauaucacugaaauuguauacuuaaccaacacaaccaucgagaaggaaauuugucccaaacuggccgaguauaggaauuggucaaagccucagugcaacaucacuggguucgcgccauuuaguaaagacaauagcauacggcuauccgcuggaggugauauuugggugacacgcgagcccuacgucucuugugacccugauaagugcuaucaauucgcccucggccaggggaccacgcugaacaauggacacucgaacgacacugugcaugaucgaaccccauaccguacacuucugaugaaugaauugggcguucccuuucaccucgguacuagacagguguguaucgcauggucaagcaguuccugccaugacgggaaggccuggcugcacgucugugugaccggagaugacaaaaacgcuacagcaucuuucauuuauaauggcaggcugguagauagcaucggcuccuggucaaagaaaauccuccggacccaggagagugaaugcguuuguauuaacgggacgugcacuguggucaugacagacggaagcgccucugguaaggcugauaccaaaauauuauuuaucgaggagggcaagauugugcacaucuccacucugucagggagcgcccaacauguggaagagugcaguuguuacccucgcuauccaggagucagaugcguuuguagggacaacuggaagggcucuaaucggccgauaguggauauuaacguaaaagacuacuccaucgugagcucguacgucugcucuggucuugugggggacacaccccgccgaaaugauuccuucucaaguagccacuguuuggacccuaacaaugaagagggaggccauggcguuaaggggugggcguuugaugacggaaacgauguguggauggguagaaccaucuccgaaaaacugaggucuggcuaugagacguucaaggucauugagggguggagcaaaccaaauucaaagcuacagaucaaccgucaggugauuguagaacggggaaaucgcaguggcuacuccgguauauuuagcguugaggggaaaucuugcaucaacagauguuucuauguggaacucauuaggggccggaaggaggaaaccgaggucugguggacaucaaauaguaucguggucuuuugcggaacuagcggcaccuacgggacaggauccuggcccgacggugcagauaucaaccugaugccuauuuga

SEQ ID NO: 143993 - RNA, 1410 nt, Artificial Sequence
  derived and/or modified CDS sequence (opt3) from neuraminidase__InfluenzaA__ABU92825
augaaccccaaucagaagaucauuaccauaggcagcgugucccugacaaucucuacuauuugcuucuuuaugcaaaucgccauucucaucacgaccgucacacuucacuucaaacaguacgaguuuaacucaccuccaaauaaccagguuaugcugugugaaccgacuauaaucgagagaaauauuaccgaaaucguguauuugacaaacaccacuauugagaaggaaaucugccccaaauuagcugaguacaggaauuggaguaagccucagugugacauaacaggguucgcaccauuuagcaaagauaacuccauucggcugucugccggaggugacaucuggguaacccgcgagcccuaugugucgugcgauccuaauaaguguuaccaauucgcgcuaggccaggggacgacucucaacaauguccauucaaacgacaccgugcacgaucgaacaccauaucguacucugcuuaugaaugaacugggaguucccuuucauuugggcaccaaacaggugugcauugcuuggagcaguuccucuugucacgacgguaaggccuggcuccaugucugcgugacaggggaugacaagaacgcaaccgccagcuucaucuacaauggaagacugguagauuccaucguuucauggaguaaaaagauucugaggacgcaggagagcgaaugugugugcauaaacggcacuuguacagucgugaugaccgacggcucugcuuccgggaaagcagauacuaagauccucuuuauugaggagggaaagaucgugcacacaucaaccuuaagcgguagugcccaacacgucgaagagugcucuugcuauccucgguacccaggcguucgcugugugugcagagacaacuggaaaggguccaauaggccgauaguagauauuaacaucaaggacuacagcaucgugucgucuuaugucuguuccggacuggugggcgacacgccccggaaaaaugauucaaguagcuccucucauugccuugacccuaacaaugaagagggugggcacggaguuaagggcugggcuuucgaugacggcaacgauguguggauggggcgcaccauuagcgaaaaaucacgaaguggauacgagacauuuaaggucaucgaggguugguccaauccaaacagcaaauugcagauuaauagacaggugauaguagacaggggcaaccggucuggguauucaggaaucuucaguguugaaggcaagagcuguauuaaucguugcuuuuacguggagcugauccgcgguagaaaggaagagacugaaguccuauggaccuccaacucuaucguggucuucugugggacaucgggcacuuauggaaccggcagcuggcccgauggggccgacauuaaucucaugccuauauga

SEQ ID NO: 143994 - RNA, 1410 nt, Artificial Sequence; identical to SEQ ID NO: 143993
  derived and/or modified CDS sequence (opt3) from neuraminidase__InfluenzaA__ABU92826

SEQ ID NO: 143995 - RNA, 1410 nt, Artificial Sequence; identical to SEQ ID NO: 142273
  derived and/or modified CDS sequence (opt3) from neuraminidase__InfluenzaA__ABU92827

SEQ ID NO: 143996 - RNA, 1410 nt, Artificial Sequence; identical to SEQ ID NO: 142273
  derived and/or modified CDS sequence (opt3) from neuraminidase__InfluenzaA__ABU92828

SEQ ID NO: 143997 - RNA, 1410 nt, Artificial Sequence; identical to SEQ ID NO: 142762
  derived and/or modified CDS sequence (opt3) from neuraminidase__InfluenzaA__ABU92829

SEQ ID NO: 143998 - RNA, 1410 nt, Artificial Sequence
  derived and/or modified CDS sequence (opt3) from neuraminidase__InfluenzaA__ABU92830
augaaccccaaucagaagaucauuaccauaggcagcgugucccugacaaucgccgcuauuugcuuccucaugcaaaucgcaauucuugucacuacgguuacccugcacuuuaaacagcaugaguguaacucuccuccaaauaaccaggugauguugugcgaaccgacaaucauagagagaaauaucacugaaauuguauacuuaaccaacacaaccaucgagaaggaaauuugucccaaacuggccgaguauaggaauuggucaaagccucagugcaacaucacuggguucgcgccauuuaguaaagacaauagcauacggcuauccgcuggaggugauauuugggugacacgcgagcccuacgucucuugugacccugauaagugcuaucaauucgcccucggccaggggaccacgcugaacaauggacacucgaacgacacugugcaugaucgaaccccauaccguacacuucugaugaaugaauugggcguucccuuucaccucgguacuagacagguguguaucgcauggucaagcaguuccugccaugacgggaaggccuggcugcacgucugugugaccggagaugacaaaaacgcuacagcaucuuucauuuauaauggcaggcugguagauagcaucggcuccuggucaaagaaaauccuccggacccaggagagugaaugcguuuguauuaacgggacgugcacuguggucaugacagacggaagcgccucugguaaggcugauaccaaaauauuauuuaucgaggagggcaagauugugcacaucuccacucugucagggagcgcccaacauguggaagagugcaguuguuacccucgcuauccaggagucagaugcguuuguagggacaacuggaagggcucuaaucggccgauaguggauauuaacguaaaagacuacuccaucgugagcucguacgucugcucuggucuugugggggacacaccccgcaagaaugauuccuucucaaguagccgauguuuggacccuaacaaugaagagggaggccacggcguuaaagggugggcguuugaugacggaaacgauguguggauggguagaaccaucuccgaaaagcugaggucuggcuaugagacguucaaagucauugagggguggagcaagccaaauucaaaacuacagaucaaccgucaggugauuguagaacggggaaaucgcaguggcuacuccgguauauuuagcguugaggggaagucuugcaucaacagauguuucuauguggaacucauuaggggccggaaggaggaaaccgaggucugguggacaucaaauaguaucguggucuuuugcggaacuagcggcaccuacgggacaggauccuggcccgacggugcagauaucaaccugaugccuauuuga

SEQ ID NO: 143999 - RNA, 1410 nt, Artificial Sequence; identical to SEQ ID NO: 142273
  derived and/or modified CDS sequence (opt3) from neuraminidase__InfluenzaA__ABU92831

SEQ ID NO: 144000 - RNA, 1410 nt, Artificial Sequence; identical to SEQ ID NO: 142273
  derived and/or modified CDS sequence (opt3) from neuraminidase__InfluenzaA__ABU92832

SEQ ID NO: 144001 - RNA, 1410 nt, Artificial Sequence; identical to SEQ ID NO: 142273
  derived and/or modified CDS sequence (opt3) from neuraminidase__InfluenzaA__ABU92833

SEQ ID NO: 144002 - RNA, 1410 nt, Artificial Sequence
  derived and/or modified CDS sequence (opt3) from neuraminidase__InfluenzaA__ABU92834
augaaccccaaucagaagaucauuaccauaggcagcgugucccugacaaucgccgcuauuugcuuccucaugcacaucgcaauucuugucacuacgguuacccugcauuuuaaacagcacgaguguaacucuccuccaaauaaccaggugauguugugcgaaccgacaaucauagagagaaauaucacugaaauuguauacuuaaccaacacaaccaucgagaaggaaauuugucccaaacuggccgaguauaggaauuggucaaagccucagugcaacaucacuggguucgcgccauuuaguaaagacaauagcauacggcuauccgcuggaggugauauuugggugacacgcgagcccuacgucucuugugacccugauaagugcuaucaguucgcccucggccaagggaccacgcugaacaauggacauucgaacgacacugugcacgaucgaaccccauaccguacacuucugaugaaugaauugggcguucccuuucaucucgguacuagacagguguguaucgcauggucaagcaguuccugccacgacgggaaggccuggcugcacgucugugugaccggagaugacgagaacgcuacagcaucuuucauuuauaauggcaggcugguagauagcaucggcuccuggaguaaaaagauccuccggacccaggaaucagagugcguuuguauuaacgggacgugcacuguggucaugacagacggaagcgccucugguaaagcugauaccaagauauuauuuaucgaggaaggcaaaauugugcauaucuccacucugucagggagcgcccagcacguggaggaaugcaguuguuacccucgcuauccaggagucagaugcguuuguagggacaacuggaagggcucuaaucggccgauaguggauauuaacguaaaggacuacuccaucgugagcucguacgucugcucuggucuugugggggacacaccccgcaaaaaugauuccuucucaaguagccauuguuuggacccuaacaaugaggaaggaggccacggcguuaaggggugggcguuugaugacggaaacgauguguggaugggucgaaccaucuccgagaaacugagaucuggcuaugagacguucaaggucauugaaggguggagcaaaccaaauucaaagcuacaaaucaacaggcaagugauuguagagcggggaaaucguaguggcuacuccgguauauuuagcguugaagggaaaucuugcaucaaccgcuguuucuauguggagcucauuagaggcaggaaggaagagaccgaggucugguggacaucaaauaguaucguggucuuuugcggaacuagcggcaccuacgggacaggauccuggcccgacggugcagauaucucucugaugccuauuuga

SEQ ID NO: 144003 - RNA, 1410 nt, Artificial Sequence; identical to SEQ ID NO: 142273
  derived and/or modified CDS sequence (opt3) from neuraminidase__InfluenzaA__ABU92835

SEQ ID NO: 144004 - RNA, 1410 nt, Artificial Sequence; identical to SEQ ID NO: 142273
  derived and/or modified CDS sequence (opt3) from neuraminidase__InfluenzaA__ABU92836

SEQ ID NO: 144005 - RNA, 1410 nt, Artificial Sequence
  derived and/or modified CDS sequence (opt3) from neuraminidase__InfluenzaA__ABU92837
augaaccccaaucagaagaucauuaccauaggcagcgugucccugacaaucucuacuauuugcuucuuuaugcaaaucgccauucucaucacgaccgucacacuucacuucaaacaguacgaguuuaacucaccuccaaauaaccagguuaugcugugugaaccgacuauaaucgagagaaauauuaccgaaaucguguauuugacaaacaccacuauugagaaggaaaucugccccaaauuagcugaguacaggaauuggaguaagccucagugugacauaacaggguucgcaccauuuagcaaagauaacuccauucggcugucugccggaggugacaucuggguaacccgcgagcccuaugugucgugcgauccugacaaguguuaccaauucgcgcuaggccaggggacgacucucaauaacguccauucaaaugauaccgugcacgaccgaacaccauaucguacucugcuuaugaacgaacugggaguucccuuucauuugggcaccaaacaggugugcauugcuuggagcaguuccucuugucacgaugguaaggccuggcuccaugucugcgugacaggggacgauaagaaugcaaccgccagcuucaucuacaacggaagacugguagacuccaucguuucauggaguaaaaagauucugaggacgcaggagagcgaaugugugugcauaaauggcacuuguacagucgugaugaccgauggcucugcuuccgggaaagcagacacuaagauccucuuuauugaggagggaaagaucgugcacacaucaaccuuaagcgguagugcccaacacgucgaagagugcucuugcuauccucgguacccaggcguucgcugugugugcagagauaacuggaaaggguccaacaggccgauaguagacauuaauaucaaggacuacagcaucgcuucgucuuauguguguuccggacuggucggcgauacgccccggaaaaacgacucaaguagcuccucucauugccuugauccuaauaacgaagagggugggcacggagugaagggcugggccuucgacgauggcaaugacguuuggauggggcgcaccauuagcgaaaaauugcgaucaggauacgagacauuuaaggugaucgaggguuggaguaacccaaauuccaaacugcagauuaacagacaggucauaguggauaggggcaaucggagcggguauucuggaaucuucucaguagaaggcaagaguuguguuaaccguugcuuuuacguggagcuaauucgcgguagaaaggaagagacugaaguccucuggaccagcaauuccaucguggucuucugugggacaucuggcacuuauggaaccggcucguggcccgacggggcggauaucaaccugaugccuauuuga

SEQ ID NO: 144006 - RNA, 1410 nt, Artificial Sequence; identical to SEQ ID NO: 142273
  derived and/or modified CDS sequence (opt3) from neuraminidase__InfluenzaA__ABU92838

SEQ ID NO: 144007 - RNA, 1410 nt, Artificial Sequence; identical to SEQ ID NO: 142109
  derived and/or modified CDS sequence (opt3) from neuraminidase__InfluenzaA__ABU92839

SEQ ID NO: 144008 - RNA, 1410 nt, Artificial Sequence
  derived and/or modified CDS sequence (opt3) from neuraminidase__InfluenzaA__ABU92840
augaaccccaaucagaagaucauuaccauaggcagcgugucccugacaaucgccacuauuugcuuccucaugcaaaucgcuauucuugucacgaccguuacacugcacuuuaaacaguacgaguguaacucuccuccaaauaaccaggugauguugugcgaaccgacuaucauagagagaaauaucaccgaaauuguauauuuaacaaacaccacuaucgagaaggaaauuugucccaaacuggcagaguacaggaauuggucaaagccucagugcaacaucacaggguucgccccauuuaguaaagacaauagcauacggcuauccgcgggaggugauauuugggugacccgcgagcccuaugucucuugugacccugauaagugcuaccaauucgcucucggccaggggacgacucugaacaauggacauucgaacgacaccgugcacgaucgaacaccauaucguacucuucugaugaaugaauugggcguucccuuucaucucgguaccaaacagguguguaucgccuggucaagcaguuccugccacgacgggaaggcauggcugcaugucugugugacaggagaugacgagaacgccaccgcuucuuucauuuacaauggcagacugguagauagcaucggcuccuggucaaagaaaauccucaggacgcaggaaagugagugcguuuguauuaacgggacuugcacaguggucaugaccgacggaagcgcaucugguaaggccgauacuaaaauauuauuuaucgaggaaggcaagauugugcacaucucccugcuuucagggagcgcucaacacguggaggaaugcaguuguuauccucgguacccaggaguccgcugcguuuguagagacaacuggaagggcucuaauaggccgauaguggauauuaacguaaaagacuacuccaucgugagcucguaugucugcucugguuuggugggggacacaccccggaagaaugauuccucaaguagcucccauugucuggacccuaacaaugaggaaggaggccacggcguuaaagggugggccuucgaugacggaaacgauguguggaugggucgcaccaucucugagaagcuacgaagcggcuacgagacguuuaaagucauugaaggguggucaaagccaaauaguaaacuccagaucaacagacaggugauuguagacagggauaaucgguccggauauagcggcauauucucuguugaggguaagucaugcaucaaccguuguuuuuacguggaacugauucgcgggagaaagcaggagaccgaaguccuuuggacaaguaauagcaucguggucuucugcggcacuuccggaaccuauggcacagggucuuggcccgacggagcggauaucaaccugaugccuauuuga

SEQ ID NO: 144009 - RNA, 1410 nt, Artificial Sequence
  derived and/or modified CDS sequence (opt3) from neuraminidase__InfluenzaA__ABU92841
augaaccccaaucagaagaucauuaccauaggcagcgugucccugacaaucgccacuauuugcuuccucaugcaaaucgcuauucuugucacgaccguuacacugcacuuuaaacaguacgaguguaacucuccuccaaauaaccaggugauguugugcgaaccgacuaucauagagagaaauaucaccgaaauuguauauuuaacaaacaccacuaucgagaaggaaauuugucccaaacuggcagaguacaggaauuggucaaagccucagugcaacaucacaggguucgccccauuuaguaaagacaauagcauacggcuauccgcgggaggugauauuugggugacccgcgagcccuaugucucuugugacccugauaagugcuaccaauucgcucucggccaggggacgacucugaacaauggacauucgaacgacaccgugcacgaucgaacaccauaucguacucuucugaugaaugaauugggcguucccuuucaucucgguaccaaacagguguguaucgccuggucaagcaguuccugccacgacgggaaggcauggcugcaugucugugugacaggagaugacgagaacgccaccgcuucuuucauuuacaauggcagacugguagauagcaucggcuccuggucaaagaaaauccucaggacgcaggaaagugagugcguuuguauuaacgggacuugcacaguggucaugaccgacggaagcgcaucugguaaggccgauacuaaaauauuauuuaucgaggaaggcaagauugugcacacaucccugcuuucagggagcgcucaacacguggaggaaugcaguuguuauccucgguacccaggaguccgcugcguuuguagagacaacuggaagggcucuaauaggccgaucguggauauaaacguaaaagacuacuccauugugagcucguaugucugcucugguuuggugggggacacuccccggaagaaugauuccucaaguagcucccauugucuggacccuaacaaugaggaaggaggccacggcguuaaagggugggccuucgaugacggaaacgauguguggaugggucgcacgaucucugagaagcuacgaagcggcuacgagaccuuuaaagucaucgaaggguggucaaagccaaauaguaaacuccagauuaacagacaggugaucguagacagggauaaucgguccggauauagcggcauuuucucuguugaggguaagucaugcauaaaccguuguuuuuacguggaacugauccgcgggagaaagcaggagacagaaguccuuuggaccaguaauagcauuguggucuucugcggcaccuccggaacauauggcacugggucuuggcccgacggagcggauaucaaccugaugccuaucuga

SEQ ID NO: 144010 - RNA, 1410 nt, Artificial Sequence
  derived and/or modified CDS sequence (opt3) from neuraminidase__InfluenzaA__ABU92842
augaaccccaaucagaagaucauuaccauaggcagcgugucccugacaaucgccacuauuugcuuccucaugcaaaucgcuauucuugucacgaccguuacacugcacuuuaaacaguacgacuguaacucuccuccaaauaaccaggugauguugugcgagccgacuaucauagaaagaaauaucaccgagauuguauauuuaacaaacaccacuaucgaaaaggagauuugucccaaacuggcagaauacaggaauuggucaaagccucagugcaacaucacaggguucgccccauuuaguaaagauaauagcauacggcuauccgcgggaggugacauuugggugacccgcgagcccuaugucucuugugauccugacaagugcuaccaauucgcucucggccaggggacgacucugaacaauggacauucgaacgauaccgugcacgaccgaacaccauaucguacucuucugaugaaugaguugggcguucccuuucaucucgguaccaaacagguguguaucgccuggucaagcaguuccugccacgaugggaaggcauggcugcaugucugugugacaggagacgaugaaaacgccaccgcuucuuucauuuacaauggcagacugguagacagcaucggcuccuggucaaagaaaauccucaggacgcaggagagugaaugcguuuguauuaacgggacuugcacaguggucaugaccgauggaagcgcaucugguaaggccgacacuaaaauauuauuuaucgaggagggcaagauugugcacacaucccugcuuucagggagcgcucaacacguggaagagugcaguuguuauccucgguacccaggaguccgcugcguuuguagagauaacuggaagggcucuaauaggccgaucguggacauaaacguaaaagacuacuccauugugagcucguaugucugcucugguuuggugggggauacuccccggaagaaugacuccucaaguagcucccauugucuggauccuaacaaugaagagggaggccacggcguuaaagggugggccuucgacgauggaaacgacguguggaugggucgcacgaucucugaaaagcuacgaagcggcuacgagaccuuuaaagucaucgagggguggucaaagccaaauaguaaacuccagauuaacagacaggugaucguagauaggggaaaucgguccggcuauagcgguauuuucucuguugaagggaagucaugcauaaaccguuguuuuuacguggagcugauccgcggcagaaagcaggaaacagagguccuuuggaccaguaauagcauuguggucuucugcggaaccuccggcacauaugggacuggaucuuggcccgacggugcggauaucaaccugaugccuaucuga

SEQ ID NO: 144011 - RNA, 1410 nt, Artificial Sequence; identical to SEQ ID NO: 142109
  derived and/or modified CDS sequence (opt3) from neuraminidase__InfluenzaA__ABU92843

SEQ ID NO: 144012 - RNA, 1410 nt, Artificial Sequence; identical to SEQ ID NO: 143797
  derived and/or modified CDS sequence (opt3) from neuraminidase__InfluenzaA__ABU92844

SEQ ID NO: 144013 - RNA, 1410 nt, Artificial Sequence; identical to SEQ ID NO: 142109
  derived and/or modified CDS sequence (opt3) from neuraminidase__InfluenzaA__ABU92845

SEQ ID NO: 144014 - RNA, 1410 nt, Artificial Sequence; identical to SEQ ID NO: 142109
  derived and/or modified CDS sequence (opt3) from neuraminidase__InfluenzaA__ABU92846

SEQ ID NO: 144015 - RNA, 1410 nt, Artificial Sequence; identical to SEQ ID NO: 142109
  derived and/or modified CDS sequence (opt3) from neuraminidase__InfluenzaA__ABU92847

SEQ ID NO: 144016 - RNA, 1410 nt, Artificial Sequence; identical to SEQ ID NO: 142109
  derived and/or modified CDS sequence (opt3) from neuraminidase__InfluenzaA__ABU92848

SEQ ID NO: 144017 - RNA, 1410 nt, Artificial Sequence; identical to SEQ ID NO: 142762
  derived and/or modified CDS sequence (opt3) from neuraminidase__InfluenzaA__ABU92849

SEQ ID NO: 144018 - RNA, 1410 nt, Artificial Sequence
  derived and/or modified CDS sequence (opt3) from neuraminidase__InfluenzaA__ABU92850
augaaccccaaucagaagaucauuaccauaggcagcgugucccugacaaucucuacuauuugcuucuuuaugcaaaucgccauucucaucacgaccgucacacuucacuucaaacaguacgaguuuaacucaccuccaaauaaccagguuaugcugugugaaccgacuauaaucgagagaaauauuaccgaaaucguguauuugacaaacaccacuauugagaaggaaaucugccccaaauuaguagaguacaggaauuggaguaagccucagugugacauaacaggguucgcuccauuuagcaaagauaacuccauucggcugucugcaggaggugacaucugggugacccgcgagcccuaugucucgugcgauccugacaaguguuaccaauucgcccuaggccaggggacgacucucaauaacgugcauucaaaugauaccguucacgaccgaacaccauaucguacucugcuuaugaccgaacugggagugcccuuucauuugggcacaaagcaggucugcauugcguggagcaguuccucuugucacgaugguaaagcauggcuccaugugugcguaaccggggacgauaagaacgccacggcuagcuucaucuacaauggaagacugguugacuccaucgugucauggaguaaaaagauucugaggacucaggagagcgaaugugucugcauaaacggcacauguaccguggugaugacugauggcucugccuccgggaaagcugacacaaagauccucuuuauugaggagggaaagaucguccacaccucaacguuaagcgguagugcacaacacguugaagagugcucuugcuauccucgguacccaggcgugcgcuguguaugcagagauaauuggaaaggguccaacaggccgauaguggacauuaacaucaaggacuacagcaucgucucgucuuauguguguuccggacugguuggcgauacaccccggaaaaaugacucaaguagcuccucucauugccuugauccuaacaaugaagagggugggcacggagugaagggcugggccuucgacgauggcaacgacgucuggauggggcgcaccauuagcgaaaaauugcgaucaggauacgagacuuuuaaggugaucgaggguuggaguaauccaaacuccaaacugcagauuaauagacagguaauaguugauaggggcaaccggagcggguauucuggaaucuucucaguggaaggcaagaguuguauuaaucguugcuuuuacgucgagcuaauccgcgguagaaaggaagagaacgaagugcucuggaccagcaauuccaucgucguguucugugggacaucuggcacuuauggaaccggcucguggcccgacggggcugauauuaaccugaugccuauauga

SEQ ID NO: 144019 - RNA, 1410 nt, Artificial Sequence
  derived and/or modified CDS sequence (opt3) from neuraminidase__InfluenzaA__ABU92851
augaaccccaaucagaagaucauuaccauaggcagcgugucccugacaaucucuacuauuugcuucuuuaugcaaaucgccauucucaucacgaccgucacacuucacuucaaacaguacgaguuuaacucaccuccaaauaaccagguuaugcugugugaaccgacuauaaucgagagaaauauuaccgaaaucguguauuugacaaacaccacuauugagaaggaaaucugccccaaauuagcugaguacaggaauuggaguaagccucaguguagcauaacaggguucgcaccauuuuccaaagacaacucuauucggcugucggccggaggugauaucuggguaacccgcgagcccuaugugucaugcgacccugauaaguguuaccaauucgcgcuaggccaggggacgacucucaauaacguccauagcaaugacaccgugcacgaucgaacaccauaucguacucugcuuaugaacgaacugggaguucccuuucauuugggcaccaaacaggugugcauugcuuggaguuccucuagcugucacgacgguaaggccuggcuccaugucugcgugacaggggaugacaagaaugcaaccgccuccuucaucuacaacggaagacugguagauucaaucguuaguuggagcaaagagauucugaggacgcaggaaucugagugugugugcauaaauggcacuuguacagucgugaugaccgacggcuccgcuucagggaaggcagauacuaaaauccucuuuauugaggaaggaaagaucgugcacacaagcaccuuaagugguucugcccaacacgucgaggaaugcuccugcuauccucgguacccaggcguucgcugugugugcagagacaacuggaaggggagcaacaggccgauaguagauauuaauaucaaagacuacucgaucgugucuuccuaugucuguucaggacuggugggcgacacgccccggaaggaugacaguagcuccucuagccauugccuugauccuaacaaugaggaaggugggcacggaguuaaaggcugggcuuucgacgauggcaacgacguguggauggggcgcaccauuucagagaagagucgauccggauacgagacauuuaaagucaucgaagguuggagcaauccaaacucuaaguugcagauuaauagacaggugauaguagauaggggcaaccggucaggguauaguggaaucuucagcguugagggcaaauccuguauuaaucguugcuuuuacguggaacugauccgcgguagaaaggaggaaacugagguccuauggaccucuaacucgaucguggucuucugugggacaagcggcacuuauggaaccggcuccuggcccgacggggccgauauuaaucucaugccuauauga

SEQ ID NO: 144020 - RNA, 1410 nt, Artificial Sequence; identical to SEQ ID NO: 142273
  derived and/or modified CDS sequence (opt3) from neuraminidase__InfluenzaA__ABU92852

SEQ ID NO: 144021 - RNA, 1410 nt, Artificial Sequence
  derived and/or modified CDS sequence (opt3) from neuraminidase__InfluenzaA__ABU92853
augaaccccaaucagaagaucauuaccauaggcagcgugucccugacaaucgccgcuauuugcuuccucaugcaaaucgcaauucuugucacuacgguuacccugcacuuuaaacagcaugaguguaacucuccuccaaagaaucaggugauguugugcgaaccgacaaucauagagagaaacaucacugaaauuguauacaugaccaauacaaccaucgagaaagaaauuugucccaaguuagccgaguauaggaacuggucaaaaccucagugcaauaucacuggguucgcgccauuuaguaaggacaacagcauacggcuguccgcuggaggugauauuugggugacacgcgagcccuacgucucuugugacccugauaagugcuaucaauucgcccuaggccaggggaccacgcucaauaacggacacucgaaugacacugugcaugaucgaaccccauaccguacacugcuuaugaacgaacugggcguucccuuucacuuggguacuagacagguguguaucgcauggucaagcaguuccugccaugacgggaaagccuggcuccacgucugugugaccggagaugacaagaaugcuacagcaucuuucauuuauaacggcaggcugguagauagcaucguuuccuggaguaaaaagauccugcggacccaggagucagaaugcguguguauuaauggcacgugcacugucgugaugacagacgggagcgccucuggaaaagcugauaccaagauacucuuuaucgaggaggguaagauugugcacaucuccacuuuaucaggcagcgcccaacaugucgaagagugcaguuguuacccucgcuauccagggguuagaugcguguguagggacaacuggaaaggaucuaaccggccgauaguagauauuaaugugaaggacuacuccaucgucagcucguacgugugcucuggccugguuggugacacaccccgcaaaaacgauuccuucucaaguagccacugucuugacccuaauaacgaagaagggggacauggcgugaagggcugggcguuugaugacgggaaugaugucuggaugggacgaaccaucuccgagaaauugagaucugguuaugagacguucaaggugauugagggcuggagcaaaccaaacucaaagcugcagaucaauaggcagguaauuguugaacgggggaaccguaguggauacuccggcauauuuagcguggaggguaagucuugcaucaaucgcuguuucuaugucgaacuaauuagagggaggaaagaggaaaccgaggugugguggacaucaaacaguaucgucguguuuugcggcacuagcggaaccuacggcacaggguccuggcccgacggagcagauaucaaucucaugccuauuuga

SEQ ID NO: 144022 - RNA, 1410 nt, Artificial Sequence; identical to SEQ ID NO: 142273
  derived and/or modified CDS sequence (opt3) from neuraminidase__InfluenzaA__ABU92854

SEQ ID NO: 144023 - RNA, 1410 nt, Artificial Sequence
  derived and/or modified CDS sequence (opt3) from neuraminidase__InfluenzaA__ABU92855
augaaccccaaucagaagaucauuaccauaggcagcgugucccugacaaucgccgcuauuugcuuccucaugcagaucgcaauucuugucacuacgguuacccugcacuuuaaacagcaugaguguaacucuccuccaaauaaccaggugauguugugcgaaccgacaaucauagagagaaauaucacugaaauuguauacuuaaccaacacaaccaucgagaaggaaauuugucccaaacuggccgaguauaggaauuggucaaagccucagugcaacaucacuggguucgcgccauuuaguaaagacaauagcauacggcuauccgcuggaggugauauuugggugacacgcgagcccuacgucucuugugacccugauaagugcuaucaauucgcccucggccaggggaccacgcugaacaauggacacucgaacgacacugugcaugaucgaaccccauaccguacacuucugaugaaugaauugggcguucccuuucaccucgguacuagacagguguguaucgcauggucaagcaguuccugccaugacgggaaggccuggcugcacgucugugugaccggagaugacaaaaacgcuacagcaucuuucauuuauaauggcaggcugguagauagcaucggcuccuggucaaagaaaauccuccggacccaggagagugaaugcguuuguauuaacgggacgugcacuguggucaugacagacggaagcgccucugguaaggcugauaccaaaauauuauuuaucgaggagggcaagauugugcacaucuccacucugucagggagcgcccaacauguggaagagugcaguuguuacccucgcuauccaggagucagaugcguuuguagggacaacuggaagggcucuaaucggccgauaguggauauuaacguaaaagacuacuccaucgugagcucguacgucugcucuggucuugugggggacacaccccgcaagaaugauuccuucucaaguagccacuguuuggacccuaacaaugaagagggaggccauggcguuaaagggugggcguuugaugacggaaacgauguguggaugggucgaaccaucuccgaaaagcugagaucuggcuaugagacguucaaagucauugagggguggagcaagccaaauucaaaacuacagaucaacaggcaagugauuauagaacggggaaaucguaguggcuacuccgguaucuuuagcguagaggggaagucuugcauuaaccgcuguuucuauguugaacucaucagaggcaggaaggaggaaaccgaggugugguggacaucaaauaguaucgucguguuuugcggaacuagcggcaccuacgggacaggauccuggcccgacggugcagauauuaaccugaugccuauauga

SEQ ID NO: 144024 - RNA, 1410 nt, Artificial Sequence; identical to SEQ ID NO: 142193
  derived and/or modified CDS sequence (opt3) from neuraminidase__InfluenzaA__ABU92856

SEQ ID NO: 144025 - RNA, 1410 nt, Artificial Sequence; identical to SEQ ID NO: 142273
  derived and/or modified CDS sequence (opt3) from neuraminidase__InfluenzaA__ABU92857

SEQ ID NO: 144026 - RNA, 1410 nt, Artificial Sequence
  derived and/or modified CDS sequence (opt3) from neuraminidase__InfluenzaA__ABU92858
augaaccccaaucagaagaucauuaccauaggcagcgugucccugacaaucucuacuauuugcuucuuuaugcaaaucgccauucucaucacgaccgucacacuucacuucaaacaguacgaguuuaacucaccuccaaauaaccagguuauacugugugaaccgacuaucauugagagaaauaucaccgaaauuguguauuugacaaacaccacuaucgagaaggaaauaugccccaaauuagcugaguacaggaauuggaguaagccucagugugacauuacaggguucgcaccauuuagcaaagauaacuccauccggcugucugccggaggugacauuuggguaacccgcgagcccuaugugucgugcgauccugacaaguguuaccaauucgcgcuaggccaggggacgacucucaauaacguccauucaaaugauaccgugcacgaccgaacaccauaucguacucugcuuaugaacgaacugggaguucccuuucauuugggcaccaaacaggugugcaucgcuuggagcaguuccucuugucacgaugguaaggccuggcuccaugucugcgugacaggggacgauaagaaugcaaccgccagcuucaucuacaacggaagacugguagacuccauuguuucauggaguaaaaagauacugaggacgcaggagagcgaaugugugugcaucaauggcacuuguacagucgugaugaccgauggcucugcuuccgggaaagcagacacuaagauucucuuuaucgaggagggaaagauagugcacacaucaaccuuaagcgguagugcccaacacgucgaagagugcucuugcuauccucgguacccaggcguucgcugugugugcagagauaacuggaaaggguccaacaggccgauuguagacaucaauaucaaggacuacagcauugugucgucuuaugucuguuccggacuggugggcgauacgccccggaaaaacgacucaaguagcuccucucauugccuugauccuaauaacgaagagggugggcacggaguuaagggcugggcuuucgacgauggcaaugacguguggauggggcgcaccaucagcgaaaaauugcgaucaggauacgagacauuuaaggucauugaggguuggaguaacccaaauuccaaacugcagauaaacagacaggugaucguagauaggggcaaucggagcggguauucuggaauuuucucaguugaaggcaagaguuguaucaaccguugcuuuuacguggagcuaauccgcgguagaaaggaagagacugaaguccucuggaccagcaauuccauuguggucuucugugggacaucuggcacuuauggaaccggcucguggcccgacggggccgauauaaaccugaugccuaucuga

SEQ ID NO: 144027 - RNA, 1410 nt, Artificial Sequence
  derived and/or modified CDS sequence (opt3) from neuraminidase__InfluenzaA__ABU92859
augaaccccaaucagaagaucauuaccauaggcagcgugucccugacaaucgccgcuauuugcuuccucaugcagaucgcaauucuugucacuacgguuacccugcacuuuaaacagcaugaguguaacucuccuccaaauaaccaggugauguugugcgaaccgacaaucauagagagaaauaucacugaaauuguauacuuaaccaacacaaccaucgagaaggaaauuugucccaaacuggccggguauaggaauuggucaaagccucagugcaacaucacuggauucgcgccauuuaguaaagacaauagcauacggcuauccgcugguggcgauauuugggugacacgcgagcccuacgucucuugugacccugauaagugcuaucaauucgcccucgggcagggaaccacgcugaacaauggccacucgaacgacacugugcaugaucgaaccccauaccguacacuucugaugaaugaguuggguguucccuuucaccucgggacuagacagguguguaucgcauggucaagcaguuccugccaugacggaaaggccuggcugcacgucugugugaccggcgaugacaaaaacgcuacagcaucuuucauuuauaauggcaggcugguagauagcaucggguccuggucaaagaaaauccuccggacccaggaaagugagugcguuuguauuaacggaacgugcacuguggucaugacagacgguagcgccucuggcaaggcugauaccaaaauauuauuuaucgaagaggggaagauugugcacaucuccacucugucaggaagcgcccaacauguggaggaaugcaguuguuacccucgcuauccaggcgucagaugcguuuguagggacaacuggaaggguucuaaucggccgauaguggauauuaacguaaaagacuacuccaucgugagcucguacgucugcucugggcuugugggagacacaccccgcaagaaugauuccuucucaaguagccacuguuuggacccuaacaaugaggaaggcggccaugggguuaaaggaugggcguuugaugacgguaacgauguguggaugggccgaaccaucuccgagaagcugagaucuggguaugaaacguucaaagucauugagggauggagcaagccaaauucaaaacuacagaucaacaggcaagugauuguagagcggggcaaucguagugguuacuccgggauauuuagcguugaaggcaagucuugcaucaaccgcuguuucuauguggagcucauuagaggaaggaaggaagagaccgaagucugguggacaucaaauaguaucguggucuuuugcggcacuagcgggaccuacggaacagguuccuggcccgacggcgcagauaucaaccugaugccuauuuga

SEQ ID NO: 144028 - RNA, 1410 nt, Artificial Sequence
  derived and/or modified CDS sequence (opt3) from neuraminidase__InfluenzaA__ABU92860
augaaccccaaucagaagaucauuaccauaggcagcgugucccugacaaucgccgcuauuugcuuccucaugcaaaucgcaauucuugucacuacgguuacccugcacuuuaaacagcaugaguguaacucuccuccaaauaaccaggugauguugugcgaaccgacaaucauagagagaaauaucacugaaauuguauacuuaaccaacacaaccaucgagaaggaaauuugucccaaacuggccgaguauaggaauuggucaaagccucagugcaacaucacuggguucgcgccauuuaguaaagacaauagcauacggcuauccgcuggaggugauauuugggugacacgcgagcccuacgucucuugugacccugauaagugcuaucaauucgcccucggccaggggaccacgcugaacaauggacacucgaacgacacugugcaugaucgaaccccauaccguacacuucugaugaaugaauugggcguucccuuucaccucgguacuagacagguguguaucgcauggucaagcaguuccugccaugacgggaaggccuggcugcacgucugugugaccggagaugacaaaaacgcuacagcaucuuucauuuauaauggcaggcugguagauagcaucggcuccugguacaagaaaauccuccggacccaggagucagaaugcguuuguauuaacgggacgugcacuguggucaugacagacggaagugccagcgguaaggcugauaccaaaauauuauuuaucgaggagggcaagauugugcacaucucuacucuguccgggucagcccaacauguggaagagugcagcuguuauccucgcuacccaggagucagaugcguuuguagggacaacuggaagggcaguaaucggccgauaguggauauuaacguaaaagacuacucuaucaucuccagcuaugugugcucgggucuugucggggacacaccccgcaagaaugauucuuucuccucaagucacuguuuggacccuaacaaugaagagggaggccauggcgugaaagggugggcguuugaugacggaaacgauguuuggaugggucgaaccauuagcgaaaagcugagauccggcuacgagacguucaaagugaucgagggguggucuaagccaaauagcaaacuacagauuaacaggcaggucauaguggaacggggaaaucguucaggcuauagugguaucuuuuccguagaggggaagaguugcauuaaccgcuguuucuacguugaacucaucagaggcaggaaggaggaaaccgaggugugguggacaucuaauucaaucgucguguuuugcggaacuagcggcaccuaugggacaggaagcuggcccgacggugcagauauuaaccugaugccuauauga

SEQ ID NO: 144029 - RNA, 1410 nt, Artificial Sequence
  derived and/or modified CDS sequence (opt3) from neuraminidase__InfluenzaA__ABU92861
augaaccccaaucagaagaucauuaccauaggcagcgugucccugacaaucgccgcuauuugcuuccucaugcagaucgcaauucuugucacuacgguuacccugcacuuuaaacagcaugaguguaacucuccuccaaauaaccaggugauguugugcgaaccgacaaucauagagagaaauaucacugaaauuguauacuuaaccaacacaaccaucgagaaggaaauuugucccaaacuggccgaguauaggaauuggucaaagccucagugcaacaucacuggguucgcgccauuuaguaaagacaauagcauacggcuauccgcuggaggugauauuugggugacacgcgagcccuacgucucuugugacccugauaagugcuaucaauucgcccucggccaggggaccacgcugaacaauggacacucgaacgacacugugcaugaucgaaccccauaccguacacuucugaugaaugaauugggcguucccuuucaccucgguacuagacagguguguauggcauggucaagcaguuccugccaugacgggaaggccuggcugcacgucugugugaccggagaugacaaaaacgcuacagcaucuuucaucuauaauggcaggcugguagauagcauuggcuccuggucaaagaaaauccuccggacccaggagagugaaugcguuuguaucaacgggacgugcacuguggucaugacagacggaagcgccucugguaaggcugauaccaaaauuuuauuuauagaggagggcaagaucgugcacauuuccacucugucagggagcgcccaacauguggaagagugcaguuguuacccucgcuauccaggagucagaugcguuuguagggacaacuggaagggcucuaaucggccgaucguggauauaaacguaaaagacuacuccauugugagcucguacgucugcucuggucuugugggggacacaccccgcaagaaugauuccuucucaaguagccacuguuuggacccuaacaaugaagagggaggccauggcguuaaagggugggcguuugaugacggaaacgauguguggaugggucgaaccaucuccgaaaagcugagaucuggcuaugagacguucaaagucaucgagggguggagcaagccaaauucaaaacuacagauuaacaggcaagugaucguagaacggggaaaucguaguggcuacuccgguauuuuuagcguugaggggaagucuugcauaaaccgcuguuucuauguggaacucaucagaggcaggaaggaggaaaccgaggucugguggacaucaaauaguauuguggucuuuugcggaacuagcggcaccuacgggacaggauccuggcccgacggugcagauaucaaccugaugccuaucuga

SEQ ID NO: 144030 - RNA, 1410 nt, Artificial Sequence
  derived and/or modified CDS sequence (opt3) from neuraminidase__InfluenzaA__ABU92862
augaaccccaaucagaagaucauuaccauaggcagcgugucccugacaaucgccgcuauuugcuuccucaugcaaaucgcaauucuugucacuacgguuacccugcacuuuaaacagcaugaguguaacucuccuccaaauaaccaggugauguugugcgaaccgacaaucauagagagaaauaucacugaaauuguauacuuaaccaacacaaccaucgagaaggaaauuugucccaaacuggccgaguauaggaauuggucaaagccucagugcaacaucacuggguucgcgccauuuagucgggacaauagcauacgccuauccgcuggaggugauauuugggugacacgagagcccuacgucucuugugacccugauaaaugcuaucaauucgcccucggccaggggaccacgcugaacaauggacacucgaacgacacugugcaugaucguaccccauacagaacacuucugaugaaugaauugggcguucccuuucaccucgguacucgacagguguguaucgcauggucaagcaguuccugccaugacgggaaggccuggcugcacgucugugugaccggagaugacaagaacgcuacagcaucuuucauuuauaauggccggcugguagauagcaucggcuccuggaguaaaaagauccuccgcacccaggagucagaaugcguuuguauuaacgggacgugcacuguggucaugacagacggaagcgccucugguaaagcugauaccaagauauuauuuaucgaggagggcaaaauugugcacaucuccacucugucagggagcgcccaacauguggaagagugcaguuguuacccuagauauccaggagucaggugcguuugucgggacaacuggaagggcucuaaucgcccgauaguggauauuaacguaaaggacuacuccaucgugagcucguacgucugcucuggucuugugggggacacacccaggaaaaaugauuccuucucaaguagccacuguuuggacccuaacaaugaagagggaggccauggcguuaaggggugggcguuugaugacggaaacgauguguggauggguagaaccaucuccgaaaaacugaggucuggcuaugagacguucaaggucauugagggguggagcaaaccaaauucaaagcuacagaucaaccgucaggugauuguagaacggggaaaucgcaguggcuacuccgguauauuuagcguugaggggaaaucuugcaucaacagauguuucuauguggaacucauuaggggccggaaggaggaaaccgaggucugguggacaucaaauaguaucguggucuuuugcggaacuagcggcaccuacgggacaggauccuggcccgacggugcagauaucaaccugaugccuauuuga

SEQ ID NO: 144031 - RNA, 1410 nt, Artificial Sequence; identical to SEQ ID NO: 142273
  derived and/or modified CDS sequence (opt3) from neuraminidase__InfluenzaA__ABU92863

SEQ ID NO: 144032 - RNA, 1410 nt, Artificial Sequence
  derived and/or modified CDS sequence (opt3) from neuraminidase__InfluenzaA__ABU92865
augaaccccaaucagaagaucauuaccauaggcagcgugucccugacaaucucuacuauuugcuucuuuaugcaaaucgccauucucaucacgaccgucacacuucacuucaaacaguacgaguuuaacucaccuccaaauaaccagguuaugcugugugaaccgacuauaaucgagagaaauauuaccgaaaucguguauuugacaaacaccacuauugagaaggaaaucugccccaaauuagcugaguacaggaauuggaguaagccucagugugacauaacaggguucgcaccauuuagcaaagauaacuccauucggcugucugccggaggugacaucuggguaacccgcgagcccuaugugucgugcgaucuagacaaguguuaccaauucgcgcucggccaggggacgacucugaauaacguccauucaaaugauaccgugcacgaccgaacaccuuaucguacucuucugaugaacgaauugggaguuccauuucaucucggcaccaaacaggugugcauugcuuggagcaguuccucuugucacgaugguaaggccuggcugcaugucugcgugacaggggacgauaagaaugcaaccgccagcuucaucuacaacggaagacugguagacuccaucguuucauggaguaaaaagauucucaggacgcaggagagcgaaugugugugcauaaauggcacuuguacagucgugaugaccgauggcucugcuuccgggaaagcagacacuaagaucuuauuuauugaggagggaaagaucgugcacacaucaacccugagcgguagugcccaacacgucgaagagugcucuugcuauccccgguacccuggcguucgcugugugugcagagauaacuggaaaggguccaacaggccaauaguagacauuaauaucaaggacuacagcaucgugucgucuuaugucuguuccggacuugugggcgauacgccgcggaaaaacgacucaaguagcuccucucauugcuuggaucccaauaacgaagagggugggcacggaguuaagggcugggcuuucgacgauggcaaugacguguggauggggcgcaccauuagcgaaaaacugcgaucaggauacgagacauuuaaggucaucgaggguuggaguaacccuaauuccaaacuacagauuaacagacaggugauaguagauaggggcaaucggagcggguauucuggaaucuucucaguugaaggcaagaguuguauuaaccguugcuuuuacguggagcucauccgcgguagaaaggaagagacugaaguccuguggaccagcaauuccaucguggucuucugugggacaucuggcacuuauggaaccggcucguggccagacggggccgauauuaaccuuaugcccauauga

SEQ ID NO: 144033 - RNA, 1410 nt, Artificial Sequence
  derived and/or modified CDS sequence (opt3) from neuraminidase__InfluenzaA__ABU92866
augaaccccaaucagaagaucauuaccauaggcagcgugucccugacaaucucuacuauuugcuucuuuaugcaaaucgccauucucaucacgaccgucacacuucacuucaaacaguacgaguuuaacucaccuccaaauaaccagguuaugcugugugaaccgacuauaaucgagagaaauauuaccgaaaucguguauuugacaaacaccacuauugagaaggaaguaugccccaaauuagcugaguacaggaauuggaguaagccucagugugacaucacaggguucgcaccauuuagcaaagauaacuccauacggcugucugccggaggugacauuugggugacccgcgagcccuaugucucgugcgauccugacaaguguuaccaauucgcgcuaggccaggggacgacucucaauaacgugcauucaaaugauaccguucacgaccgaacaccauaucguacucugcuuaugaacgaacugggagugcccuuucauuugggcaccaagcaggucugcaucgcuuggagcaguuccucuugucacgaugguaaagccuggcuccaugugugcguaacaggggacgauaagaaugcaaccgccagcuucauuuacaacggaagacugguugacuccaucgugucauggaguaaagagauccugaggacgcaggaaagcgagugugucugcauuaauggcacuuguacaguggugaugaccgauggcucugcuuccgggaaggcagacacuaaaauacucuuuaucgaggaaggaaagauuguccacacaucaaccuuaagcgguagugcccaacacguugaggaaugcucuugcuauccucgguacccaggcgugcgcuguguaugcagagauaacuggaagggguccaacaggccgaucguggacauaaauauuaaagacuacagcaucgucucgucuuauguguguuccggacugguuggcgauacgccccggaagaacgacucaaguagcaauucccauugccuugauccuaacaaugaggaaggugggcacggagugaaaggcugggcuuucgacgauggcaacgacgucuggauggggcgcaccaucucugagaaguugcgaagcggauacgagacauuuaaagugauugaagguuggucaaauccaaacaguaagcugcagaucaauagacagguaauuguugauaggggcaaccgguccggguauagcggaauauucucuguggagggcaaaucauguaucaaucguugcuuuuacgucgaacuaauucgcgguagaaaggaggaaacugaggugcucuggaccaguaacagcaucgucguguucugugggacauccggcacuuauggaaccggcucuuggcccgacggggccgauaucaaucugaugccuauuuga

SEQ ID NO: 144034 - RNA, 1410 nt, Artificial Sequence; identical to SEQ ID NO: 142855
  derived and/or modified CDS sequence (opt3) from neuraminidase__InfluenzaA__ABU92867

SEQ ID NO: 144035 - RNA, 1410 nt, Artificial Sequence; identical to SEQ ID NO: 143962
  derived and/or modified CDS sequence (opt3) from neuraminidase__InfluenzaA__ABU92868

SEQ ID NO: 144036 - RNA, 1410 nt, Artificial Sequence; identical to SEQ ID NO: 142742
  derived and/or modified CDS sequence (opt3) from neuraminidase__InfluenzaA__ABU92869

SEQ ID NO: 144037 - RNA, 1410 nt, Artificial Sequence; identical to SEQ ID NO: 143932
  derived and/or modified CDS sequence (opt3) from neuraminidase__InfluenzaA__ABU92870

SEQ ID NO: 144038 - RNA, 1410 nt, Artificial Sequence
  derived and/or modified CDS sequence (opt3) from neuraminidase__InfluenzaA__ABU92872
augaaccccaaucagaagaucauuaccauaggcagcgugucccugacaaucgccgcuauuugcuuccucaugcagaucgcaauucuugucacuacgguuacccugcacuuuaaacagcaugaguguaacucuccuccaaauaaccaggugauguugugcgaaccgacaaucauagagagaaauaucacugaaauuguauacuuaaccaacacaaccaucgagaaggaaauuugucccaaacuggccgaguauaggaauuggucaaagccucagugcaacaucacuggguucgcgccauuuaguaaagacaauagcauacggcuauccgcuggaggugauauuugggugacacgcgagcccuacgucucuugugacccugauaagugcuaucaauucgcccucggccaggggaccacgcugaacaauggacacucgaacgacacugugcaugaucgaaccccauaccguacacuucugaugaaugaauugggcguucccuuucaccucgguacuagacagguguguaucgcauggucaagcaguuccugccaugacgggaaggccuggcugcacgucugugugaccggagaugacaaaaacgcuacagcaucuuucauuuauaauggcaggcugguagauagcaucggcuccuggucaaagaaaauccuccggacccaggagagugaaugcguuuguauuaacgggacgugcacuguggucaugacagacggaagcgccucugguaaggcugauaccaaaauauuauuuaucgaggagggcaagauugugcacaucuccacucugucagggagcgcccaacauguggaagagugcaguuguuacccucgcuauccaggagucagaugcguuuguagggacaacuggaagggcucuaaucggccgauaguggauauuaacguaaaagacuacaauaucguguccagcuacgucugcucgggucuugugggggacacaccccgcaagaacgauucuuucuccucaagucacuguuuggacccuaauaacgaagagggaggccauggcguuaaagggugggcguuugaugacggaaaugauguguggaugggucgaaccaucagcgaaaagcugagauccggcuaugagacguucaaagucauugagggguggucuaagccaaacagcaaacuacagaucaauaggcaagugauuguagaacggggaaaccguucaggcuacagugguauauuuuccguugaggggaagaguugcaucaaucgcuguuucuauguggaacucauuagaggcaggaaggaggaaaccgaggucugguggacaucuaacucaaucguggucuuuugcggaacuagcggcaccuacgggacaggaagcuggcccgacggugcagauaucaaucugaugccuauuuga

SEQ ID NO: 144039 - RNA, 1410 nt, Artificial Sequence
  derived and/or modified CDS sequence (opt3) from neuraminidase__InfluenzaA__ABU92873
augaaccccaaucagaagaucauuaccauaggcagcgugucccugacaaucucuacuauuugcuucuuuaugcaaaucgccauucucaucacgaccgucacacuucacuucaaacaguacgaguuuaacucaccuccaaauaaccagguuaugcugugugaaccgacuauaaucgagagaaauauuaccgaaaucguguauuugacaaacaccacuauugagaaggaaaucugccccaaauuagcugaguacaggaauuggaguaagccucaguguaacauaacaggguucgcaccauuuagcaaagacaauuccauucggcugucugccggaggugauaucuggguaacccgcgagcccuaugugucgugcgacccugauaaguguuaccaauucgcgcuaggccaggggacgacucucaacaauguccauucaaacgacaccgugcacgaucgaacaccauaucguacucugcuuaugaaugaacugggaguucccuuucauuugggcaccaaacaggugugcauugcuuggagcaguuccucuugucacgacgguaaggccuggcuccaugucugcgugacaggggaugacgagaacgcaaccgccagcuucaucuacaauggaagacugguagauuccaucguuucauggaguaagaaaauucugaggacgcaggaaagcgagugugugugcauaaacggcacuuguacagucgugaugaccgacggcucugcuuccgggaaggcagauacuaaaauccucuuuauugaggaaggaaagaucgugcacacaucaaccuuaagcgguagugcccaacacgucgaggaaugcucuugcuauccucgguacccaggcguucgcugugugugcagagacaacuggaagggguccaauaggccgauaguagauauuaacaucaaagacuacagcaucgugucgucuuaugucuguuccggacuggugggcgacacgccccggaagaaugauucaaguagcuccucucauugccuugacccuaacaaugaggaaggugggcacggaguuaaaggcugggcuuucgaugacggcaacgauguguggauggggcgcaccauuagcgagaaguugcgaucaggauacgagacauuuaaagucaucgaagguuggaguaauccaaacuccaagcugcagauuaauagacaggugauaguagacaggggcaaccggagcggguauucuggaaucuucucaguugagggcaaaaguuguauuaaucguugcuuuuacguggaacuaauccgcgguagaaagcaggagacugaaguccucuggaccagcaacuccaucguggucuucugugggacaucuggcacuuauggaaccggcucguggcccgauggggccgacauuaauauaaugccuaucuga

SEQ ID NO: 144040 - RNA, 1410 nt, Artificial Sequence; identical to SEQ ID NO: 143977
  derived and/or modified CDS sequence (opt3) from neuraminidase__InfluenzaA__ABU92874

SEQ ID NO: 144041 - RNA, 1410 nt, Artificial Sequence; identical to SEQ ID NO: 142273
  derived and/or modified CDS sequence (opt3) from neuraminidase__InfluenzaA__ABU92875

SEQ ID NO: 144042 - RNA, 1410 nt, Artificial Sequence; identical to SEQ ID NO: 142273
  derived and/or modified CDS sequence (opt3) from neuraminidase__InfluenzaA__ABU92876

SEQ ID NO: 144043 - RNA, 1410 nt, Artificial Sequence; identical to SEQ ID NO: 142193
  derived and/or modified CDS sequence (opt3) from neuraminidase__InfluenzaA__ABU92877

SEQ ID NO: 144044 - RNA, 1410 nt, Artificial Sequence; identical to SEQ ID NO: 142273
  derived and/or modified CDS sequence (opt3) from neuraminidase__InfluenzaA__ABU92878

SEQ ID NO: 144045 - RNA, 1410 nt, Artificial Sequence
  derived and/or modified CDS sequence (opt3) from neuraminidase__InfluenzaA__ABU92879
augaaccccaaucagaagaucauuaccauaggcagcgugucccugacaaucgccacuauuugcuuccucaugcaaaucgcuauucuugucacgaccguuacacugcacuuuaaacagcaugaguguaacucuccuccaaauaaccaggugauguugugcgaaccgacuaucauagagagaaauaucaccgaaauuguauacuuaacaaacaccacuaucgagaaggaaauuugucccaaacuggcagaguauaggaauuggucaaagccucagugcaacaucacaggguucgccccauuuaguaaagacaauagcauacggcuauccgcgggaggugauauuugggugacccgcgagcccuacgucucuugugacccugauaagugcuaucaauucgcucucggccaggggacgacucugaacaauggacacucgaacgacaccgugcaugaucgaacaccauaccguacucuucugaugaaugaauugggcguucccuuucaccucgguaccagacagguguguaucgccuggucaagcaguuccugccaugacgggaaggcauggcugcacgucugugugacaggagaugacaaaaacgccaccgcuucuuucauuuauaauggcaggcugguagauagcaucggcuccuggucaaagaaaauccuccggacgcaggagagugaaugcguuuguauuaacgggacuugcacaguggucaugaccgacggaagcgcaucugguaaggccgauacuaaaauauuauuuaucgaggagggcaagauugugcacaucuccacacugucagggagcgcucaacauguggaagagugcaguuguuacccucgcuauccaggagucagaugcguuuguagggacaacuggaagggcucuaaucggccgauaguggauauuaacguaaaagacuacuccaucgugagcucguacgucugcucuggucuugugggggacacccccaggaagaaugauuccuucucaaguagccacuguuuggacccuaacaaugaagagggaggccauggcguuaaagggugggccuuugaugacggaaacgauguguggaugggucgaacgaucuccgaaaagcugagaucuggcuaugagaccuucaaagucauugagggguggagcaagccaaauucaaaacuacagaucaaccgccaggugauuguagaacggggaaaucguaguggcuacuccgguauauuuagcguugaggggaagucuugcaucaaccgcuguuucuauguggaacucauuagaggcaggaagggagagacagaagucugguggacuucaaauaguaucguggucuuuugcggcaccagcgggacauacggaacugguuccuggcccgacggcgcggauaucaaccugaugccuauuuga

SEQ ID NO: 144046 - RNA, 1410 nt, Artificial Sequence; identical to SEQ ID NO: 144038
  derived and/or modified CDS sequence (opt3) from neuraminidase__InfluenzaA__ABU92880

SEQ ID NO: 144047 - RNA, 1410 nt, Artificial Sequence; identical to SEQ ID NO: 142273
  derived and/or modified CDS sequence (opt3) from neuraminidase__InfluenzaA__ABU92881

SEQ ID NO: 144048 - RNA, 1410 nt, Artificial Sequence; identical to SEQ ID NO: 142273
  derived and/or modified CDS sequence (opt3) from neuraminidase__InfluenzaA__ABU92882

SEQ ID NO: 144049 - RNA, 1410 nt, Artificial Sequence
  derived and/or modified CDS sequence (opt3) from neuraminidase__InfluenzaA__ABU92883
augaaccccaaucagaagaucauuaccauaggcagcgugucccugacaaucgccgcuauuugcuuccucaugcaaaucgcaauucuugucacuacgguuacccugcacuuuaaacagcaugaguguaacucuccuccaaagaaucaggugauguugugcgaaccgacaaucauagagagaaacaucacugaaauuguauacuuaaccaauacaaccaucgagaaagaaauuugucccaagcuggccgaguauaggaacuggucaaaaccucagugcaauaucacuggguucgcgccauuuaguaaggacaacagcauacggcuauccgcuggaggugauauuugggugacacgcgagcccuacgucucuugugacccugauaagugcuaucaauucgcccucggccaggggaccacgcugaauaacggacacucgaaugacacugugcaugaucgaaccccauaccguacacuucugaugaacgaauugggcguucccuuucaccucgguacuagacagguguguaucgcauggucaagcaguuccugccaugacgggaaagccuggcugcacgucugugugaccggagaugacaagaaugcuacagcaucuuucauuuauaacggcaggcugguagauagcaucguuuccuggaguaaaaagauccuccggacccaggagucagaaugcguguguauuaauggcacgugcacugucgugaugacagacgggagcgccucuggaaaagcugauaccaagauauuauuuaucgaggaggguaagauugugcacaucuccacucugucaggcagcgcccaacaugucgaagagugcaguuguuacccucgcuauccagggguuagaugcguguguagggacaacuggaaaggaucuaaccggccgauaguagauauuaaugugaaggacuacuccaucgucagcucguacgugugcucuggccuuguuggugacacaccccgcaaaaacgauuccuucucaaguagccacuguuuggacccuaauaacgaagaagggggacauggcgugaagggcugggcguuugaugacgggaaugaugucuggaugggacgaaccaucuccgagaaacugagaucugguuaugagacguucaaggugauugagggcuggagcaaaccaaacucaaagcuacagaucaauaggcagguaauuguugaacgggggaaccguaguggauacuccggcauauuuagcguggaggguaagucuugcaucaaucgcuguuucuaugucgaacucauuagagggaggaaagaggaaaccgaggugugguggacaucaaacaguaucgucguguuuugcggcacuagcggaaccuacggcacaggguccuggcccgacggagcagauaucaaucugaugccuauuuga

SEQ ID NO: 144050 - RNA, 1410 nt, Artificial Sequence; identical to SEQ ID NO: 142273
  derived and/or modified CDS sequence (opt3) from neuraminidase__InfluenzaA__ABU92884

SEQ ID NO: 144051 - RNA, 1410 nt, Artificial Sequence; identical to SEQ ID NO: 142273
  derived and/or modified CDS sequence (opt3) from neuraminidase__InfluenzaA__ABU92885

SEQ ID NO: 144052 - RNA, 1410 nt, Artificial Sequence; identical to SEQ ID NO: 142762
  derived and/or modified CDS sequence (opt3) from neuraminidase__InfluenzaA__ABU92886

SEQ ID NO: 144053 - RNA, 1410 nt, Artificial Sequence; identical to SEQ ID NO: 142273
  derived and/or modified CDS sequence (opt3) from neuraminidase__InfluenzaA__ABU92887

SEQ ID NO: 144054 - RNA, 1410 nt, Artificial Sequence
  derived and/or modified CDS sequence (opt3) from neuraminidase__InfluenzaA__ABU92888
augaaccccaaucagaagaucauuaccauaggcagcgugucccugacaaucucuacuauuugcuucuuuaugcaaaucgccauucucaucacgaccgucacacuucacuucaaacaguacgaguuuaacucaccuccaaauaaccagguuaugcugugugaaccgacuauaaucgagagaaauauuaccgaaaucguguauuugacaaacaccacuauugagaaggaaaucugccccaaauuagcugaguacaggaauuggaguaagccucaguguaacauaacaggguucgcaccauuuagcaaagacaauuccauucggcugucugccggaggugauaucuggguaacccgcgagcccuaugugucgugcgacccugauaaguguuaccaauucgcgcuaggccaggggacgacucucaacaauguccauucaaacgacaccgugcacgaucgaacaccauaucguacucugcuuaugaaugaacugggaguucccuuucauuugggcaccaaacaggugugcauugcuuggagcaguuccucuugucacgacgguaaggccuggcuccaugucugcgugacaggggaugacgagaacgcaaccgccagcuucaucuacaauggaagacugguagauuccaucguuucauggaguaagaaaauucugaggacgcaggaaagcgagugugugugcauaaacggcacuuguacagucgugaugaccgacggcucugcuuccgggaaggcagauacuaaaauccucuuuauugaggaaggaaagaucgugcacacaucaaccuuaagcgguagugcccaacacgucgaggaaugcucuugcuauccucgguacccaggcguucgcugugugugcagagacaacuggaagggguccaauaggccgauaguagauauuaacaucaaagacuacagcaucauuucgucuuauguguguuccggacuggucggcgacacgccccggaagaaugauucaaguagcuccucucauugccuugacccuaacaaugaggaaggugggcacggagugaaaggcugggcuuucgaugacggcaacgauguuuggauggggcgcaccaucagcgagaaguugcgaucaggauacgagacauuuaaaguggucgaagguuggaguaauccaaacuccaagcugcagauuaauagacaggugauaguagacagggauaaccggagcggcuauucugggaucuucucaguugagggaaaaaguuguauuaaucguugcuuuuacguggaacuaauccgcggcagaaaccaggagacugaaguccucuggaccagcaauuccaucguggucuucugugguacaucugggacuuauggcaccggaucguggcccgacggcgccgauauuaaccugaugccuauauga

SEQ ID NO: 144055 - RNA, 1410 nt, Artificial Sequence; identical to SEQ ID NO: 143977
  derived and/or modified CDS sequence (opt3) from neuraminidase__InfluenzaA__ABU92889

SEQ ID NO: 144056 - RNA, 1410 nt, Artificial Sequence
  derived and/or modified CDS sequence (opt3) from neuraminidase__InfluenzaA__ABU92890
augaaccccaaucagaagaucauuaccauaggcagcgugucccugacaaucgccgcuauuugcuuccucaugcagaucgcaauucuugucacuacgguuacccugcacuuuaaacagcaugaguguaacucuccuccaaauaaccaggugauguugugcgaaccgacaaucauagagagaaauaucacugaaauuguauacuuaaccaacacaaccaucgagaaggaaauuugucccaaacuggccgaguauaggaauuggucaaagccucagugcaacaucacuggguucgcgccauuuaguaaagacaauagcauacggcuauccgcuggaggugauauuugggugacacgcgagcccuacgucucuugugacccugauaagugcuaucaauucgcccucggccaggggaccacgcugaacaauggacacucgaacgacacugugcaugaucgaaccccauaccguacacuucugaugaaugaauugggcguucccuuucaccucgguacuagacagguguguaucgcauggucaagcaguuccugccaugacgggaaggccuggcugcacgucugugugaccggagaugacaaaaacgcuacagcaucuuucauuuauaauggcaggcugguagauagcaucggcuccuggucaaagaaaauccuccggacccaggagagugaaugcguuuguauuaacgggacgugcacuguggucaugacagacggaagcgccucugguaaggcugauaccaaaauauuauuuaucgaggagggcaagauugugcacaucuccacucugucagggagcgcccaacauguggaagagugcaguuguuacccucgcuauccaggagucagaugcguuuguagggacaacuggaagggcucuaaucggccgauaguggauauuaacguaaaagacuacuccaucgugagcucguacgucugcucuggucuugugggggacacaccccgcaagaaugauuccuucucaaguagccacuguuuggacccuaacaaugaagagggaggccauggcguuaaagggugggcguuugaugacggaaacgauguguggaugggucgaaccaucuccgaaaagcugagaucuggcuaugagacguucaaagucauugagggguggagcaagccaaauucaaaacuacagaucaacaggcaagugauuguagaacggggaaaucguaguggcuacuccgguauauuuagcguugaggggaagucuugcaucaaccgcuguuucuauguggaacucgucagaggcaggaaggaggaaaccgaggugugguggacaucaaauaguauugucguguuuugcggaacuagcggcaccuacgggacaggauccuggcccgacggugcagauaucaaccugaugccuaucuga

SEQ ID NO: 144057 - RNA, 1410 nt, Artificial Sequence; identical to SEQ ID NO: 143993
  derived and/or modified CDS sequence (opt3) from neuraminidase__InfluenzaA__ABU92891

SEQ ID NO: 144058 - RNA, 1410 nt, Artificial Sequence
  derived and/or modified CDS sequence (opt3) from neuraminidase__InfluenzaA__ABU92892
augaaccccaaucagaagaucauuaccauaggcagcgugucccugacaaucucuacuauuugcuucuuuaugcaaaucgccauucucaucacgaccgucacacuucacuucaaacaguacgaguuuaacucaccuccaaauaaccagguuaugcugugugaaccgacuauaaucgagagaaauauuaccgaaaucguguauuugacaaacaccacuauugagaaggaaaucugccccaaauuagcugaguacaggaauuggaguaagccucagugugacauaacaggguucgcaccauuuagcaaagauaacuccauucggcugucugccggagguaauaucuggguaacccgcgagcccuaugugucgugcgacccugauaaguguuaccaauucgcgcuaggccaggggacgacucucaacaauguccauucaaacgacaccgugcacgaucgaacaccauaucguacucugcuuaugaaugaacugggaguucccuuucauuugggcaccaaacaggugugcauugcuuggagcaguuccucuugucacgacgguaaggccuggcuccaugucugcgugacaggggaugacaagaacgcaaccgccagcuucaucuacaauggaagacugguagauuccaucguuucauggaguaaaaagauucugaggacgcaggagagcgaaugugugugcauaaacggcacuuguacagucgugaugaccgacggcucugcuuccgggaaagcagauacuaagauccucuuuauugaggagggaaagaucgugcacacaucaaccuuaagcgguagugcccaacacgucgaagagugcucuugcuauccucgguacccaggcguucgcugugugugcagagacaacuggaaaggguccaauaggccgauaguagauauuaacaucaaggacuacagcaucgugucgucuuaugucuguuccggacuggugggcgacacgccccggaaaaaugauucaaguagcuccucucauugccuugacccuaacaaugaagagggugggcacggaguuaagggcugggcuuucgaugacggcaacgauguguggauggggcgcaccauuagcgaaaaauugcgaucaggauacgagacauuuaaggucaucgaggguuggaguaauccaaacuccaaacugcagauuaauagacaggugauaguagacaggggcaaccggagcggguauucuggaaucuucucaguugaaggcaagaguuguauuaaucguugcuuuuacguggagcuaauccgcgguagaaaggaagagacugaaguccucuggaccagcaacuccaucguggucuucugugggacaucuggcacuuauggaaccggcucguggcccgauggggccgacauuaaucugaugccuauauga

SEQ ID NO: 144059 - RNA, 1410 nt, Artificial Sequence; identical to SEQ ID NO: 142855
  derived and/or modified CDS sequence (opt3) from neuraminidase__InfluenzaA__ABU92893

SEQ ID NO: 144060 - RNA, 1410 nt, Artificial Sequence
  derived and/or modified CDS sequence (opt3) from neuraminidase__InfluenzaA__ABU92895
augaaccccaaucagaagaucauuaccgugggcagcgucucccugacaauaucuacuaucugcuucuuuaugcaaauugccauccucauuacgaccguuacacuucacuucaaacaguacgaguuuaacucaccuccaaauaaccaggugaugcugugugaaccgacuaucauagagagaaauaucaccgaaauuguauauuugacaaacaccacuaucgagaaggaaauuugccccaaauuagcugaguacaggaauuggaguaagccucagugugacaucacaggguucgcaccauuuagcaaagauaacuccauacggcugucugccggaggugacauuugggugacccgcgagcccuaugucucgugcgauccugacaaguguuaccaauucgcgcuaggccaggggacgacucucaauaacgugcauucaaaugauaccguucacgaccgaacaccauaucguacucugcuuaugaacgaacugggagugcccuuucauuugggcaccaagcaggucugcaucgcuuggagcaguuccucuugucacgaugguaaagccuggcuccaugugugcguaacaggggacgauaagaaugcaaccgccagcuucauuuacaacggaagacugguugacuccaucgugucauggaguaaagagauccugaggacgcaggaaagcgagugugucugcauuaauggcacuuguacaguggugaugaccgauggcucugcuuccgggaaggcagacacuaaaauacucuuuaucgaggaaggaaagauuguccacacaucaaccuuaagcgguagugcccaacacguugaggaaugcucuugcuauccucgguacccaggcgugcgcuguguaugcagagauaacuggaagggguccaacaggccgaucguggacauaaauauuaaagacuacagcaucgcuucgucuuaugucuguuccggacuggugggcgauacgccccggaagaacgacucaaguagcuccucucauugccuugauccuaauaacgaggaaggugggcacggaguuaaaggcugggccuucgacgauggcaaugacguguggauggggcgcaccaucagcgagaaguugcgaucaggauacgagacauuuaaagucauugaagguuggaguaacccaaauuccaagcugcagaucaacagacaggugauuguagauaggggcaaucggagcggguauucuggaauauucucaguugagggcaaaaguuguaucaaccguugcuuuuacguggaacuaauucgcgguagaaaggaggaaacugagguccucuggaccagcaauuccaucguggucuucugugggacaucuggcacuuauggaaccggcucguggcccgacggggcggauaucaaccugaugccuauuuga

SEQ ID NO: 144061 - RNA, 1410 nt, Artificial Sequence
  derived and/or modified CDS sequence (opt3) from neuraminidase__InfluenzaA__ABU92896
augaaccccaaucagaagaucauuaccauaggcagcgugucccugacaaucucuacuauuugcuucuuuaugcaaaucgccauucucaucacgaccgucacacuucacuucaaacaguacgaguuuaacucaccuccaaauaaccagguuaugcugugugaaccgacuauaaucgagagaaauauuaccgaaaucguguauuugacaaacaccacuauugagaaggaaaucugccccaaauuagcugaguacaggaauuggaguaagccucagugugacauaacaggguucgcaccauuuagcaaagauaacuccauucggcugucugccggaggugacaucuggguaacccgcgagcccuaugugucgugcgauccugacaaguguuaccaauucgcgcuaggccaggggacgacucucaauaacguccauucaaaugauaccgugcgagaccguacaccauauagaacucugcuuaugaacgaacugggaguucccuuucacuugggcaccaaacaggugugcauugcuuggagcaguuccucuugucaugaugguaaggccuggcuccacgucugcaucacagggaaugacaagaacgcaaccgccagcuucaucuacaauggaaggcugguggauuccauuguaucauggaguaaagagauacugcggacgcaggaaagcgaguguguuugcaucaacggcacuuguacaguggucaugaccgacggcucugcuuccgggaaggcagauacuaaaauucucuuuaucgaggaaggaaagauagugcauacaucaaccuuaagcgguagugcccaacacguggaggaaugcucuugcuauccucgcuacccaggcgucagauguguuugcagggacaacuggaagggguccaaucggccgauuguggauaucaacaucaaagaccacagcauuguaucgucuuacguguguuccggacuggucggcgacacgccccgcaagaaugauucaaguagcuccucucauugccuugacccuaacaaugaggaaggugggcacggagugaaaggcugggcuuucgaugaccgaaacgauguuuggaugggcagaaccaucagcgagaagucaagguugggguaugagacauuuaaagugauugaaggauggaguaauccaaacuccaagcugcagauaaaucggcaggucaucguggaccgugguaaccgcagcggcuacucugggauuuucucaguagagggaaaaaguuguaucaauagaugcuuuuauguugaacuaaucaggggccggaaggaggaaacugaggugcucuggaccagcaacuccauugucguguucugugguacaucugggacuuacggcaccggaucguggcccgauggcgccgacauaaaucugaugccuaucuga

SEQ ID NO: 144062 - RNA, 1410 nt, Artificial Sequence
  derived and/or modified CDS sequence (opt3) from neuraminidase__InfluenzaA__ABU92897
augaaccccaaucagaagaucauuaccauaggcagcgugucccugacaaucucuacuauuugcuucuuuaugcaaaucgccauucucaucacgaccgucacacuucacuucaaacaguacgagcugaacucaccuccaaauaaccagguuauguugugugaaccgacuauaaucgagagaaauauuaccgaaaucguguauuuaacaaacaccacuauugagaaggaaaucugccccaaacuggcugaguacaggaauuggaguaagccucaguguaacauaacaggguuugcaccauucagcaaagacaauuccauucggcuaucugccggaggugauaucuggguaacccgcgagcccuaugugucgugcgacccugauaaguguuaccaauuugcgcucggccaggggacgacucugaacaauguccauucaaacgacaccgugcacgaucgaacaccauaucguacucuucugaugaaugaauugggaguucccuuccaucucggcaccaaacaggugugcauugcuuggagcaguuccucuugucacgacgguaaggccuggcugcaugucugcgugacaggggaugacaagaacgcaaccgccagcuuuaucuacaauggaagacugguagauuccaucguuucauggaguaaagagauucucaggacgcaggaaagcgagugugugugcauaaacggcacuuguacagucgugaugaccgacggcucugcuuccgggaaggcagauacuaaaaucuuauucauugaggaaggaaagaucgugcacacaucaacccugagcgguagugcccaacacgucgaggaaugcucuugcuauccucgguacccaggcguucgcugugugugcagagacaacuggaagggguccaauaggccgauaguagauauuaacaucaaagacuacagcaucgugucgucuuaugucuguuccggacuugugggcgacacgccccggaagaaugauucaaguagcuccucucauugcuuggacccuaacaaugaggaaggugggcacggaguuaaaggcugggcuuuugaugacggcaacgauguguggauggggcgcaccauuagcgagaagucacgaaguggauacgagacauucaaagucaucgaagguugguccaauccaaacagcaagcugcagauuaauagacaggugauaguagacaggggcaaccggucuggguauucaggaaucuuuaguguugagggcaaaagcuguauuaaucguugcuucuacguggaacuaauccgcgguagaaaggaggaaacugagguccucuggaccuccaacucuaucguggucuuuugugggacaucgggcacuuauggaaccggcagcuggcccgauggggccgacauuaaucugaugccuauauga

SEQ ID NO: 144063 - RNA, 1410 nt, Artificial Sequence
  derived and/or modified CDS sequence (opt3) from neuraminidase__InfluenzaA__ABU92898
augaaccccaaucagaagaucauuaccauaggcagcgugucccugacaaucucuacuauuugcuucuuuaugcaaaucgccauucucaucacgaccgucacacuucacuucaaacaguacgaguuuaacucaccuccaaauaaccagguuaugcugugugaaccgacuauaaucgagagaaauauuaccgaaaucguguauuugacaaacaccacuauugagaaggaaaucugccccaaauuagcugaguacaggaauuggaguaagccucagugugacauaacaggguucgcaccauuuagcaaagauaacuccauucggcugucugccggaggugacaucuggguaacccgcgagcccuaugugucgugcgauccugacaaguguuaccaauucgcgcuaggccaggggacgacucucaauaacguccauucaaaugauaccgugcacgaccgaacaccauaucguacucugcuuaugaacgaacugggaguucccuuucauuugggcaccaaacaggugugcauugcuuggagcaguuccucuugucacgaugguaaggccuggcuccaugucugcgugacaggggacgauaagaaugcaaccgccagcuucaucuacaacggaagacugguagacuccguugugucauggaguaaagauauccugaggacgcaggagagcgaaugugucugcauuaauggcacuuguacaguggugaugaccgacggcucugcuuccgggaaggcagauacuaaaauacucuuuaucgaggagggaaagauuguccacacaucaaccuuaagcgguagugcccaacacguugaagagugcucuugcuauccucgguacccaggcgugcgcuguguaugcagagacaacuggaagggguccaacaggccgaucguggacauaaauauuaaaaacuacagcaucgucucgucuuauguguguuccggacugguuggcgauacgccccggaagaccgacucaaguagcuccucucauugccuugauccuaauaacgaagagggugggcacggagugaaaggcugggcuuucgacgauggcaaugacgucuggauggggcgcacaaucagcgaaaaguugcgacugggauacgagacuuuuaaagugauugaggguuggucaaacccaaauaguaagcuacagaucaacagacagguaauuguugauaggggcaaucggaccggguauuccggaauauucagcguggaaggcaaaucuuguaucaaccguugcuuuuacgucgagcucauucgcgguagaaaggaagagacagaagugcuguggacuucaaauaguaucgucguguucugugggaccagcggcacauauggaaccggcuccuggcccgacggggccgauaucaaccuuaugccuauuuga

SEQ ID NO: 144064 - RNA, 1410 nt, Artificial Sequence; identical to SEQ ID NO: 142273
  derived and/or modified CDS sequence (opt3) from neuraminidase__InfluenzaA__ABU92899

SEQ ID NO: 144065 - RNA, 1410 nt, Artificial Sequence
  derived and/or modified CDS sequence (opt3) from neuraminidase__InfluenzaA__ABU92900
augaaccccaaucagaagaucauuaccauaggcagcgugucccugacaaucgccgcuauuugcuuccucaugcagaucgcaauucuugucacuacgguuacccugcacuuuaaacagcaugaguguaacccuccaccgaauaaccaggugauguugugcgaacccacaaucauagagagaaauaucacugaaauuguauacuuaaccaacacaaccaucgagaaggaaauuuguccuaaacuggccgaguauaggaauuggucuaagccacagugcaacaucacuggguucgcgcccuuuucaaaagacaauaguauacggcuaagcgcuggaggugauauuugggugacacgcgagccuuacgucuccugugacccagauaagugcuaucaauucgcccucggccaggggaccacgcugaacaauggacacucuaacgacacugugcaugaucgaacccccuaccguacacuucugaugaaugaauugggcguuccuuuucaccucgguacuagacagguguguaucgcauggucgucaagcaguugccaugacgggaaggccuggcugcacgucugugugaccggagaugacaaaaacgcuacagcauccuucauuuauaauggcaggcugguagauucuaucggcagcugguccaagaaaauccuccggacccaggagucagaaugcguuuguauuaacgggacgugcacuguggucaugacagacggaagugccagcgguaaggcugauaccaaaauauuauuuaucgaggagggcaagauugugcacaucucuacucuguccgggucagcccaacauguggaagagugcagcuguuacccacgcuauccgggagucagaugcguuuguagggacaacuggaagggcaguaaucggcccauaguggauauuaacguaaaagacuacucuaucguguccagcuacgucugcucgggucuugugggggacacaccucgcaagaaugauucuuucuccucaagucacuguuuggacccaaacaaugaagagggaggccauggcguuaaagggugggcguuugaugacggaaacgauguguggaugggucgaaccaucagcgaaaagcugagauccggcuaugagacguucaaagucauugagggguggucuaagcccaauagcaaacuacagaucaacaggcaagugauuguagaacggggaaaucguucaggcuacagugguauauuuuccguugaggggaagaguugcaucaaccgcuguuucuauguggaacucauuagaggcaggaaggaggaaaccgaggucugguggacaucuaauucaaucguggucuuuugcggaacuagcggcaccuacgggacaggaagcuggccugacggugcagauaucaaccugaugccaauuuga

SEQ ID NO: 144066 - RNA, 1410 nt, Artificial Sequence
  derived and/or modified CDS sequence (opt3) from neuraminidase__InfluenzaA__ABU92901
augaaccccaaucagaagaucauuaccauaggcagcgugucccugacaaucgccgcuauuugcuuccucaugcagaucgcaauucuugucacuacgguuacccugcacuuuaaacagcaugaguguaacucuccuccaaauaaccaggugauguugugcgaaccgacaaucauagagagaaauaucacugaaauuguauacuuaaccaacacaaccaucgagaaggaaauuugucccaaacuggccgaguauaggaauuggucaaagccucagugcaacaucacuggguucgcgccauuuaguaaagacaauagcauacggcuauccgcuggaggugauauuugggugacacgcgagcccuacgucucuugugacccugauaagugcuaucaauucgcccucggccaggggaccacgcugaacaauggacacucgaacgacacugugcaugaucgaaccccauaccguacacuucugaugaaugaauugggcguucccuuucaccucgguacuagacagguguguaucgcauggucaagcaguuccugccaugacgggaaggccuggcugcacgucugugugaccggagaugacaaaaacgcuacagcaucuuucauuuauaauggcaggcugguagauagcaucuccucauggaguaagaaaauccuccggacccaggagagcgaaugcguuuguauuaacggcacgugcacuguggucaugacagacgggucugccuccggaaaggcugauaccaaaauauuauuuaucgaggaggguaagauugugcacaucucaacucugagcggcagugcccaacauguggaagagugcucuuguuacccucgcuauccaggggucagaugcguuuguagggacaacuggaagggauccaaucggccgauaguggauauuaacguaaaagacuacagcaucgugucgucuuacgucugcuccggccuugugggugacacaccccgcaagaaugauucauucaguagcucccacuguuuggacccuaacaaugaagaagggggacauggcguuaaaggcugggcguuugaugacgggaacgauguguggaugggacgaaccaucucugagaagcugagaagcgguuaugagacguucaaagucauugagggcuggucaaagccaaauaguaaacuacagaucaacaggcaagugauuguagaacgggggaaucguuccggauacagcggcauauuuucuguugaggguaagucaugcaucaaccgcuguuucuauguggaacucauuagagggaggaaggaggaaaccgaggucugguggacaaguaauagcaucguggucuuuugcggcacuuccggaaccuacggcacagggucuuggcccgacggagcagauaucaaccugaugccuauuuga

SEQ ID NO: 144067 - RNA, 1410 nt, Artificial Sequence; identical to SEQ ID NO: 142273
  derived and/or modified CDS sequence (opt3) from neuraminidase__InfluenzaA__ABU92902

SEQ ID NO: 144068 - RNA, 1410 nt, Artificial Sequence; identical to SEQ ID NO: 142273
  derived and/or modified CDS sequence (opt3) from neuraminidase__InfluenzaA__ABU92903

SEQ ID NO: 144069 - RNA, 1410 nt, Artificial Sequence; identical to SEQ ID NO: 143228
  derived and/or modified CDS sequence (opt3) from neuraminidase__InfluenzaA__ABU92904

SEQ ID NO: 144070 - RNA, 1410 nt, Artificial Sequence; identical to SEQ ID NO: 142273
  derived and/or modified CDS sequence (opt3) from neuraminidase__InfluenzaA__ABU92905

SEQ ID NO: 144071 - RNA, 1410 nt, Artificial Sequence
  derived and/or modified CDS sequence (opt3) from neuraminidase__InfluenzaA__ABU92906
augaaccccaaucagaagaucauuaccauaggcagcgugucccugacaaucgccgcuauuugcuuccucaugcagaucgcaauucuugucacuacgguuacccugcacuuuaaacagcaugaguguaacucuccuccaaauaaccaggugauguugugcgaaccgacaaucauagagagaaauaucacugaaauuguauacuuaaccaacacaaccaucgagaaggaaauuugucccaaacuggccgaguauaggaauuggucaaagccucagugcaacaucacuggguucgcgccauuuaguaaagacaauagcauacggcuauccgcuggaggugauauuugggugacacgcgagcccuacgucucuugugacccugauaagugcuaucaauucgcccucggccaggggaccacgcugaacaauggacacucgaacgacacugugcaugaucgaaccccauaccguacacuucugaugaaugaauugggcguucccuuucaccucgguacuagacagguguguaucgcauggucaagcaguuccugccaugacgggaaggccuggcugcacgucugugugaccggagaugacaaaaacgcuacagcaucuuucauuuauaauggcaggcugguagauagcaucggcuccuggucaaagaaaauccuccggacccaggagagugaaugcguuuguauuaacgggacgugcacuguggucaugacagacggaagcgccucugguaaggcugauaccaaaauauuauuuaucgaggagggcaagauugugcacaucuccacucugucagggagcgcccaacauguggaagagugcaguuguuacccucgcuauccaggagucagaugcguuuguagggacaacuggaagggcucuaaucggccgauaguggauauuaacguaaaagacuacuccaucgugagcucguacgucugcucuggucuugugggggacacaccccgcaagaaugauuccuucucaaguagccacuguuuggacccuaacaaugaagagggaggccauggcguuaaagggugggcguuugaugacggaaacgauguguggaugggucgaaccaucuccgaaaagcugagaucuggcuaugagacguucaaagucauugagggguggagcaagccaaauucaaaacuacagaucaacaggcaagugauuguagaacggggaaaucguaguggcuacuccgguauauuuagcguugaggggaagucuugcaucaaccgcuguuucuauguggaacucauuagaggcaggaaggaggaaaccgaggucugguggacaucaaauaguaucguggucuuuugcggaacuagcggcaccuacgggacaggauccuggcccgacggugcagauaucaaacugaugccuauuuga

SEQ ID NO: 144072 - RNA, 1410 nt, Artificial Sequence
  derived and/or modified CDS sequence (opt3) from neuraminidase__InfluenzaA__ABU92907
augaaccccaaucagaagaucauuaccauaggcagcaucucccugacaauugccgcuaucugcuuccucaugcaaauugcaauccuugugacuacggucacccugcacuuuaaacagcaugaguguaacucuccuccaaauaaccagguuauguugugcgaaccgacaauaaucgagagaaauauuacugaaaucguguacuuaaccaacacaaccauugagaaggaaaucugucccaaacuggccgaguauaggaauuggucaaagccucagugcaacauaacuggguucgcgccauuuaguaaagacaauagcauucggcuauccgcuggaggugauaucuggguaacacgcgagcccuacgugucuugugacccugauaagugcuaucaauucgcccucggccaggggaccacgcugaacaauggacacucgaacgacacuguccaugaucgaaccccauaccguacacuucugaugaaugaauugggcgugcccuuucaccucgguacuagacagguuuguauugcauggucaagcaguuccugccaugacgggaaggccuggcugcacgugugugucaccggagaugacaaaaacgcuacagcaucuuucaucuauaauggcaggcugguggauagcaucggcuccuggucaaagaaaauucuccggacccaggagagugaaugcguauguauaaacgggacgugcacuguugugaugacagacggaagcgccucugguaaggcugauaccaaaaucuuauuuauugaggagggcaagaucguccacauauccacucugucagggagcgcccaacauguggaagagugcaguuguuacccucgcuauccaggagugagaugcgucuguagggacaacuggaagggcucuaaucggccgauuguugauaucaacgugaaagacuacuccaucguaagcucguacgugugcucuggucuugucggggacacaccccgcaagaaugauuccuucucaaguagccacuguuuggacccuaacaaugaagagggaggccauggcgugaaagggugggcguuugaugacggaaacgauguuuggaugggucgaaccauuuccgaaaagcugagaucuggcuaugagacguucaaagugaucgagggguggagcaagccaaauucaaaacuacagauuaacaggcaggucauaguggaacggggaaaucguaguggcuacuccgguaucuuuagcguagaggggaagucuugcauuaaccgcuguuucuauguugaacucaucagaggcaggaaggaggaaaccgaggugugguggacaucaaauaguaucgucguguuuugcggaacuagcggcaccuacgggacaggauccuggcccgacggugcagauauuaaccugaugccuauauga

SEQ ID NO: 144073 - RNA, 1410 nt, Artificial Sequence; identical to SEQ ID NO: 142273
  derived and/or modified CDS sequence (opt3) from neuraminidase__InfluenzaA__ABU92908

SEQ ID NO: 144074 - RNA, 1410 nt, Artificial Sequence; identical to SEQ ID NO: 142273
  derived and/or modified CDS sequence (opt3) from neuraminidase__InfluenzaA__ABU92909

SEQ ID NO: 144075 - RNA, 1410 nt, Artificial Sequence
  derived and/or modified CDS sequence (opt3) from neuraminidase__InfluenzaA__ABU92910
augaaccccaaucagaagaucauuaccauaggcagcgugucccugacaaucgccacuauuugcuuccucacgcaaaucgcuauucuuaucaccacagucacucugcacuuuaaacaguacgaguguaacucuccuccaaauaaccagguuauguugugcgaaccgaccauaaucgagagaaauauuacagaaaucguguauuuaaccaacacuacaauugagaaggaaaucugucccaaacuggcagaguacaggaauuggucaaagccucagugcaacauaaccggguucgccccauuuaguaaagacaauagcauucggcuauccgcgggaggugauaucuggguaacgcgcgagcccuaugugucuugugacccugauaagugcuaccaauucgcucucggccaggggacuacccugaacaauggacauucgaacgacacaguccacgaucgaacuccauaucguacccuucugaugaaugaauugggcgugcccuuucaucucgguacaaagcagguuuguauugccuggucaagcaguuccugccacgacgggaaagcauggcugcaugugugugucaccggagaugacaagaacgccacggcuucuuucaucuacaauggcagacugguggauagcaucggcuccuggaguaaaaagauucucaggacucaggagucagaaugcguauguauaaacgggacaugcaccguugugaugacugacggaagcgcaucugguaaagccgauacaaagaucuuauuuauugaggagggcaagaucguccacaccucccugcuuucagggagcgcucaacacguggaagagugcaguuguuauccucgguacccaggagugcgcugcgucuguagagacaacuggaaaggcucuaauaggccgauaguugauauuaacgugcgggacuacuccaucguaagcucguaugugugcucugguuuggucggggacacgccccgcaagaaugauuccucaaguagcucccauugucuggacccuaacaaugaagagggaggccacggcgugaaagggugggccuucgaugacggaaacgauguuuggaugggucgaaccaucucugaaaagcuaagaagcggcuacgagacauuuaaagugauugagggguggucaaagccaaauaguaaacuccagaucaacaggcaggucauuguggacaagggaaaucgguccggcuauagcgguauauucucuguagaagggaagucaugcaucaaccguuguuuuuacguugagcugauucgcggcagaaaucaggaaacugaggugcuuuggaccaguaacagcaucgucguguucugcggaacauccggcacuuaugggaccggaucuuggcccgauggugcggacaucaaucugaugccuauuuga

SEQ ID NO: 144076 - RNA, 1410 nt, Artificial Sequence
  derived and/or modified CDS sequence (opt3) from neuraminidase__InfluenzaA__ABU92911
augaaccccaaucagaagaucauuaccauaggcagcgugucccugacaaucgccacuauuugcuuccucacgcaaaucgcuauucuugucaccacaguuacucugcacuuuaaacaguacgaguguaacucuccuccaaauaaccaggugauguugugcgaaccgaccaucauagagagaaauaucacagaaauuguauauuuaaccaacacuacaaucgagaaggaaauuugucccaaacaggcagaguacaggaauuggucaaagccucaaugcaacaucaccggguucgccccauuuaguaaagacaauagcauacggcuguccgcgggaggugauauuugggugacgcgcgagcccuaugucucuugugacccugauaagugcuaccaguucgcucuaggccaggggacuacccucaacaauggacauucgaacgacacagugcacgaucgaacuccauaucguacccugcuuaugaaugaacugggcguucccuuucauuuggguacaaaacagguguguaucgccuggucaagcaguuccugccacgacgggaaagcauggcuccaugucugugugaccggagaugacaagaacgccacggcuucuuucauuuacaauggcagacugguagauagcaucggcuccuggucaaagaagauccugaggacucaagagagugaaugcguuuguauuaacgggacaugcaccguggucaugacugacggaagcgcaucugguaaagccgauacaaagauacucuuuaucaaggagggcaaaauugugcacaccuccuuacugucagggagcgcucagcacguggaggaaugcaguuguuauccucgguacccaggaguccgcugcguuuguagagacaacuggaagggcucuaauaggccgaucguggauauaaacguaaaagacuacuccauugugagcucguaugucugcucuggucuugugggggacacgccccggaagaaugauuccucaaguagcucccauuguuuggacccuaacaaugaggaaggaggccacggcguuaaagggugggccuucgaugacggaaacgauguguggaugggucgcaccaucucugagaagcugcgaagcggcuacgaaacauuuaaagucaucgagggguggucaaagccaaauaguaagcuacagauuaacagacaggugaucguagacagggauaaucgguccggauauagcggcauuuucucuguugaggguaaaucaugcauaaaccguuguuuuuacguggaacucauccgcgggagaaaucaagagacugaaguccuguggaccaguaacagcauuguggucuucugcggcacauccggaacuuauggcaccgggucuuggcccgacggagcggauaucaaucuuaugccuaucuga

SEQ ID NO: 144077 - RNA, 1410 nt, Artificial Sequence
  derived and/or modified CDS sequence (opt3) from neuraminidase__InfluenzaA__ABU92913
augaaccccaaucagaagaucauuaccauaggcagcgugucccugacaaucgccacuauuugcuuccucacgcaaaucgcuauucuugucaccacaguuacucugcacuuuaaacaguacgaguguaacucuccuccaaauaaccaggugauguugugcgaaccgaccaucauagagagaaauaucacagaaauuguauauuuaaccaacacuacaaucgagaaggaaauuugucccaaacuggcagaguacaggaauuggucaaagccucagugcaacaucaccggguucgccccauuuaguaaagacaauagcauacggcuauccgcgggaggugauauuugggugacgcgcgagcccuaugucucuugugacccugauaagugcuaccaauucgcucucggccaggggacuacccugaacaauggacauucgaacgacacagugcacgaucgaacuccauaucguacccuucugaugaaugaauugggcguucccuuucaucucgguacaaaacagguguguaucgccuggucaagcaguuccugccacgacgggaaagcauggcugcaugucugugugaccggagaugacaagaacgccacggcuucuuucauuuacaauggcagacugguagauagcaucggcuccuggucaaagaagauccucaggacucaggagagugaaugcguuuguauuaacgggacaugcaccguggucaugacugacggaagcgcaucugguaaagccgauacaaagauauuauuuaucaaggagggcaaaauugugcacaccucccugcuuucagggagcgcucaacacguggaggaaugcaguuguuauccucgguacccaggaguccgcugcguuuguagagacaacuggaagggcucuaauaggccgaucguggauauaaacguaaaagacuacuccauugugagcucguaugucugcucugguuuggugggggacacgccccggaagaaugauuccucaaguagcucccauugucuggacccuaacaaugaggaaggaggccacggcguuaaagggugggccuucgaugacggaaacgauguguggaugggucgcaccaucucugagaagcuacgaagcggcuacgaaacauuuaaagucaucgagggguggucaaagccaaauaguaagcuccagauuaacagacaggugaucguagacagggauaaucgguccggauauagcggcauuuucucuguugaggguaaaucaugcauaaaccguuguuuuuacguggaacugauccgcgggagaaaucaggagacugaaguccuuuggaccaguaacagcauuguggucuucugcggcacauccggaacuuauggcaccgggucuuggcccgacggagcggauaucaaucugaugccuaucuga

SEQ ID NO: 144078 - RNA, 1413 nt, Artificial Sequence
  derived and/or modified CDS sequence (opt3) from neuraminidase__InfluenzaA__ABV29560
augaaccccaaucagaagaucauuaccauaggcagcaucuccauugccaucgggauuaucucucugaugcuccaaauaggaaacaucauuucaaucugggcuagucacagcauucagacagguucccagaaucauacuggcaucugcaaccagagaauaauuacguacgaaaauucuaccugggugaaccacacauaugucucgaucaauaacacuaauguuguggcagggaaagacaagaccucaguaacacuugccggaaacagcagucuguguuccauuucuggcugggcgaucuacaccaaagauaauagcaucaggauugguuccaagggggacguguucgucauacgggagccuuuuaucucaugcagucauuuggagugucgcacuuucuuuuuaacacaaggagcucugcuaaacgauaaacacagcaauggcaccgugaaggaccgaucuccauaucgugcccucauguccugcccgcugggcgaagcacccucaccuuacaacagcaaguucgagaguguugccuggucugcuuccgcaugucaugaugggaugggauggcuuacgauugguaucagcggcccagacaauggggccguggcuguccugaaauauaacggaauaauuacugaaaccaucaagucguggaaaaagagaaucuugaggacacaggagucugagugcguguguguaaacggcuccugcuuuacuauuaugaccgauggucccucaaauggggccgcgaguuacaaaaucuucaagauugaaaagggaaaaguuacaaagagcauagagcucaacgcaccuaauuuucacuaugaagaguguuccugcuacccagacaccggcacggugaugugugucugccgggauaacuggcacggcucuaaucgccccugggugagcuucaaccagaaucuggacuaccagaucggguauauuugcucaggaguguuuggugauaacccuagaccaaaagacggcaaggggaguuguaauccggucacuguugauggagccgacggcgugaaagguuucuccuacaaguaugggaacggcguauggaucggaaggacaaaaagcaaucggcugcgcaagggcuuugagaugaucugggaccccaacggguggaccgauacugacucugauuucucagugaagcaagacgucguggcuauuacagauuggaguggauacagcgguuccuuuguucagcauccugaacucaccggcuuagacugcauacgaccauguuucuggguggagcuggucagagggcuucccagggaaaauacgaccaucuggacaucuggaucgagcauuuccuucugcggcguggauucagacacugccaacuggaguuggccugauggugcagaguugccauuuaccaucgacaaauga

SEQ ID NO: 144079 - RNA, 1413 nt, Artificial Sequence; identical to SEQ ID NO: 144078
  derived and/or modified CDS sequence (opt3) from neuraminidase__InfluenzaA__ABV29571

SEQ ID NO: 144080 - RNA, 1413 nt, Artificial Sequence; identical to SEQ ID NO: 144078
  derived and/or modified CDS sequence (opt3) from neuraminidase__InfluenzaA__ABV29582

SEQ ID NO: 144081 - RNA, 1413 nt, Artificial Sequence; identical to SEQ ID NO: 144078
  derived and/or modified CDS sequence (opt3) from neuraminidase__InfluenzaA__ABV29615

SEQ ID NO: 144082 - RNA, 1413 nt, Artificial Sequence
  derived and/or modified CDS sequence (opt3) from neuraminidase__InfluenzaA__ABV29637
augaaccccaaucagaagaucauuaccauaggcagcaucuccauugccaucgggauuaucucucugaugcuccaaauaggaaacaucauuucaaucugggcuagucacagcauucagacagguucccagaaucauacuggcaucugcaaccagagaauaauuacguacgaaaauucuaccugggugaaccacacauaugucaauaucaacaauacuaacguuguggcagggaaagacaagaccucgguaacacuugccggaaauucaagccuguguaguauuuccggcugggcgaucuacaccaaagauaacucuaucaggauugguagcaagggggacguguucgucauacgggagccuuuuaucuccugcucacauuuggagugucgcacuuucuuuuuaacacaaggagcucugcuaaaugauaaacacaguaacggcaccgugaaggaccgaagcccauaucgugcccucaugucuugcccgcugggcgaagcacccuccccuuacaauucaaaguucgagagcguugccuggagugcuucugcaugucaugaugggaugggauggcuuacgauugguaucuccggcccagacaacggggccguggcuguccugaaauauaacggaauaauuacugaaaccaucaagagcuggaaaaagagaaucuugaggacacaggagucggagugcguguguguaaauggcucuugcuuuacuauuaugaccgauggucccuccaacgggacagccucauacaaaaucuucaagauugaaaagggaaaaguuaccaagaguauagagcucaaugcgccuaacuuucacuaugaagaguguagcugcuacccagacacgggcacugugaugugugucugccgggauaauuggcacggcuccaaccgccccugggugucuuucaaucagaaccuggacuaccaggugggguauaucugcagcggagucuuuggugauaauccuagaccaaaagacggcaaggggucauguaacccgaugacaguugauggagcagacggcgugaaagguuucaguuacaaguaugggaauggcguauggauuggaaggaccaaauccaacaagcugcggaagggcuuugagaugaucugggaccccaauggguggacugauacagacagcgauuucucugugaaacaagacgucguggccaucucagauuggaguggauacagcgguuccuuuguucagcauccugaacucaccggcuuagacugcauucgcccauguuucuggguggagcugguccgagggcuucccagagaaaacacgaccauauggacaucuggaucgagcaucuccuucugcggcguggauucagacacugcuaauuggaguuggccugauggugccgaguugccauuuaccauugacaaguga

SEQ ID NO: 144083 - RNA, 1413 nt, Artificial Sequence; identical to SEQ ID NO: 144078
  derived and/or modified CDS sequence (opt3) from neuraminidase__InfluenzaA__ABV29648

SEQ ID NO: 144084 - RNA, 1413 nt, Artificial Sequence; identical to SEQ ID NO: 144078
  derived and/or modified CDS sequence (opt3) from neuraminidase__InfluenzaA__ABV29659

SEQ ID NO: 144085 - RNA, 1413 nt, Artificial Sequence; identical to SEQ ID NO: 144078
  derived and/or modified CDS sequence (opt3) from neuraminidase__InfluenzaA__ABV29670

SEQ ID NO: 144086 - RNA, 1413 nt, Artificial Sequence
  derived and/or modified CDS sequence (opt3) from neuraminidase__InfluenzaA__ABV29681
augaaccccaaucagaagaucauuaccauaggcagcaucuccauugccaucgggauuaucucucugaugcuccaaauaggaaacaucauuucaaucugggcuagucacagcauucagacagguucccagaaucauacuggcaucugcaaccagagaauaauuacguacgaaaauucuaccugggugaaccacacauaugucucgaucaauaacacuaauguuguggcagggaaagacaagaccucaguaacacuugccggaaacagcagucuguguuccauuucuggcugggcgaucuacaccaaagauaauagcaucaggauugguuccaagggggacguguucgucauacgggagccuuuuaucucaugcagucauuuggagugucgcacuuucuuuuuaacacaaggagcucugcuaaacgauaaacacagcaauggcaccgugaaggaccgaucuccauaucgugcccucauguccugcccgcugggcgaagcacccucaccuuacaacagcaaguucgagaguguugccuggucugcuuccgcaugucaugaugggaugggauggcuuacgauugguaucagcggcccagacaauggggccguggcuguccugaaauauaacggaauaauuacugaaaccaucaagucguggaaaaagagaaucuugaggacacaggagucugagugcguguguguaaacggcuccugcuuuacuauuaugaccgauggucccucaaauggggccgcgaguuacaaaaucuucaagauugaaaagggaaaaguuacaaagagcauagagcucaacgcaccuaauuuucacuaugaagaguguuccugcuacccagacaccggcacggugaugugugucugccgggauaacuggcacggcucuaaucgccccugggugagcuucaaccagaaucuggacuaccagaucggguauauuugcucaggaguguuuggugauaacccuagaccaaaagacggcaaggggaguuguaauccggucacuguugauggagccgacggcgugaaagguuucuccuacaaguaugggaacggcguauggaucggaaggacaaaaagcaaucggcugcgcaagggcuuugagaugaucugggaccccaacggguggaccgauacugacucugauuucucagugaagcaagacgucguggcuauuacagauuggaguggauacagcgguuccuuuguucagcauccugaacucaccggcuuagacugcauacgaccauguuucuggguggagcuggucagagggcuucccagggaaaauacgaccaucuggacaucuggaucgagcauuuccuucugcggcaucgauucagacacugccaacuggaguuggccugauggugcagaguugccauuuaccauugacaaauga

SEQ ID NO: 144087 - RNA, 1413 nt, Artificial Sequence; identical to SEQ ID NO: 144078
  derived and/or modified CDS sequence (opt3) from neuraminidase__InfluenzaA__ABV29692

SEQ ID NO: 144088 - RNA, 1413 nt, Artificial Sequence; identical to SEQ ID NO: 144078
  derived and/or modified CDS sequence (opt3) from neuraminidase__InfluenzaA__ABV29703

SEQ ID NO: 144089 - RNA, 1410 nt, Artificial Sequence
  derived and/or modified CDS sequence (opt3) from neuraminidase__InfluenzaA__ABV29714
augaaccccaaucagaagaucauuaccauaggcagcgugucccugacaaucucuacuauuugcuucuuuaugcaaaucgccauucucaucacgaccgucacacuucacuucaaacaguacgaguuuaacucaccuccaaauaaccagguuaugcugugugaaccgacuauaaucgagagaaauauuaccgaaaucguguauuugacaaacaccacuauugagaaggaaaucugccccaaauuagcugaguacaggaauuggaguaagccucagugugacauaacaggguucgcaccauuuagcaaagauaacuccauucggcugucugccggaggugacaucuggguaacccgcgagcccuaugugucgugcgauccugacaaguguuaccaauucgcgcuaggccaggggacgacucucaauaacguccauucaaaugauaccgugcgagaccguacaccauauagaacucugcuuaugaacgaacugggaguucccuuucacuugggcaccaaacaggugugcauugcuuggagcaguuccucuugucaugaugguaaggccuggcuccacgucugcaucacaggggacgauaagaaugcaaccgccagcuucaucuacaacggaaggcugguggacuccauuguaucauggaguaaagagauacugcggacgcaggaaagcgaguguguuugcaucaauggcacuuguacaguggucaugaccgauggcucugcuuccggggaggcagacacuaagauucucuuuaucgaagagggaaaaauagugcauacaucaaccuuaagcgguagugcccaacacguggaagagugcucuugcuauccucgcuacccaggcgucagauguguuugcagggauaacuggaagggguccaaccggccgauuguggacaucaauaucaaggaccacagcauuguaucgucuuacguguguuccggacuggucggcgauacgccccgcaaaaacgacucaaguagcuccucucauugccuugauccuaauaacgaagagggugggcacggagugaagggcugggcuuucgacgauggcaaugacguuuggauggggcgaaccaucagcgagaaaucaagauugggauaugaaacauuuaaggugauugaggguuggaguaacccaaaauccaagcugcagauaaauaggcaggucaucguggaucggggcaaccguagcggguacucuggaauuuucucaguagaaggcaaaaguuguaucaaucgcugcuuuuauguugagcuaaucagagguaggaaggaagagacugaggugcucuggaccagcaacuccauugucguguucugugggacaucuggcacuuacggaaccggcucguggcccgacggggccgauauaaaucugaugccuaucuga

SEQ ID NO: 144090 - RNA, 1410 nt, Artificial Sequence
  derived and/or modified CDS sequence (opt3) from neuraminidase__InfluenzaA__ABV29725
augaaccccaaucagaagaucauuaccauaggcagcgugucccugacaaucucuacuauuugcuucuuuaugcaaacggccauccucauuaccacagucacucuucacuucaaacaguacgaguuuaacucaccuccaaauaaccaggggaugcugugugaaccgaccaucauagagagaaauaucacagaaauuguuuauuugaccaacacuacaaucgagaaggaaauuugccccaaauuagcugaguacaggaauuggaguaagccucagugugacaucaccggauucgcaccauuuagcaaagauaacuccauacggcugucugccgguggcgacauuugggugacgcgcgagcccuauguaucgugcgauccugacaaguguuaccaauucgcgcuagggcagggaacuacccucaauaacgugcauucaaaugauacaguccgagaccguacuccauauagaacccugcuuaugaacgaacugggcgugcccuuucacuuggguacaaagcagguuugcaucgcuuggagcaguuccucuugucaugaugggaaagccuggcuccacgugugcauuaccggagacgauaagaaugcaacggccagcuucaucuacaacggcaggcuggucgacuccaucgugucauggaguaaagagauucugcggacucaggaaagcgaguguguaugcauaaauggcacauguaccguugugaugacugaugggucugcuuccggaaaggcagacacaaaaauccucuuuauugaggaagguaagaucguccauaccucaacguuaagcggcagugcccaacacguggaggaaugcucuugcuucccucgcuauccaggggugagaugugucugcagggauaacuggaagggauccaaccggccgauaguugacauuaauaucaaagaccacagcaucgugucgucuuacguauguuccggccuggugggugauacccccaggaagaacgacucaaguagcuccucucauugccuugauccuaauaacgaggaagggggacacggcgucaaaggcugggcuuuugacgaugggaaugacguguggaugggacgaacaauuagcgagaagucaagauuggguuacgagacuuucaaaguuaucgaaggcuggaguaacccaaaguccaaacugcagauuaaucgccaggugauagucgaucgggggaaccguagcggauauucuggcaucuuuucaguggaggguaagaguuguauuaaucgcugcuucuacguagaacuaaucagagggaggaaggaggaaaccgagguucucuggacaagcaacuccaucguggucuucuguggcacuucuggaaccuauggcacagggucguggcccgacggagccgauauuaaucugaugccuauauga

SEQ ID NO: 144091 - RNA, 1413 nt, Artificial Sequence
  derived and/or modified CDS sequence (opt3) from neuraminidase__InfluenzaA__ABV29736
augaaccccaaucagaagaucauuaccauaggcagcaucuccauugccaucgggauuaucucucugaugcuccaaauaggaaacaucauuucaaucugggcuagucacagcauucagacagguucccagaaucauacuggcaucugcaaccagagaauaauuacguacgaaaauucuaccugggugaaccacacauaugucaauaucaacaauacuaacguugugaccgggaaagacaagacaucgguaacccuugcaggaaauucaagccuguguaguauuuccggcugggccaucuacacuaaagauaacucuaucaggauugguagcaagggggacguguucgucauacgggagccuuuuaucuccugcucacauuuggagugucgcacauucuuuuuaacccaaggagcgcugcuaaaugauaaacacaguaacggcacggugaaggaccgaagcccauaucgugcucucaugucuugcccgcugggcgaagcccccuccccuuacaauucaaaguucgagagcguugcauggagugccucugcuugucaugaugggaugggauggcuuacuauugguaucuccggcccagacaacggggcaguggccguccugaaauauaacggaauaauuaccgaaacaaucaagagcuggaaaaagagaaucuugaggacucaggagucggagugcguguguguaaauggcucuugcuuuaccauuaugacagauggucccuccgacggggcugccucauacaaaaucuucaagauugaaaagggaaaaguuaccaagaguauagagcucaacgcgccuaauuuucacuaugaagaguguagcugcuacccagauacgggcacugugaugugugucugccgggacaacuggcacggcuccaaucgccccugggugucuuucaaccagaaucuggauuaccagaucggguauauuugcagcggaguguuuggugacaacccuagaccaaaagauggcaaggggucauguaauccggucacaguugacggagcagacggcgugaaagguuucaguuacaaguaugggaacggcguauggaucggaaggaccaaauccaauaagcugcggaagggcuuugagaugaucugggaucccaacggguggacugacacagauaaugacuucagcgugaaacaagaugucguggccauuaccgacuggucuggauacucagguaguuuuguucagcauccugaacucacgggcuuagauugcauacgcccauguuucuggguggagcugguccgagggcuucccagagaaaacaccacaaucuggacuagcggauccucuauuucguucugcggcguggacagcgauaccgcuaauugguccuggccugacggugccgaguugccauuuacaaucgauaaguga

SEQ ID NO: 144092 - RNA, 1413 nt, Artificial Sequence
  derived and/or modified CDS sequence (opt3) from neuraminidase__InfluenzaA__ABV29747
augaaccccaaucagaagaucauuaccauaggcagcaucuccauugccaucgggauuaucucucugaugcuccaaauaggaaacaucauuucaaucugggcuagucacagcauucagacagguucccagaaucauacuggcaucugcaaccagagaauaauuacguacgaaaauucuaccugggugaaccacacauaugucucgaucaauaacacuaauguuguggcagggaaagacaagaccucaguaacacuugccggaaacagcagucuguguuccauuucuggcugggcgaucuacaccaaagauaauagcaucaggauugguuccaagggggacguguucgucauacgggagccuuuuaucucaugcagucauuuggagugucgcacuuucuuuuuaacacaaggagcucugcuaaacgauaaacacagcaauggcaccgugaaggaccgaucuccauaucgugcccucauguccugcccgcugggcgaagcacccucaccuuacaacagcaaguucgagaguguugccuggucugcuuccgcaugucaugaugggaugggauggcuuacgauugguaucagcggcccagacaauggggccguggcuguccugaaauauaacggaauaauuacugaaaccaucaagucguggaaaaagagaaucuugaggacacaggagucugagugcguguguguaaacggcuccugcuuuacuauuaugaccgauggucccucaaauggggccgcgaguuacaaaaucuucaagauugaaaagggaaaaguuacaaagagcauagagcucaacgcaccuaauuuucacuaugaagaguguuccugcuacccagacaccggcacggugaugugugucugccgggauaacuggcacggcucuaaucgccccugggugagcuucaaccagaaucuggacuaccagaucggguauauuugcucaggaguguuuggugauaacccuagaccaaaagacggcaaggggaguuguaauccggucacuguugauggagccgacggcgugaaagguuucuccuacaaguaugggaacggcguauggaucggaaggacaaaaagcaaucggcugcgcaagggcuuugagaugaucugggaccccaacggguggaccgauacugacucugauuucucagugcgacaagacgucguggcuauuacagauuggaguggauacagcgguuccuuuguucagcauccugaacucaccggcuuagacugcauaagaccauguuucuggguggagcuggucagggggcuuccccgggaaaauacgaccaucuggacaucuggaucgagcauuuccuucugcggcguggauucagacacugccaacuggaguuggccugauggugcagaguugccauuuaccaucgacaaguga

SEQ ID NO: 144093 - RNA, 1413 nt, Artificial Sequence; identical to SEQ ID NO: 144078
  derived and/or modified CDS sequence (opt3) from neuraminidase__InfluenzaA__ABV29769

SEQ ID NO: 144094 - RNA, 1413 nt, Artificial Sequence
  derived and/or modified CDS sequence (opt3) from neuraminidase__InfluenzaA__ABV29780
augaaccccaaucagaagaucauuaccauaggcagcaucuccauugccaucgggauuaucucucugaugcuccaaauaggaaacaucauuucaaucugggcuagucacagcauucagacagguucccagaaucauacuggcaucugcaaccagagaauaauuacguacgaaaauucuaccugggugaaccacacauaugucaauaucaacaauacuaacguugugaccgggaaagacaagacaucgguaacccuugcaggaaauucaagccuguguaguauuuccggcugggccaucuacacuaaagauaacucuaucaggauugguagcaagggggacguguucgucauacgggagccuuuuaucuccugcucacauuuggagugucgcacauucuuuuuaacccaaggagcgcugcuaaaugauaaacacaguaacggcacggugaaggaccgaagcccauaucgugcucucaugucuugcccgcugggcgaagcccccuccccuuacaauucaaaguucgagagcguugcauggagugccucugcuugucaugaugggaugggauggcuuacuauugguaucuccggcccagacaacggggcaguggccguccugaaauauaacggaauaauuaccgaaacaaucaagagcuggaaaaagagaaucuugaggacucaggagucggagugcguguguguaaauggcucuugcuuuaccauuaugacagauggucccuccgacggggcugccucauacaaaaucuucaagauugaaaagggaaaaguuaccaagaguauagagcucaacgcgccuaauuuucacuaugaagaguguagcugcuacccagauacgggcacugugaugugugucugccgggacaacuggcacggcuccaaucgccccugggugucuuucaaccagaaucuggauuaccagaucggguauauuugcagcggaguguuuggugacaacccuagaccaaaagauggcaaggggucauguaauccggucacaguugacggagcagacggcgugaaagguuucaguuacaaguaugggaacggcguauggaucggaaggaccaaauccagcaagcugcggaagggcuuugagaugaucugggaucccaauggguggacugacacagauaacgacuucucugugaaacaagaugucguggccauuaccgacuggucaggauacagugguagcuuuguucagcauccugaacucacgggcuuagauugcauacgcccauguuucuggguggagcugguccgagggcuucccagagaaaauaccacaaucuggacuuccggaucuucgauuagcuucugcggcguggacuccgauaccgcuaacuggucauggccugacggugccgaguugccauuuacaaucgauaaguga

SEQ ID NO: 144095 - RNA, 1413 nt, Artificial Sequence; identical to SEQ ID NO: 144078
  derived and/or modified CDS sequence (opt3) from neuraminidase__InfluenzaA__ABV29791

SEQ ID NO: 144096 - RNA, 1413 nt, Artificial Sequence; identical to SEQ ID NO: 144078
  derived and/or modified CDS sequence (opt3) from neuraminidase__InfluenzaA__ABV29802

SEQ ID NO: 144097 - RNA, 1410 nt, Artificial Sequence; identical to SEQ ID NO: 143932
  derived and/or modified CDS sequence (opt3) from neuraminidase__InfluenzaA__ABV29824

SEQ ID NO: 144098 - RNA, 1413 nt, Artificial Sequence; identical to SEQ ID NO: 144078
  derived and/or modified CDS sequence (opt3) from neuraminidase__InfluenzaA__ABV29835

SEQ ID NO: 144099 - RNA, 1413 nt, Artificial Sequence
  derived and/or modified CDS sequence (opt3) from neuraminidase__InfluenzaA__ABV29846
augaaccccaaucagaagaucauuaccauaggcagcaucuccauugccaucgggauuaucucucugaugcuccaaauaggaaacaucauuucaaucugggcuagucacagcauucagaucgguucccagaaucauacaggcauaugcaaccagagaauuaucacuuacgaaaauucuacgugggugaaccacaccuaugucaauauuaacaauacaaacguuguggcagggaaagacaagacuucgguaacccuugccggaaauucaagccuguguaguaucuccggcugggcgaucuacacaaaagauaacucuauuaggauagguagcaagggggacguguucgucauccgggagccuuuuauuuccugcucacauuuggagugucgcaccuucuuuuuaacucaaggagcucugcuaaaugauaaacacaguaacggcacagugaaggaccgaagcccauaucgugcccucaugucuugcccgcugggcgaagcacccuccccuuacaauucaaaguucgagagcguugccuggagugcuucugcaugucaugaugggaugggauggcuuaccaucgguauauccggcccagacaacggggccguggcuguccugaaauauaacggaauuaucacggaaacuaucaagagcuggaaaaagagaauuuugaggacccaggagucggagugcguguguguaaauggcucuugcuuuacaaucaugacugauggucccuccaacggggccgcgucauacaaaauuuucaagauagaaaagggaaaaguuaccaagaguaucgagcucaaugcaccuaacuuucacuaugaagaguguagcugcuacccagacacaggcaccgugaugugugucugccgggauaauuggcacggcuccaaccgccccugggugucuuucaaucagaaccuggacuaccaggugggguauauuugcagcggagucuuuggugauaauccuagaccaaaagacggcaaggggucauguaacccgaugacgguugauggagccgacggcgugaaagguuucaguuacaaguaugggaauggcguauggaucggaaggacuaaauccaacaagcugcggaagggcuuugagaugaucugggaccccaauggguggacagauaccgacagcgauuucucugugaaacaagacgucguggcuauuacugauuggucaggauacagugguagcuuuguucagcauccugaacucacaggcuuagacugcauacgcccauguuucuggguggagcugguccgagggcuucccagagaaaacaccacgaucuggaccuccggaucuucgauuagcuucugcggcguggauuccgacacagccaauuggucauggccugauggugcagaguugccauuuacuaucgacaaguga

SEQ ID NO: 144100 - RNA, 1413 nt, Artificial Sequence
  derived and/or modified CDS sequence (opt3) from neuraminidase__InfluenzaA__ABV29879
augaaccccaaucagaagaucauuaccauaggcagcaucuccauugccaucgggauuaucucucugaugcuccaaauaggaaacaucauuucaaucugggcuagucacagcauucagacagguucccagaaucauacuggcaucugcaaccagagaauaauuacguacgaaaauucuaccugggugaaccacacauaugucucgaucaauaacacuaauguuguggcagggaaagacaagaccucaguaacacuugccggaaacagcagucuguguuccauuucuggcugggcgaucuacaccaaagauaauagcaucaggauugguuccaagggggacguguucauaauccgggagccuuuuauuucaugcagucauuuggagugucgcacuuucuuuuuaacacaaggagcucugcuaaacgauaaacacagcaauggcaccgucaaggaccgaucuccauaucgugcccucauguccugcccgcugggcgaagcacccucaccuuacaacagcaaguucgagaguguggccuggucugcuuccgcaugucaugaugggaugggauggcuuacgaucgguauaagcggcccagacaauggggccguugcugugcugaaauauaacggaauuaucacugaaaccaucaagucguggaaaaagagaauuuugaggacacaggagucugagugcgucugugugaacggcuccugcuuuacuaucaugaccgauggucccucaaauggggccgcgaguuacaaaauuuucaagauagaaaagggaaaaguaacaaagagcaucgagcucaacgcaccuaauuuucacuaugaagaguguuccugcuacccagacaccggcacgguuaugugugugugccgggauaacuggcacggcucuaaucgccccugggucagcuucaaccagaaucuggacuaccagauuggguauaucugcucaggaguguuuggugauaacccuagaccaaaagacggcaaggggaguuguaauccggugacugucgauggagccgacggcguuaaagguuucuccuacaaguaugggaacggcguguggaucggaaggacaaaaagcaaucggcugcgcaagggcuuugagaugauuugggaccccaacggguggaccgauacugacucugauuucucaguaaagcaagacguggucgcuauaacagauuggaguggauacagcgguuccuuugugcagcauccugaacucaccggcuuagacugcauccgaccauguuucuggguugagcuggugagagggcuucccagggaaaauacgaccauuuggacaucuggaucgagcaucuccuucugcggcgucgauucagacacugccaacuggaguuggccugauggugcagaguugccauuuaccauugacaaauga

SEQ ID NO: 144101 - RNA, 1413 nt, Artificial Sequence; identical to SEQ ID NO: 144078
  derived and/or modified CDS sequence (opt3) from neuraminidase__InfluenzaA__ABV29890

SEQ ID NO: 144102 - RNA, 1410 nt, Artificial Sequence; identical to SEQ ID NO: 143932
  derived and/or modified CDS sequence (opt3) from neuraminidase__InfluenzaA__ABV29901

SEQ ID NO: 144103 - RNA, 1410 nt, Artificial Sequence
  derived and/or modified CDS sequence (opt3) from neuraminidase__InfluenzaA__ABV29912
augaaccccaaucagaagaucauuaccauaggcagcgugucccugacaaucucuacuauuugcuucuuuaugcaaaucgccauucucaucacgaccgucacacuucacuucaaacaguacgaguuuaacucaccuccaaauaaccagguuaugcugugugaaccgacuauaaucgagagaaauauuaccgaaaucguguauuugacaaacaccacuauugagaaggaaaucugccccaaauuagcugaguacaggaauuggaguaagccucagugugacauaacaggguucgcaccauuuagcaaagauaacuccauucggcugucugccggaggugacaucuggguaacccgcgagcccuaugugucgugcgauccugacaaguguuaccaauucgcgcuaggccaggggacgacucucaauaacguccauucaaaugauaccgugcacgaccgaacaccauaucguacucugcuuaugaacgaacugggaguucccuuucauuugggcaccaaacaggugugcauugcuuggagcaguuccucuugucacgaugguaaggccuggcuccaugucugcgugacaggggacgauaagaaugcaaccgccagcuucaucuacaacggaagacugguagacuccaucguuucauggaguaaagauauucugaggacgcaggagagcgaauguauaugcaucaauggcacuuguacaguggucaugaccgacggcucugcuuccgggaaggcagauacuaaaauucucuuuaucgaggagggaaagauagugcacacaucaaccuuaagcgguagugcccaacacguggaagagugcucuugcuauccucgguacccaggcguccgcuguguuugcagagacaacuggaagggguccaacaggccgauuguggacaucaauaucaaagauuacagcauuguaucgucuuauguguguuccggacuggucggcgacacgccccggaagaacgauucaaguagcuccucucauugccuugacccuaauaacgaagagggugggcacggagugaaaggcugggcuuucgaugacggcaaugauguuuggauggggcgcaccaucagcgaaaaguugcgacugggauacgagacauuuaaagugauugaggguuggucaaacccaaauaguaagcuacagauaaacagacaggucaucguggacaaaggcaauagguccggguauagcggaauuuucucuguagaaggcaagucauguaucaaccggugcuuuuacguugagcucauccguggucgcaaggaagagacugaagugcuguggaccaguaauagcauugucguguucugugggacauccggcacuuauggaaccggcucuuggcccgauggggccgacauaaaccuuaugccuaucuga

SEQ ID NO: 144104 - RNA, 1413 nt, Artificial Sequence
  derived and/or modified CDS sequence (opt3) from neuraminidase__InfluenzaA__ABV29923
augaaccccaaucagaagaucauuaccauaggcagcaucuccauugccaucgggauuaucucucugaugcuccaaauaggaaacaucauuucaaucugggcuagucacagcauucagacagguucccagaaucauacuggcaucugcaaccagagaauaauuacguacgaaaauucuaccugggugaaccacacauaugucaauaucaacaauacuaacguuguggcagggaaagacaagaccucgguaacacuugccggaaauucaagccuguguaguauuuccggcugggcgaucuacaccaaagauaacucuaucaggauugguagcaagggggacguguucgucauacgggagccuuuuaucuccugcucacauuuggagugucgcacuuucuuuuuaacacaaggagcucugcuaaaugauaaacacaguaacggcaccgugaaggaccgaagcccauaucgugcccucaugucuugcccgcugggcgaagcacccuccccuuacaauucaaaguucgagagcguugccuggagugcuucugcaugucaugaugggaugggauggcuuacgauugguaucuccggcccagacaacggggccguggcuguccugaaauauaacggaauaauuacugaaaccaucaagagcuggaaaaagagaaucuugaggacacaggagucggagugcguguguguaaauggcucuugcuuuacuauuaugaccgauggucccuccaacggggccgcgucauacaaaaucuucaagauugaaaagggaaaaguuacaaagaguauagagcucaaugcaccuaacuuucacuaugaagaguguagcugcuacccagacaccggcacggugaugugugucugccgggauaauuggcacggcuccaaccgccccugggugucuuucaaucagaaccuggacuaccaggugggguauaucugcagcggagucuuuggugauaauccuagaccaaaagacggcaaggggucauguaacccgaugacuguugauggagccgacggcgugaaagguuucaguuacaaguaugggaauggcguauggauuggaaggacaaaauccaacaagcugcggaagggcuuugagaugaucugggaccccaauggguggaccgauacugacagcgauuucucugugaaacaagacgucguggcuaucacagauuggucaggauacagugguagcuuuguucagcauccugaacucaccggcuuagacugcauucgcccauguuucuggguggagcugguccgagggcuucccagagaaaacgccacgauauggaccuccggaucuucgaucagcuucugcggcguggauuccgacacagcaaauuggucauggccugauggugcugaguugccauuuacuauugacaaguga

SEQ ID NO: 144105 - RNA, 1410 nt, Artificial Sequence
  derived and/or modified CDS sequence (opt3) from neuraminidase__InfluenzaA__ABV29934
augaaccccaaucagaagaucauuaccauaggcagcgugucccugacaaucucuacuauuugcuucuuuaugcaaaucgccauucucaucacgaccgucacacuucacuucaaacaguacgaguuuaacucaccuccaaauaaccagguuaugcugugugaaccgacuauaaucgagagaaauauuaccgaaaucguguauuugacaaacaccacuauugagaaggaaaucugccccaaauuagcugaguacaggaauuggaguaagccucagugugacauaacaggguucgcaccauuuagcaaagauaacuccauucggcugucugccggaggugacaucuggguaacccgcgagcccuaugugucgugcgauccugacaaguguuaccaauucgcgcuaggccaggggacgacucucaauaacguccauucaaaugauaccgugcgagaccguacaccauauagaacucugcuuaugaacgaacugggaguucccuuucacuugggcaccaaacaggugugcauugcuuggagcaguuccucuugucaugaugguaaggccuggcuccacgucugcaucacaggggacgauaagaaugcaaccgccagcuucaucuacaacggaaggcugguggacuccauuguaucauggaguaaagagauacugcggacgcaggaaagcgaguguguuugcaucaauggcacuuguacaguggucaugaccgauggcucugcuuccgggaaggcagacacuaaaauucucuuuaucgaggaaggaaagauagugcauacaucaaccuuaagcgguagugcccaacacguggaggaaugcucuugcuauccucgcuacccaggcgucagauguguuugcagggauaacuggaagggguccaaccggccgauuguggacaucaauaucaaagaccacagcauuguaucgucuuacguguguuccggacuggucggcgauacgccccgcaagaacgacucaaguagcuccucucauugccuugauccuaauaacgaggaaggugggcacggagugaaaggcugggcuuucgacgauggcaaugacguuuggauggggcgaaccaucagcgagaagucaagauugggauaugagacauuuaaagugauugaagguuggaguaacccaaaguccaaacugcagauaaauaggcaggucaucguggaucggggcaaccguacuggguacagcggaauuuucucuguagagggcaagucauguaucaaucgcugcuuuuauguugaacuaaucagagguaggaaggaggaaaccgaggugcucuggacaaguaacagcauugucguguucugugggacuuccggcaccuacggaacaggcucuuggcccgacggggccgauauaaaucugaugccuaucuga

SEQ ID NO: 144106 - RNA, 1413 nt, Artificial Sequence; identical to SEQ ID NO: 144091
  derived and/or modified CDS sequence (opt3) from neuraminidase__InfluenzaA__ABV29945

SEQ ID NO: 144107 - RNA, 1413 nt, Artificial Sequence
  derived and/or modified CDS sequence (opt3) from neuraminidase__InfluenzaA__ABV29956
augaaccccaaucagaagaucauuaccauaggcagcaucuccauugccaucgggauuaucucucugaugcuccaaauaggaaacaucauuucaaucugggcuagucacagcauucagacagguucccagaaucauacuggcaucugcaaccagagaauaauuacguacgaaaauucuaccugggugaaccacacauaugucucgaucaauaacacuaauguuguggcagggaaagacaagaccucaguaacacuugccggaaacagcagucuguguuccauuucuggcugggcgaucuacaccaaagauaauagcaucaggauugguuccaagggggacguguucgucauacgggagccuuuuaucucaugcagucauuuggagugucgcacuuucuuuuuaacacaaggagcucugcuaaacgauaaacacagcaauggcaccgugaaggaccgaucuccauaucgugcccucauguccugcccgcugggcgaagcacccucaccuuacaacagcaaguucgagaguguugccuggucugcuuccgcaugucaugaugggaugggauggcuuacgauugguaucagcggcccagacaauggggccguggcuguccugaaauauaagggaauaauuacugaaaccaucaaaucguggaagaaaagaaucuugaggacacaggagucugagugcguguguguaaacggcuccugcuuuacuauuaugaccgauggucccucaaacggggccgcgaguuacaagaucuucaagauugaaaaaggaaagguuacaaaaagcauagagcucaaugcaccuaacuuucacuaugaagaguguuccugcuacccagacaccggcacggugaugugugucugccgggauaauuggcacggcucuaaccgccccugggugagcuucaaucagaaccuggacuaccagaucggguauauuugcucaggaguguuuggugauaauccuagaccaaaggacggcaaagggaguuguaacccggucacuguugauggagccgacggcgugaaggguuucuccuacaaauaugggaauggcguauggaucggaaggacaaagagcaaccggcugcgcaagggcuuugagaugaucugggaccccaauggguggaccgauacugacucugauuucucagugaaacaagacgucguggcuauuacagauuggaguggauacagcgguuccuuuguucagcauccugaacucaccggcuuagacugcauacgaccauguuucuggguggagcuggucagagggcuucccagggaaaacacgaccaucuggacaucuggaucgagcauuuccuucugcggcguggauucagacacugccaauuggaguuggccugauggugcagaguugccauuuaccaucgacaaguga

SEQ ID NO: 144108 - RNA, 1413 nt, Artificial Sequence
  derived and/or modified CDS sequence (opt3) from neuraminidase__InfluenzaA__ABV29989
augaaccccaaucagaagaucauuaccauaggcagcaucuccauugccaucgggauuaucucucugaugcuccaaauaggaaacaucauuucaaucugggcuagucacagcauucagacagguucccagaaucauacuggcaucugcaaccagagaauaauuacguacgaaaauucuaccugggugaaccacacauaugucucgaucaauaacacuaauguuguggcagggaaagacaagaccucaguaacacuugccggaaacagcagucuguguuccauuucuggcugggcgaucuacaccaaagauaauagcaucaggauugguuccaagggggacguguucgucaugcgggagccuuuuauaucaugcagucauuuggagugucgcacuuucuuuuuaacacaaggagcucugcuaaacgauaaacacagcaauggcaccgugaaggaccgaucuccauaucgugcccucauguccugcccgcugggcgaagcacccucaccuuacaacagcaaguucgagaguguugccuggucugcuuccgcaugucaugaugggaugggauggcuuacgaucgguauuagcggcccagacaauggggccguggcuguccugaaauauaacggaaucauaacugaaaccauuaagucguggaaaaagagaaucuugaggacacaggagucugagugcguguguguaaacggcuccugcuuuacuaucaugaccgauggucccucaaauggggccgcgaguuacaaaauuuucaagaucgaaaagggaaaaguuacaaagagcauugagcucaacgcaccuaauuuucacuaugaagaguguuccugcuacccagacaccggcacggugaugugugucugccgggauaacuggcacggcucuaaucgccccugggugagcuucaaccagaaucuggacuaccagauaggguauaucugcucaggaguguuuggugauaacccuagaccaaaagacggcaaggggaguuguaauccggucacuguugauggagccgacggcgugaaagguuucuccuacaaguaugggaacggcguauggauuggaaggacaaaaagcaaucggcugcgcaagggcuuugagaugaucugggaccccaacggguggaccgauacugacucugauuucucagugaagcaagacgucguggcuaucacagauuggaguggauacagcgguuccuuuguucagcauccugaacucaccggcuuagacugcauucgaccauguuucuggguggagcuggucagagggcuucccagggaaaauacgaccauauggacaucuggaucgagcaucuccuucugcggcguggauucagacacugccaacuggaguuggccugauggugcagaguugccauuuaccauugacaaauga

SEQ ID NO: 144109 - RNA, 1413 nt, Artificial Sequence; identical to SEQ ID NO: 144078
  derived and/or modified CDS sequence (opt3) from neuraminidase__InfluenzaA__ABV30000

SEQ ID NO: 144110 - RNA, 1413 nt, Artificial Sequence; identical to SEQ ID NO: 144078
  derived and/or modified CDS sequence (opt3) from neuraminidase__InfluenzaA__ABV30011

SEQ ID NO: 144111 - RNA, 1413 nt, Artificial Sequence; identical to SEQ ID NO: 144078
  derived and/or modified CDS sequence (opt3) from neuraminidase__InfluenzaA__ABV30022

SEQ ID NO: 144112 - RNA, 1413 nt, Artificial Sequence
  derived and/or modified CDS sequence (opt3) from neuraminidase__InfluenzaA__ABV30044
augaaccccaaucagaagaucauuaccauaggcagcaucuccauugccaucgggauuaucucucugaugcuccaaauaggaaacaucauuucaaucugggcuagucacagcauucagacagguucccagaaucauacuggcaucugcaaccagagaauaauuacguacgaaaauucuaccugggugaaccacacauaugucaauaucaacaauacuaacguuguggcagggaaagacaagaccucgggaacacuugccggcaauucaagccuguguaguauuuccgguugggcgaucuacaccaaagauaacucuaucaggauugggagcaagggagacguauucgugauacgggagccuuuuaucuccugcucacauuuggagugucgcacuuucuuuuuaacacaaggcgcucugcuaaaugauaaacacaguaacggcaccgucaaggaccgaagcccauaucgugcccucaugucuugcccgcugggggaagcacccuccccuuacaauucaaaguucgagagcguggccuggagugcuucugcaugucaugauggaauggguuggcuuacgauuggcaucuccgggccagacaacggagccguugcugugcugaaauauaacggcauaauuacugaaaccaucaagagcuggaaaaagagaaucuugaggacacaggagucggagugcgucugugugaaugguucuugcuuuacuauuaugaccgaugggcccuccaacggagccgcgucauacaaaaucuucaagauugaaaagggcaaaguaacaaagaguauagagcucaaugcaccuaacuuucacuaugaagaguguagcugcuacccagacaccggcacgguuaugugugugugccgggauaauuggcacggguccaaccgccccugggucucuuucaaucagaaccuggacuaccaggugggauauaucugcagcgguguguuuggcgauaauccuagaccaaaagacgggaagggaucauguaacccgaugacugucgauggcgccgacgguguuaaaggguucaguuacaaguauggcaauggaguguggauuggcaggacaaaauccaacaagcugcggaagggguuugagaugaucugggaccccaauggauggaccgauacugacagcgauuucucuguaaaacaagacguggucgcuaucacagauuggucagguuacaguggcagcuuugugcagcauccugaacucaccggguuagacugcauucgcccauguuucuggguugagcuggugcgaggacuucccagagaaaacacgaccauauggacauccgguucuucgaucagcuucugcggcgucgauuccgacacugccaauuggucauggccugauggggcagaguugccauuuaccauugacaaguga

SEQ ID NO: 144113 - RNA, 1413 nt, Artificial Sequence
  derived and/or modified CDS sequence (opt3) from neuraminidase__InfluenzaA__ABV30055
augaaccccaaucagaagaucauuaccauaggcagcaucuccauugccaucgggauuaucucucugaugcuccaaauaggaaacaucauuucaaucugggcuagucacagcauucagacagguucccagaaucauacuggcaucugcaaccagagaauaauuacguacgaaaauucuaccugggugaaccacacauaugucaauaucaacaauacuaacguuguggcagggaaagacaagaccucgguaacacuugccggaaauucaagccuguguaguauuuccggcugggcgaucuacaccaaagauaacucuaucaggauugguagcaagggggacguguucgucauacgggagccuuuuaucuccugcucacauuuggagugucgcacuuucuuuuuaacacaaggagcucugcuaaaugauaaacacaguaacggcaccgugaaggaccgaagcccauaucgugcccucaugucuugcccgcugggcgaagcacccuccccuuacaauucaaaguucgagagcguugccuggagugcuucugcaugucaugaugggaugggauggcuuacgauugguaucuccggcccagacaacggggccguggcuguccugaaauauaacggaauaauuacugaaaccaucaagagcuggaaaaagagaaucuugaggacacaggagucggagugcguguguguaaauggcucuugcuuuacuauuaugaccgauggucccuccaacggggccgcgucauacaaaaucuucaagauugaaaagggaaaaguuacaaagaguauagagcucaaugcaccuaacuuucacuaugaagaguguagcugcuacccagacaccggcacggugaugugugucugccgggauaauuggcacggcuccaaccgccccugggugucuuucaaucagaaccuggacuaccaggugggguauaucugcagcggagucuuuggugauaauccuagaccaaaagacggcaaggggucauguaacccgaugacuguugauggagccgacggcgugaaagguuucaguuacaaguaugggaauggcguauggauuggaaggacaaaauccaacaagcugcggaagggcuuugagaugaucugggaccccaauggguggaccgauacugacagcgauuucucugugaaacaagacgucguggcuaucacagauuggucaggauacagugguagcuuuguucagcauccugaacucaccggcuuagacugcauucgcccauguuucuggguggagcugguccgagggcuucccagagaaaacacgaccauauggacauccggaucuucgaucagcuucugcggcguggauuccgacacugccaauuggucauggccugauggugcagaguugccauuuaccauugacaaguga

SEQ ID NO: 144114 - RNA, 1410 nt, Artificial Sequence
  derived and/or modified CDS sequence (opt3) from neuraminidase__InfluenzaA__ABV30077
augaaccccaaucagaagaucauuaccauaggcagcgugucccugacaaucucuacuauuugcuucuuuaugcaaacggccauccucauuaccacagucacucuucacuucaaacaguacgaguuuaacucaccuccaaauaaccagguuaugcugugugaaccgaccaucauagagagaaauaucacagaaauuguguauuugaccaacacuacaaucgagaaggaaauuugccccaaauuagcugaguacaggaauuggaguaagccucagugugacaucaccggguucgcaccauuuagcaaagauaacuccauacggcugucugccggaggugacauuuggguaacgcgcgagcccuaugugucgugcgauccugacaaguguuaccaauucgcgcuaggccaggggacuacccucaauaacguccauucaaaugauacagugcgagaccguacuccauauagaacccugcuuaugaacgaacugggaguucccuuucacuugggcacaaaacaggugugcaucgcuuggagcaguuccucuugucaugaugguaaggccuggcuccacgucugcauuaccggggacgauaagaaugcaacggccagcuucaucuacaacggaaggcugguggacuccaucguaucauggaguaaagagauucugcggacucaggaaagcgaguguguuugcauaaauggcacauguaccguggucaugacugauggcucugcuuccgggaaggcagacacaaaaauccucuuuauugaggaaggaaagaucgugcauaccucaacguuaagcgguagugcccaacacguggaggaaugcucuugcuauccucgcuacccaggcgucagauguguuugcagggauaacuggaagggguccaaccggccgauaguggacauuaauaucaaagaccacagcaucguaucgucuuacguguguuccggacuggucggcgauacaccccgcaagaacgacucaaguagcuccucucauugccuugauccuaauaacgaggaaggugggcacggagugaaaggcugggcuuucgacgauggcaaugacguuuggauggggcgaaccauuagcgagaagucaagauugggauaugagacuuuuaaagugaucgaagguuggaguaacccaaaguccaaacugcagauuaauaggcaggucauaguggaucggggcaaccguagcggguacucuggaaucuucucaguagagggcaagaguuguauuaaucgcugcuuuuauguugaacuaaucagagguaggaaggaggaaaccgaggugcucuggacaagcaacuccaucgucguguucugugggacuucuggcaccuacggaacaggcucguggcccgacggggccgauauuaaucugaugccuauauga

SEQ ID NO: 144115 - RNA, 1413 nt, Artificial Sequence; identical to SEQ ID NO: 144078
  derived and/or modified CDS sequence (opt3) from neuraminidase__InfluenzaA__ABV30088

SEQ ID NO: 144116 - RNA, 1413 nt, Artificial Sequence; identical to SEQ ID NO: 144078
  derived and/or modified CDS sequence (opt3) from neuraminidase__InfluenzaA__ABV30099

SEQ ID NO: 144117 - RNA, 1413 nt, Artificial Sequence
  derived and/or modified CDS sequence (opt3) from neuraminidase__InfluenzaA__ABV30110
augaaccccaaucagaagaucauuaccauaggcagcaucuccauugccaucgggauuaucucucugaugcuccaaauaggaaacaucauuucaaucugggcuagucacagcauucagacagguucccagaaucauacuggcaucugcaaccagagaauaauuacguacgaaaauucuaccugggugaaccacacauaugucucgaucaauaacacuaauguuguggcagggaaagacaagaccucaguaacacuugccggaaacagcagucuguguuccauuucuggcugggcgaucuacaccaaagauaauagcaucaggauugguuccaagggggacguguucgucauacgggagccuuuuaucucaugcagucauuuggagugucgcacuuucuuuuuaacacaaggagcucugcuaaacgauaaacacagcaauggcaccgugaaggaccgaucuccauaucgugcccucauguccugcccgcugggcgaagcacccucaccuuacaacagcaaguucgagaguguugccuggucugcuuccgcaugucaugaugggaugggauggcuuacgauugguaucagcggcccagacaauggggccguggcuguccugaaauauaacggaauaauuacuggcaccaucaagucguggaaaaagagaaucuugaggacacaggaaucugagugcguguguguaaacgguuccugcuuuacuauuaugaccgaugggcccucaaauggagccgcgaguuacaaaaucuucaagauugagaagggcaaaguuacaaagagcauagaacucaacgcaccuaauuuucacuaugaggaauguuccugcuacccagacaccggcacggugaugugugucugccgggauaacuggcacgggucuaaucgccccugggugagcuucaaccagaaucuggacuaccagaucggauauauuugcucagguguguuuggcgauaacccuagaccaaaagacgggaagggaaguuguaauccggucacuguugauggcgccgacggugugaaaggguucuccuacaaguauggcaacggaguauggaucggcaggacaaaaagcaaucggcugcgcaagggguuugagaugaucugggaccccaacggauggaccgauacugacucugauuucucagugaagcaagacgucguggcuauuacagauuggagugguuacagcggcuccuuuguucagcauccugagcucaccggguuagacugcauacgaccauguuucuggguggaacuggucagaggacuucccagggagaauacgaccaucuggacaucuggcucgagcauuuccuucugcgguguggauucagacacugccaacuggaguuggccugauggggcagaauugccauuuaccaucgacaaauga

SEQ ID NO: 144118 - RNA, 1413 nt, Artificial Sequence; identical to SEQ ID NO: 144078
  derived and/or modified CDS sequence (opt3) from neuraminidase__InfluenzaA__ABV30132

SEQ ID NO: 144119 - RNA, 1413 nt, Artificial Sequence
  derived and/or modified CDS sequence (opt3) from neuraminidase__InfluenzaA__ABV30143
augaaccccaaucagaagaucauuaccauaggcagcaucuccauugccaucgggauuaucucucugaugcuccaaauaggaaacaucauuucaaucugggcuagucacagcauucagacagguucccagaaucauacuggcaucugcaaccagagaauaauuacguacgaaaauucuaccugggugaaccacacauaugucaauaucaacaauacuaacguuguggcagggaaagacaagaccucgguaacacuugccggaaauucaagccuguguaguauuuccggcugggcgaucuacaccaaagauaacucuaucaggauugguagcaagggggacguguucgucauacgggagccuuuuaucuccugcucacauuuggagugucgcacuuucuuuuuaacacaaggagcucugcuaaaugauaaacacaguaacggcaccgugaaggaccgaagcccauaucgugcccucaugucuugcccgcugggcgaagcacccuccccuuacaauucaaaguucgagagcguugccuggagugcuucugcaugucaugaugggaugggauggcuuacgauugguaucuccggcccagacaacggggccguggcuguccugaaauauaacggaauaauuacugaaaccaucaagagcuggaaaaagagaaucuugaggacacaggagucggagugcguguguguaaauggcucuugcuuuacuauuaugaccgauggucccuccaacggggccgcgucauacaaaaucuucaagauugaaaagggaaaaguuacaaagaguauagagcucaaugcaccuaacuuucacuaugaagaguguagcugcuacccagacaccggcacggugaugugugucugccgggauaauuggcacggcuccaaccgccccugggugucuuucaaucagaaccuggacuaccagaucggguauauuugcagcggaguguuuggugauaauccuagaccaaaagacggcaaggggucauguaacccggucacuguugauggagccgacggcgugaaagguuucaguuacaaguaugggaauggcguauggaucggaaggacaaaauccaaccggcugcgcaagggcuuugagaugaucugggaccccaauggguggaccaacacugauagcgacuucucugugaagcaagaugucguggcuauuacagacuggucaggauacagugguagcuuuguucagcauccugaacucaccggcuuagauugcauacgaccauguuucuggguggagcuggucagagggcuucccagggaaaauacgaccaucuggacauccggaucuucgauuagcuucugcggcguggacuccgauacugccaacuggucauggccugacggugcagaguugccauuuaccaucgauaaauga

SEQ ID NO: 144120 - RNA, 1413 nt, Artificial Sequence; identical to SEQ ID NO: 144104
  derived and/or modified CDS sequence (opt3) from neuraminidase__InfluenzaA__ABV30154

SEQ ID NO: 144121 - RNA, 1413 nt, Artificial Sequence
  derived and/or modified CDS sequence (opt3) from neuraminidase__InfluenzaA__ABV30165
augaaccccaaucagaagaucauuaccauaggcagcaucuccauugccaucgggauuaucucucugaugcuccaaauaggaaacaucauuucaaucugggcuagucacagcauucagacagguucccagaaucauacuggcaucugcaaccagagaauaauuacguacgaaaauucuaccugggugaaccacacauaugucucgaucaauaacacuaauguuguggcagggaaagacaagaccucaguaacacuugccggaaaccugagcuuguguaguauuuccggcugggcgaucuacaccaaagauaauucuaucaggauugguagcaagggggacguguucgucauacgggagccuuuuaucuccugcucacauuuagagugucgcacuuucuuucugacacaaggagcucuacucaacgauaaacacaguaauggcaccgugaaggaccgaagcccauaucgugcccugaugucuugcccgcuuggcgaagcacccuccccuuacaacucaaaguucgagagcguugccuggagugcuucugcaugucaugaugggaugggauggcugacgauugguaucuccggcccagacaauggggccguggcugucuugaaauauaacggaauaauuacugaaaccaucaagagcuggaaaaagagaauccucaggacacaggagucggagugcguguguguaaacggcucuugcuuuacuauuaugaccgauggucccuccaauggggccgcgucauacaaaaucuucaagauugaaaagggaaaaguuacaaagaguauagagcugaacgcaccuaauuuucacuaugaagaguguagcugcuacccagacaccggcacggugaugugugucugccgggauaacuggcacggcuccaaucgccccugggugucuuucaaccagaaucuggacuaccagaucggguauauuugcagcggaguguuuggugauaacccuagaccaaaagacggcaaggggucauguaauccggucacuguugauggagccgacggcgugaaagguuucaguuacaaguaugggaacggcguauggaucggaaggacaaaauccaaucggcuccgcaagggcuuugagaugaucugggaccccaacggguggaccgauacugacagcgauuucucugugaagcaagacgucguggcuauuacagauuggucaggauacagugguagcuuuguucagcauccugaauuaaccggccuggacugcauacgaccauguuucuggguggagcuugucagaggguugcccagggaaaauacgaccaucuggacauccggaucuucgauuagcuucugcggcguggauuccgacacugccaacuggucauggccugauggugcagagcugccauuuaccaucgacaaauga

SEQ ID NO: 144122 - RNA, 1413 nt, Artificial Sequence; identical to SEQ ID NO: 144078
  derived and/or modified CDS sequence (opt3) from neuraminidase__InfluenzaA__ABV30187

SEQ ID NO: 144123 - RNA, 1413 nt, Artificial Sequence; identical to SEQ ID NO: 144078
  derived and/or modified CDS sequence (opt3) from neuraminidase__InfluenzaA__ABV30198

SEQ ID NO: 144124 - RNA, 1410 nt, Artificial Sequence; identical to SEQ ID NO: 143932
  derived and/or modified CDS sequence (opt3) from neuraminidase__InfluenzaA__ABV30209

SEQ ID NO: 144125 - RNA, 1410 nt, Artificial Sequence; identical to SEQ ID NO: 144114
  derived and/or modified CDS sequence (opt3) from neuraminidase__InfluenzaA__ABV30220

SEQ ID NO: 144126 - RNA, 1410 nt, Artificial Sequence; identical to SEQ ID NO: 144114
  derived and/or modified CDS sequence (opt3) from neuraminidase__InfluenzaA__ABV30231

SEQ ID NO: 144127 - RNA, 1410 nt, Artificial Sequence
  derived and/or modified CDS sequence (opt3) from neuraminidase__InfluenzaA__ABV30264
augaaccccaaucagaagaucauuaccauaggcagcgugucccugacaaucucuacuauuugcuucuuuaugcaaaucgccauucucaucacgaccgucacacuucacuucaaacaguacgaguuuucaaguccuccaaacaaucagguuaugcugugugaaccgacuauaaucgagagaaacauuaccgaagugguauauuugacaaauaccacuaucgagaaggaaauuugccccaaauuagcugaguacaggaacuggagcaagccucagugugacaucacaggguucgcaccauuuuccaaagauaauucuauacggcugucggccggaggugacauuugggugacccgcgagcccuaugucucaugcgauccugacaaguguuaccaauucgcgcuaggccaggggacgacucucaacaaugugcauagcaacgauaccguucacgaccgaacaccauaucguacucugcuuaugaaugaacugggagugcccuuucauuugggcaccaagcaggucugcaucgcuuggaguuccucuagcugucacgaugguaaagccuggcuccaugugugcguaacaggggacgauaagaacgcaaccgccuccuucauuuacaauggaagacugguugacucaaucgugaguuggagcaaagagauccugaggacgcaggaaucugagugugucugcauuaacggcacuuguacaguggugaugaccgauggcuccgcuucagggaaggcagacacuaaaauacucuuuaucgaggaaggaaagauuguccacacaagcaccuuaagugguucugcccaacacguugaggaaugcuccugcuauccucgguacccaggcgugcgcuguguaugcagagauaauuggaaggggagcaacaggccgaucguggacauaaacauuaaagacuacucgaucgucucucgguauguguguuccggacugguuggcgauacgccccgcaagaaugacucaaguagcuccucucauugccuugauccuaacaaugaggaaggugggcacggagugaaaggcugggcuuucgacgauggcaacgacgucuggauggggcgaaccaucagcgagaagucaagaaguggauacgagacauuuaaagugauugaagguugguccaauccaaacagcaaguugcagaucaauaggcagguaauuguugaucggggcaaccguucuggguauucaggaauauucaguguggagggcaaaagcuguaucaaucgcugcuuuuacgucgaacugauuagagguaggaaggaggaaacugaggugcuauggaccuccaacucuaucgucguguucugugggacaucgggcacuuauggaaccggcagcuggcccgacggggccgauaucaaucucaugccuauuuga

SEQ ID NO: 144128 - RNA, 1410 nt, Artificial Sequence
  derived and/or modified CDS sequence (opt3) from neuraminidase__InfluenzaA__ABV30275
augaaccccaaucagaagaucauuaccauaggcagcgugucccugacaaucucuacuauuugcuucuuuaugcaaacggccauccucauuaccacagucacucuucacuucaaacaguacgaguuuaacucaaccccuaauaaccagguuaugcugugugaaccaacaaucauagagagaaauaucaccgaaauuguguauuugacuaacacaaccaucgagaaggaaauuugcccgaaauuagcugaguacaggaauuggaguaagccccagugugacaucacgggguucgcaccuuuuagcaaagauaacuccauacggcugucugccggaggugacauuuggguaacucgcgagccauaugugucgugcgaucccgacaaguguuaccaauucgcgcuaggccaggggaccacacucaauaacguccauucaaaugauacugugcgagaccguaccccuuauagaacacugcuuaugaacgaacugggaguuccauuucacuugggcaccaaacaggugugcaucgcuuggagcaguuccucuugucaugaugguaaggccuggcuccacgucugcauuacgggggacgauaagaaugcaacugccagcuucaucuacaacggaaggcugguggacuccaucguaucauggaguaaagagauucugcggacacaggaaagcgaguguguuugcauaaauggcaccuguacuguggucaugacagauggcucugcuuccgggaaggcagacaccaaaauccucuuuauugaggaaggaaagaucgugcauacgucaaccuuaagcgguagugcccaacacguggaggaaugcucuugcuauccccgcuacccuggcgucagauguguuugcagggauaacuggaagggguccaaccggccaauaguggacauuaauaucaaagaccacagcaucguaucgucuuacguguguuccggacuggucggcgauacaccgcgcaagaacgacucaaguagcuccucucauugccuugaucccaauaacgaggaaggugggcacggagugaaaggcugggcuuucgacgauggcaaugacguuuggauggggcgaacuauuagcgagaagucaagauugggauaugagaccuuuaaagugaucgaagguuggaguaacccuaaguccaaacugcagauuaauaggcaggucauaguggaucggggcaaccguagcggguacucuggaaucuucucaguagagggcaagaguuguauuaaucgcugcuuuuauguugaacuaaucagagguaggaaggaggaaacagaggugcucuggacuagcaacuccaucgucguguucugugggaccucuggcacauacggaaccggcucguggccagacggggccgauauuaaucugaugcccauauga

SEQ ID NO: 144129 - RNA, 1413 nt, Artificial Sequence; identical to SEQ ID NO: 144119
  derived and/or modified CDS sequence (opt3) from neuraminidase__InfluenzaA__ABV30297

SEQ ID NO: 144130 - RNA, 1413 nt, Artificial Sequence
  derived and/or modified CDS sequence (opt3) from neuraminidase__InfluenzaA__ABV30308
augaaccccaaucagaagaucauuaccauaggcagcaucuccauugccaucgggauuaucucucugaugcuccaaauaggaaacaucauuucaaucugggcuagucacagcauucagacagguucccagaaucauacuggcaucugcaaccagagaauaauuacguacgaaaauucuaccugggugaaccacacauaugucucgaucaauaacacuaauguuguggcagggaaagacaagaccucaguaacacuugccggaaacagcagucuguguuccauuucuggcugggcgaucuacaccaaagauaauagcaucaggauugguuccaagggggacguguucgucauacgggagccuuuuaucucaugcagucauuuggagugucgcacuuucuuuuuaacacaaggagcucugcuaaacgauaaacacagcaauggcaccgugaaggaccgaucuccauaucgugcccucauguccugcccgcugggcgaagcacccucaccuuacaacagcaaguucgagaguguugccuggucugcuuccgcaugucaugaugggaugggauggcuuacgauugguaucagcggcccagacaauggggccguggcuguccugaaauauaacggaauaauuacugaaaccaucaagucguggaaaaagagaaucuugaggacacaggagucugagugcgugugucucaacggcuccugcuuuacuauuaugaccgauggucccucaaauggggccgcgaguuacaaaaucuucaagauugaaaagggaaaaguaacaaagagcauagagcugaacgcaccuaauuuucacuaugaagaguguuccugcuacccagacaccggcacgguuaugugugugugccgggauaacuggcacggcucuaaucgccccugggucagcuucaaccagaaucuggacuaccagaucggguauauuugcucaggaguguuuggugauaacccuagaccaaaagacggcaaggggaguuguaauccggugacugucgauggagccgacggcguuaaagguuucuccuacaaguaugggaacggcguguggaucggaaggacaaaaagcaaucggcuccgcaagggcuuugagaugaucugggaccccaacggguggaccgauacugacucugauuucucaguaaagcaagacguggucgcuauuacagauuggaguggauacagcgguuccuuugugcagcauccugaauuaaccggccuggacugcauacgaccauguuucuggguugagcuugugagaggguugcccagggaaaauacgaccaucuggacaucuggaucgagcauuuccuucugcggcgucgauucagacacugccaacuggaguuggccugauggugcagagcugccauuuaccaucgacaaauga

SEQ ID NO: 144131 - RNA, 1413 nt, Artificial Sequence
  derived and/or modified CDS sequence (opt3) from neuraminidase__InfluenzaA__ABV30319
augaaccccaaucagaagaucauuaccauaggcagcaucuccauugccaucgggauuaucucucugaugcuccaaauaggaaacaucgugucaauuugggcuagucacagcauccagacagguucccagaaucauacuggcauuugcaaccagagaaucauaacguacgaaaauucuaccugggucaaccacacauauguuucgauuaauaacacuaaugugguagcagggaaagacaagaccucagugacacuugccggaaacagcagucuguguuccaucucuggcugggcgauuuacaccaaagauaauagcaucaggaucgguuccaagggggacgucuucgugauucgggagccuuuuauaucaugcagucauuuggagugucgcacuuucuuuuuaacacaaggagcucugcuaaacgauaaacacagcaauggcaccguuaaggaccgaucuccauaucgugcccucauguccugcccgcugggcgaagcacccucaccuuacaacagcaaguucgagaguguggccuggucugcuuccgcaugucaugaugggaugggauggcuuacgaucgguauuagcggcccagacaauggggccgucgcugugcugaaauauaacggaaucauaacugaaaccauuaagucguggaaaaagagaaucuugaggacacaggagucugagugcguauguguuaacggcuccugcuuuacuaucaugaccgauggucccucaaauggggccgcgaguuacaaaauuuucaagaucgaaaagggaaaagugacaaagagcauugagcucaacgcaccuaauuuucacuaugaagaguguuccugcuacccagacaccggcacggucaugugugugugccgggauaacuggcacggcucuaaucgccccugggugagcuucaaccagaaucuggacuaccagauaggguauaucugcucaggagucuuuggugauaacccuagaccaaaagacggcaaggggaguuguaauccgguuacuguggauggagccgacggcguaaaagguuucuccuacaaguaugggaacggcguguggauuggaaggacaaaaagcaaucggcugcgcaagggcuuugagaugaucugggaccccaacggguggaccgauacugacucugauuucucagucaagcaagacgugguugcuaucacagauuggaguggauacagcgguuccuuugugcagcauccugaacucaccggcuuagacugcauucgaccauguuucugggucgagcuggugagagggcuucccagggaaaauacgaccauauggacaucuggaucgagcaucuccuucugcggcguagauucagacacugccaacuggaguuggccugauggugcagaguugccauuuaccauugacaaauga

SEQ ID NO: 144132 - RNA, 1413 nt, Artificial Sequence; identical to SEQ ID NO: 144119
  derived and/or modified CDS sequence (opt3) from neuraminidase__InfluenzaA__ABV30330

SEQ ID NO: 144133 - RNA, 1413 nt, Artificial Sequence; identical to SEQ ID NO: 144078
  derived and/or modified CDS sequence (opt3) from neuraminidase__InfluenzaA__ABV30341

SEQ ID NO: 144134 - RNA, 1413 nt, Artificial Sequence; identical to SEQ ID NO: 144078
  derived and/or modified CDS sequence (opt3) from neuraminidase__InfluenzaA__ABV30363

SEQ ID NO: 144135 - RNA, 1413 nt, Artificial Sequence; identical to SEQ ID NO: 144078
  derived and/or modified CDS sequence (opt3) from neuraminidase__InfluenzaA__ABV30374

SEQ ID NO: 144136 - RNA, 1410 nt, Artificial Sequence
  derived and/or modified CDS sequence (opt3) from neuraminidase__InfluenzaA__ABV30385
augaaccccaaucagaagaucauuaccauaggcagcgugucccugacaaucucuacuauuugcuucuuuaugcagaucgccauucucaucacgaccgucacacuucacuucaaacaguacgaguuuucaccuccaccgaacaaucagguuaugcugugugaacccacuauaaucgagagaaacauuaccgaaaucguguauuugacaaauaccacuauugagaaggaaaucugcccuaaauuagcugaguacaggaacuggaguaagccacagugugacauaacaggguucgcacccuuuagcaaagauaauuccauucggcugucugccggaggugacaucuggguaacccgcgagccuuaugugucgugcgauccagacaaguguuaccaauucgcgcuaggccaggggacgacucucaacaauguccauucaaacgauaccgugcacgaccgaacacccuaucguacucugcuuaugaaugaacugggaguuccuuuucauuugggcaccaaacaggugugcauugcuuggagcaguuccucuugucacgaugguaaggccuggcuccaugucugcgugacaggggacgauaagaacgcaaccgccagcuucaucuacaauggaagacugguagacuccaucguuucauggaguaaagagauucugaggacgcaggaaagcgagugugugugcauaaacggcacuuguacagucgugaugaccgauggcucugcuuccgggaaggcagacacuaaaauccucuuuauugaggaaggaaagaucgugcacacaucaaccuuaagcgguagugcccaacacgucgaggaaugcucuugcuauccacgguacccgggcguucgcugugugugcagagauaauuggaagggguccaacaggcccauaguagacauuaacaucaaagacuacagcaucgugucgcgguaugucuguucuggacuggugggcgauacgccucgcaagaaugacuccucaaguagcucccauugccuugauccaaacaaugaggaaggugggcacggaguuaaaggcugggcuuucgacgauggcaacgacguguggauggggcgaaccauuucugaaaagagcagaucaggauacgagacauuuaaagucaucgaggguuggaguaaucccaacuccaaguugcagauuaauaggcaagugauaguagaucggggcaaccguagcggguauucuggaaucuucucaguugagggcaaaaguuguauuaaucgcugcuuuuacguggaacugaucagagguaggaaggaggaaacugagguccuauggaccagcaacuccaucguggucuucugugggacaucuggcacuuauggaaccggcucguggccugacggggccgauauuaaucucaugccaauauga

SEQ ID NO: 144137 - RNA, 1410 nt, Artificial Sequence
  derived and/or modified CDS sequence (opt3) from neuraminidase__InfluenzaA__ABV30396
augaaccccaaucagaagaucauuaccauaggcagcgugucccugacaaucucuacuauuugcuucuuuaugcaaaucgccauucucaucacgaccgucacacuucacuucaaacaguacgaguuuaacucaaguccuaauaaccagguuaugcugugugaaccaacuauaaucgagagaaauauuaccgaaaucguguauuugacaaacaccacuauugagaaggaaaucugcccgaaauuaagcgaguacaggaauugguccaagccccaguguaacauaacaggguucgcuccuuuuucuaaagacaauucgauucggcugucagcaggaggugauaucuggguaacccgcgagccauaugugagcugcgaccccgauaaguguuaccaauucgcccuaggccaggggacgacucucaacaauguccauaguaacgacaccgugcacgaucgaacaccuuaucguacucugcuuaugaaugaacugggaguuccauuucauuugggcaccaaacaggugugcauugcgugguccucuagcuccugucacgacgguaaggcuuggcuccaugucugcgugacaggggaugacaagaacgccaccgcaucauucaucuacaauggaagacugguagauaguaucguuagcuggucuaaagagauucugaggacgcaggaauccgagugugugugcauaaacggcacuuguacagucgugaugaccgacggcucagccagcgggaaggcugauacuaaaauccucuuuauugaggaaggaaagaucgugcacacaaguaccuuaucugguuccgcacaacacgucgaggaaugcagcugcuauccccgguacccuggcguucgcugugugugcagagacaacuggaaggggucgaauaggccaauaguagauauuaacaucaaagacuacucuaucguguccucauaugucuguaguggacuggugggcgacacgccgcggaagaaugauagcuccucuagcucacauugccuugaccccaacaaugaggaaggugggcacggaguuaaaggcugggccuucgaugacggcaacgauguguggauggggcgcaccauuagugagaaguugcgauccggauacgagacauuuaaagucaucgaagguuggagcaauccuaacucuaagcugcagauuaauagacaggugauaguagacaggggcaaccggucaggguauaguggaaucuucagcguugagggcaaauccuguauuaaucguugcuuuuacguggaacuaauccgcgguagaaaggaggaaaacgagguccucuggacuucuaauucgaucguggucuucugugggaccagcggcacauauggaacuggcuccuggccagauggggcugacauuaaccugaugcccauauga

SEQ ID NO: 144138 - RNA, 1410 nt, Artificial Sequence
  derived and/or modified CDS sequence (opt3) from neuraminidase__InfluenzaA__ABV30407
augaaccccaaucagaagaucauuaccauaggcagcgugucccugacaaucucuacuauuugcuucuuuaugcaaaucgccauucucaucacgaccgucacacuucacuucaaacaguacgaguuuaacucaccuccaaauaaccagguuaugcugugugaaccgacuauaaucgagagaaauauuaccgaaaucguguauuugacaaacaccacuauugagaaggaaaucugccccaaauuagcugaguacaggaauuggaguaagccucagugugacauaacaggguucgcaccauuuagcaaagauaacuccauucggcugucugccggaggugacaucuggguaacccgcgagcccuaugugucgugcgauccugacaaguguuaccaauucgcgcuaggccaggggacgacucucaauaacguccauucaaaugauaccgugcgagaccguacaccauauagaacucugcuuaugaacgaacugggaguucccuuucacuugggcaccaaacaggugugcauugcuuggagcaguuccucuugucaugaugguaaggccuggcuccacgucugcaucacaggggacgauaagaaugcaaccgccagcuucaucuacaacggaaggcugguggacuccauuguaucauggaguaaagagauacugcggacgcaggaaagcgaguguguuugcaucaauggcacuuguacaguggucaugaccgauggcucugcuuccgggaaggcagacacuaaaauucucuuuaucgaggaaggaaagauagugcauacaucaaccuuaagcgguagugcccaacacguggaggaaugcucuugcuauccucgcuacccaggcgucagauguguuugcagggauaacuggaagggguccaaccggccgauuguggacaucaauaucaaagaccacagcauuguaucgucuuacguguguuccggacuggucggcgauacgccccgcaagaacgacucaaguagcuccggucauugccuugauccuaauaacgaggaagggggacacggcgugaaaggcugggcuuucgacgaugggaaugacguuuggaugggacgaaccaucucugaaaagagcagauuggguuaugagacauuuaaagugauugagggcuggucaaacccaaagaguaaacugcagauaaauaggcaggucaucguggaucgggggaaccguuccggauacagcggcauuuucucuguagaggguaagucauguaucaaucgcugcuuuuauguugaacuaaucagagggaggaaggaggaaacugaggugcucuggaccaguaacagcauugucguguucuguggcacauccggaacuuacggcaccgggucuuggcccgacggagccgauauaaaucugaugccuaucuga

SEQ ID NO: 144139 - RNA, 1410 nt, Artificial Sequence
  derived and/or modified CDS sequence (opt3) from neuraminidase__InfluenzaA__ABV30418
augaaccccaaucagaagaucauuaccauaggcagcgugucccugacaaucucuacuauuugcuucuuuaugcagaucgccauucucaucacgaccgucacacuucacuucaaacaguacgaguuuucaagucugccuaacaaucagguuauguugugugaaccaacuauaaucgagagaaacauuaccgaaaucguguauuuaacaaauaccacuauugagaaggaaaucugcccgaaacuggcugaguacaggaacuggagcaagccccagugugacauaacaggguucgcaccuuuuuccaaagauaauucuauucggcuaucggccggaggugacaucuggguaacccgcgagccauaugugucaugcgaucccgacaaguguuaccaauucgcgcucggccaggggacgacucugaacaauguccauagcaacgauaccgugcacgaccgaacaccuuaucguacucuucugaugaaugaauugggaguuccauuucaucucggcaccaaacaggugugcauugcuuggaguuccucuagcugucacgaugguaaggccuggcugcaugucugcgugacaggggacgauaagaacgcaaccgccuccuucaucuacaauggaagacugguagacucaaucguuaguuggagcaaagagauucucaggacgcaggaaucugagugugugugcauaaacggcacuuguacagucgugaugaccgauggcuccgcuucagggaaggcagacacuaaaaucuuauuuauugaggaaggaaagaucgugcacacaagcacccugagugguucugcccaacacgucgaggaaugcuccugcuauccccgguacccuggcguucgcugugugugcagagauaauuggaaggggagcaacaggccaauaguagacauuaacaucaaagacuacucgaucgugucucgguaugucuguuccggacuugugggcgauacgccgcgcaagaaugacucaaguagcuccucucauugcuuggaucccaacaaugaggaaggugggcacggaguuaaaggcugggcuuucgacgauggcaacgacguguggauggggcgaaccauuagcgagaagucaagaaguggauacgagacauuuaaagucaucgaagguugguccaauccuaacagcaagcugcagauuaauaggcaagugauaguagaucggggcaaccguucuggguauucaggaaucuucaguguugagggcaaaagcuguauuaaucgcugcuuuuacguggaacuaaucagagguaggcgggaggaaacugagguccucuggaccuccaacucuaucguggucuucugugggacaucgggcacuuauggaaccggcagcuggccagacggggccgauauuaaucugaugcccauauga

SEQ ID NO: 144140 - RNA, 1410 nt, Artificial Sequence; identical to SEQ ID NO: 144105
  derived and/or modified CDS sequence (opt3) from neuraminidase__InfluenzaA__ABV30429

SEQ ID NO: 144141 - RNA, 1410 nt, Artificial Sequence; identical to SEQ ID NO: 144105
  derived and/or modified CDS sequence (opt3) from neuraminidase__InfluenzaA__ABV30440

SEQ ID NO: 144142 - RNA, 1410 nt, Artificial Sequence; identical to SEQ ID NO: 144105
  derived and/or modified CDS sequence (opt3) from neuraminidase__InfluenzaA__ABV30451

SEQ ID NO: 144143 - RNA, 1413 nt, Artificial Sequence; identical to SEQ ID NO: 144078
  derived and/or modified CDS sequence (opt3) from neuraminidase__InfluenzaA__ABV30462

SEQ ID NO: 144144 - RNA, 1410 nt, Artificial Sequence; identical to SEQ ID NO: 144105
  derived and/or modified CDS sequence (opt3) from neuraminidase__InfluenzaA__ABV30473

SEQ ID NO: 144145 - RNA, 1410 nt, Artificial Sequence
  derived and/or modified CDS sequence (opt3) from neuraminidase__InfluenzaA__ABV30484
augaaccccaaucagaagaucauuaccauaggcagcgugucccugacaaucucuacuauuugcuucuuuaugcagaucgccauucucaucacgaccgucacacuucacuucaaacaguacgaguuuaacucaccuccaaauaaccagguuaugcugugugaaccgacuauaaucgagagaaauauuaccgaaaucguguauuugacaaacaccacuauugagaaggaaaucugccccaaauuagcugaguacaggaauuggaguaagccucagugugacauaacaggguucgcaccauuuagcaaagauaacuccauucggcugucugccggaggugacaucuggguaacccgcgagcccuaugugucgugcgauccugacaaguguuaccaauucgcgcuaggccaggggacgacucucaauaacguccauucaaaugauaccgugcacgaccgaacaccauaucguacucugcuuaugaacgaacugggaguucccuuucauuugggcaccaaacaggugugcauugcuuggagcaguuccucuugucacgaugguaaggccuggcuccaugucugcgugacaggggacgauaagaaugcaaccgccagcuucaucuacaacggaagacugguagacuccaucguuucauggaguaaagagauucugaggacgcaggaaagcgagugugugugcauaaauggcacuuguacagucgugaugaccgauggcucugcuuccgggaaggcagacacuaaaauccucuuuauugaggaaggaaagaucgugcacacaucaaccuuaagcgguagugcccaacacgucgaggaaugcucuugcuauccucgguacccaggcguucgcugugugugcagagauaacuggaagggguccaacaggccgauaguagacauuaauaucaaagacuacagcaucgugucgcgguaugucuguucuggacuggugggcgauacgccccgcaagaacgacuccucaaguaauagccauugccuugauccuaacaaugaggaaggugggcacggaguuaaaggcugggcuuucgacgauggcaacgacguguggauggggcgaaccauuuccgagaagucuagaagcggauacgagacauuuaaagucaucgaagguuggucaaauccaaacaguaaguugcagauuaauaggcaagugauaguagaucggggcaaccguuccggguauagcggaaucuucucuguugagggcaaaucauguauuaaucgcugcuuuuacguggaacugaucagagguaggaaggaggaaacugagguccuauggaccaguaacagcaucguggucuucugugggacauccggcacuuauggaaccggcucuuggcccgacggggccgauauuaaucucaugccuauauga

SEQ ID NO: 144146 - RNA, 1413 nt, Artificial Sequence; identical to SEQ ID NO: 144117
  derived and/or modified CDS sequence (opt3) from neuraminidase__InfluenzaA__ABV30495

SEQ ID NO: 144147 - RNA, 1413 nt, Artificial Sequence; identical to SEQ ID NO: 144078
  derived and/or modified CDS sequence (opt3) from neuraminidase__InfluenzaA__ABV30506

SEQ ID NO: 144148 - RNA, 1410 nt, Artificial Sequence; identical to SEQ ID NO: 144114
  derived and/or modified CDS sequence (opt3) from neuraminidase__InfluenzaA__ABV30517

SEQ ID NO: 144149 - RNA, 1413 nt, Artificial Sequence
  derived and/or modified CDS sequence (opt3) from neuraminidase__InfluenzaA__ABV30528
augaacagcaaucagaagaucauuaccauaggcuccaucucuauugccaucgggauuaucucacugaugcuccaaauaggaaacaucauuaguaugugggcuagccacuccauccagacagguucucagaaucauacuggcauuugcaaccagagaaucauaacguacgaaaauucgaccugggugaaccacacauaugucaauauuaacaauacuaacguuguggcagggaaagacaagaccucaguaacacuugccggaaauagcagucuguguuccaucucuggcugggcgauuuacaccaaagauaacagcaucaggaucgguuccaagggggacguguucgucauucgggagcccuuuauaucaugcagucauuuggagugucgcacuuucuuuuuaacacaaggagcucugcuaaaugauaaacacagcaacggcaccgugaaggaccgaucuccuuaucgugcccucauguccugcccacugggcgaagcaccgucacccuacaauagcaaguucgagaguguugccuggucugcuuccgcaugucaugaugggaugggauggcuuacgaucgguauuagcggcccugacaacggggccguggcuguccugaaauauaacggaaucauaacugaaaccauuaagucguggaaaaagagaaucuugaggacacaggagucugagugcguguguguaaauggcuccugcuuuacuaucaugaccgaugguccaucaaacggggccgcgaguuacaaaauuuucaagaucgaaaagggaaaaguuacaaagagcauugagcucaaugcacccaacuuucacuaugaagaguguuccugcuacccugacaccggcacggugaugugugucugccgggauaauuggcacggcucuaaccgcccaugggugagcuucaaucagaaccuggacuaccaggugggguauauaugcucaggagucuuuggugauaaucccagaccuaaagacggcaaggggaguuguaacccaaugacuguugauggagccgacggcgugaaagguuucuccuacaaguaugggaauggcguauggaucggaaggacaaaaagcaacaagcugcggaagggcuuugagaugauuugggacccgaauggguggaccgauacugacucugauuucucagugaaacaagacgucguggcuaucacagauuggaguggauacagcgguuccuuuguucagcaucccgaacucaccggcuuagacugcauccgcccuuguuucuggguggagcugguccgagggcuuccaagagaaaacgccacgauuuggaccucuggaucgagcauauccuucugcggcguggauucagacacagcaaauuggaguuggcccgauggugcugaguugccuuuuacuaucgacaaguga

SEQ ID NO: 144150 - RNA, 1413 nt, Artificial Sequence; identical to SEQ ID NO: 144078
  derived and/or modified CDS sequence (opt3) from neuraminidase__InfluenzaA__ABV30539

SEQ ID NO: 144151 - RNA, 1413 nt, Artificial Sequence; identical to SEQ ID NO: 144078
  derived and/or modified CDS sequence (opt3) from neuraminidase__InfluenzaA__ABV30561

SEQ ID NO: 144152 - RNA, 1413 nt, Artificial Sequence; identical to SEQ ID NO: 144078
  derived and/or modified CDS sequence (opt3) from neuraminidase__InfluenzaA__ABV30572

SEQ ID NO: 144153 - RNA, 1413 nt, Artificial Sequence; identical to SEQ ID NO: 144078
  derived and/or modified CDS sequence (opt3) from neuraminidase__InfluenzaA__ABV30583

SEQ ID NO: 144154 - RNA, 1413 nt, Artificial Sequence; identical to SEQ ID NO: 144078
  derived and/or modified CDS sequence (opt3) from neuraminidase__InfluenzaA__ABV30594

SEQ ID NO: 144155 - RNA, 1413 nt, Artificial Sequence
  derived and/or modified CDS sequence (opt3) from neuraminidase__InfluenzaA__ABV30605
augaaccccaaucagaagaucauuaccauaggcagcaucuccauugccaucgggauuaucucucugaugcuccaaauaggaaacaucauuucaaucugggcuagucacagcauucagacagguucccagaaucauacuggcaucugcaaccagagaauaauuacguacgaaaauucuaccugggugaaccacacauaugucucgaucaauaacacuaauguugugguagggaaagacaagaccucagugacacuugcaggaaacagcagucuguguuccauuucuggcugggccaucuacaccaaagauaauagcaucaggauugguuccaagggggacgucuucgugauacgggagccuuuuaucucaugcagucauuuggagugucgcacuuucuuuuuaacacaaggagcgcugcuaaacgauaaacacagcaauggcaccguuaaggaccgaucuccauaucgugcucucauguccugcccgcugggcgaagcccccucaccuuacaacagcaaguucgagaguguggcauggucugccuccgcuugucaugaugggaugggauggcuuacgauugguaucagcggcccagacaauggggcagucgccgugcugaaauauaacggaauaauuacugaaaccaucaagucguggaaaaagagaaucuugaggacacaggagucugagugcguauguguuaacggcuccugcuuuacuauuaugaccgauggucccucaaauggggcugccaguuacaaaaucuucaagauugaaaagggaaaagugacaaagagcauagagcucaacgcgccuaauuuucacuaugaagaguguuccugcuacccagacaccggcacggucaugugugugugccgggauaacuggcacggcucuaaucgccccugggugagcuucaaccagaaucuggacuaccagaucggguauauuugcucaggagucuuuggugauaacccuagaccaaaagacggcaaggggaguuguaauccgguuacuguggauggagcagacggcguaaaagguuucuccuacaaguaugggaacggcguguggaucggaaggacaaaaagcaaucggcugcgcaagggcuuugagaugaucugggaccccaacggguggaccgauacugacucugauuucucagucaagcaagacgugguugccauuacagauuggaguggauacagcgguuccuuugugcagcauccugaacucaccggcuuagacugcauacgaccauguuucugggucgagcuggugagagggcuucccagggaaaauacgaccaucuggacaucuggaucgagcauuuccuucugcggcguagauucagacacugcuaacuggaguuggccugauggugccgaguugccauuuaccaucgacaaauga

SEQ ID NO: 144156 - RNA, 1413 nt, Artificial Sequence; identical to SEQ ID NO: 144078
  derived and/or modified CDS sequence (opt3) from neuraminidase__InfluenzaA__ABV30616

SEQ ID NO: 144157 - RNA, 1413 nt, Artificial Sequence; identical to SEQ ID NO: 144078
  derived and/or modified CDS sequence (opt3) from neuraminidase__InfluenzaA__ABV30627

SEQ ID NO: 144158 - RNA, 1410 nt, Artificial Sequence
  derived and/or modified CDS sequence (opt3) from neuraminidase__InfluenzaA__ABV30649
augaaccccaaucagaagaucauuaccauaggcagcgugucccugacaaucucuacuauuugcuucuuuaugcaaaucgccauucucaucacgaccgucacacuucacuucaaacaguacgaguuuaacucaccuccaaauaaccagguuaugcugugugaaccgacuauaaucgagagaaauauuaccgaaaucguguauuugacaaacaccacuauugagaaggaaaucugccccaaauuagcugaguacaggaauuggaguaagccucagugugacauaacaggguucgcaccauuuagcaaagauaacuccauucggcugucugccggaggugacaucuggguaacccgcgagcccuaugugucgugcgauccugacaaguguuaccaauucgcgcuaggccaggggacgacucucaauaacguccauucaaaugauaccgugcgagaccguacaccauauagaacucugcuuaugaacgaacugggaguucccuuucacuugggcaccaaacaggugugcauugcuuggagcaguuccucuugucaugaugguaaggccuggcuccacgucugcaucacaggggacgauaagaaugcaaccgccagcuucaucuacaacggaaggcugguggacuccauuguaucauggaguaaagagauacugcggacgcaggaaagcgaguguguuugcaucaauggcacuuguacaguggucaugaccgauggcucugcuuccgggaacgcagacacuaagauucucuuuaucgaggaaggaaaaauagugcauacaucaaccuuaagcgguagugcccaacacguggaggaaugcucuugcuauccucgcuacccaggcgucagauguguuugcagggauaacuggaagggguccaaucggccgauuguggacaucaacaucaaggaccacagcauuguaucgucuuacguguguuccggacuggucggcgauacgccccgcaaaaaugacucaaguagcuccucucauugccuugauccuaacaaugaggaaggugggcacggagugaagggcugggcuuucgacgauggcaacgacguuuggauggggcgaaccaucagcgagaaaucaagauugggauaugagacauuuaaggugauugaagguuggaguaauccaaaauccaagcugcagauaaacaggcaggucaucguggaucggggcaaucguagcggguacucuggaauuuucucaguagagggcaaaaguuguaucaaccgcugcuuuuauguugaacuaaucagagguaggaaggaggaaacugaggugcucuggaccagcaauuccauugucguguucugugggacaucuggcacuuacggaaccggcucguggcccgacggggccgauauaaaccugaugccuaucuga

SEQ ID NO: 144159 - RNA, 1410 nt, Artificial Sequence; identical to SEQ ID NO: 143932
  derived and/or modified CDS sequence (opt3) from neuraminidase__InfluenzaA__ABV30660

SEQ ID NO: 144160 - RNA, 1413 nt, Artificial Sequence
  derived and/or modified CDS sequence (opt3) from neuraminidase__InfluenzaA__ABV45852
augaaccccaaucagaagaucauuaccauaggcagcaucuccauugccaucgggauuaucucucugaugcuccaaauaggaaacaucauuucaaucugggcuagucacagcauucagacagguucccagaaucauacuggcaucugcaaccagagaauaauuacguacgaaaauucuaccugggugaaccacacauaugucaauaucaacaauacuaacguuguggcagggaaagacaagaccucgguaacacuugccggaaauucaagccuguguaguauuuccggcugggcgaucuacaccaaagauaacucuaucaggauugguagcaagggggacguguucgucauacgggagccuuuuaucuccugcucacauuuggagugucgcacuuucuuuuuaacacaaggagcucugcuaaaugauaaacacaguaacggcaccgugaaggaccgaagcccauaucgugcccucaugucuugcccgcugggcgaagcacccuccccuuacaauucaaaguucgagagcguugccuggagugcuucugcaugucaugaugggaugggauggcuuacgauugguaucuccggcccagacaacggggccguggcuguccugaaauauaacggaauaauuacugaaaccaucaagagcuggaaaaagagaaucuugaggacacaggagucggagugcguguguguaaauggcucuugcuuuacuauuaugaccgauggucccaacaauggggccgcguccuacaaaaucuucaagauugaaaagggaaaaguuacaaagucaauagagcucaacgcaccuaauuuucacuaugaagaguguaguugcuacccagacaccggcacggugaugugugucugccgggauaacuggcacggcagcaaucgccccuggguguccuucaaccagaaucuggacuaccagaucggguauauuugcucuggaguguuuggugauaacccuagaccaaaagacggcgaggggagcuguaauccggucacuguugauggagccgacggcgugaaggguuucucauacaaauaugggaacggcguauggaucggaaggacaaagaguaaucggcugcgcaaaggcuuugaaaugaucugggaccccaacggguggaccgauacugacuccaauuucagcgugaagcaagaugucguggcuauuacagacuggucuggauacucagguaguuuuguucagcauccugagcucaccggcuuagauugcauacgaccauguuucuggguggaacuggucagagggcuucccagggagaacacgaccaucuggacaagcggauccucuauuucguucugcggcgugaacagcgacacugccaauugguccuggccugauggugcagaauugccauuuaccaucgacaaguga

SEQ ID NO: 144161 - RNA, 1410 nt, Artificial Sequence; identical to SEQ ID NO: 143932
  derived and/or modified CDS sequence (opt3) from neuraminidase__InfluenzaA__ABV45863

SEQ ID NO: 144162 - RNA, 1413 nt, Artificial Sequence
  derived and/or modified CDS sequence (opt3) from neuraminidase__InfluenzaA__ABV45874
augaaccccaaucagaagaucauuaccauaggcagcaucuccauugccaucgggauuaucucucugaugcuccaaauaggaaacaucauuucaaucugggcuaguuacagcauucagacagguucccagaaucacacuggcaucugcaaccagagaauaauuacguaugaaaauucuaccugggugaaccauacauacgucucgaucaauaacacuaauguuguggcagggaaagacaagaccucaguaacacuugccggaaacagcagucuguguuccauuucuggcugggcgaucuauaccaaagauaauagcaucaggauugguuccaagggggacguguucgucauacgggagccuuuuaucucaugcagucacuuggagugucgcacuuucuuuuuaacacaaggagcucugcuaaacgauaaacauagcaauggcaccgugaaggaccgaucuccauaccgugcccucauguccugcccgcugggcgaagcacccucaccuuauaacagcaaguucgagaguguugccuggucugcuuccgcaugucacgaugggaugggauggcuuacgauugguaucagcggcccagacaauggggccguggcuguccugaaauacaacggaauaauuacugaaaccaucaagucguggaaaaagagaaucuugaggacacaggagucugagugcguguguguaaacggcuccugcuuuacuauuaugaccgauggucccucaaauggggccgcgaguuauaaaaucuucaagauugaaaagggaaaaguuacaaagagcauagagcucaacgcaccuaauuuucauuacgaagaguguuccugcuacccagacaccggcacggugaugugugucugccgggauaacuggcacggcucuaaucgccccugggugagcuucaaccagaaucuggacuaucagaucggguacauuugcucaggaguguuuggugauaacccuagaccaaaagacggcaaggggaguuguaauccggucacuguugauggagccgacggcgugaaagguuucuccuauaaguacgggaacggcguauggaucggaaggacaaaaagcaaucggcugcgcaagggcuuugagaugaucugggaccccaacggguggaccgauacugacucugauuucucagugaagcaagacgucguggcuauuacagauuggaguggauauagcgguuccuuuguucagcacccugaacucaccggcuuagacugcauacgaccauguuucuggguggagcuggucagagggcuucccagggaaaauacgaccaucuggacaucuggaucgagcauuuccuucugcggcguggauucagacacugccaacuggaguuggccugauggugcagaguugccauuuaccaucgacaaauga

SEQ ID NO: 144163 - RNA, 1413 nt, Artificial Sequence; identical to SEQ ID NO: 144078
  derived and/or modified CDS sequence (opt3) from neuraminidase__InfluenzaA__ABV45885

SEQ ID NO: 144164 - RNA, 1413 nt, Artificial Sequence; identical to SEQ ID NO: 144091
  derived and/or modified CDS sequence (opt3) from neuraminidase__InfluenzaA__ABV45896

SEQ ID NO: 144165 - RNA, 1413 nt, Artificial Sequence; identical to SEQ ID NO: 144078
  derived and/or modified CDS sequence (opt3) from neuraminidase__InfluenzaA__ABV45918

SEQ ID NO: 144166 - RNA, 1413 nt, Artificial Sequence
  derived and/or modified CDS sequence (opt3) from neuraminidase__InfluenzaA__ABV45929
augaaccccaaucagaagaucauuaccauaggcagcaucuccauugccaucgggauuaucucucugaugcuccaaauaggaaacaucauuucaaugugggcuagucacagcauccagacagguucccagaaucauacuggcauuugcaaccagagaaucauaacguacgaaaauucuaccugggugaaccacacauaugucaauauuaacaauacuaacguugugaccgggaaagacaagacaucgguaacccuugcaggaaauucaagccuguguaguaucuccggcugggccauuuacacuaaagauaacucuaucaggaucgguagcaagggggacguguucgucauucgggagccuuuuauauccugcucacauuuggagugucgcacauucuuuuuaacccaaggagcgcugcuaaaugauaaacacaguaacggcacggugaaggaccgaagcccauaucgugcucucaugucuugcccgcugggcgaagcccccuccccuuacaauucaaaguucgagagcguugcauggagugccucugcuugucaugaugggaugggauggcuuacuaucgguauuuccggcccagacaacggggcaguggccguccugaaauauaacggaaucauaaccgaaacaauuaagagcuggaaaaagagaaucuugaggacucaggagucggagugcguguguguaaauggcucuugcuuuaccaucaugacagauggucccuccgacggggcugccucauacaaaauuuucaagaucgaaaagggaaaaguuaccaagaguauugagcucaacgcgccuaauuuucacuaugaagaguguagcugcuacccagauacgggcacugugaugugugucugccgggacaacuggcacggcuccaaucgccccugggugucuuucaaccagaaucuggauuaccagauaggguauaucugcagcggaguguuuggugacaacccuagaccaaaagauggcaaggggucauguaauccggucacaguugacggagcagacggcgugaaagguuucaguuacaaguaugggaacggcguauggauuggaaggaccaaauccaauaagcugcggaagggcuuugagaugaucugggaucccaacggguggacugacacagauaaugacuucagcgugaaacaagaugucguggccaucaccgacuggucuggauacucagguaguuuuguucagcauccugaacucacgggcuuagauugcauucgcccauguuucuggguggagcugguccgagggcuucccagagaaaacgcuaccauauggacaagcggauccucuaucucguucugcggcguggacagcgauacugccaauugguccuggccugacggugcagaguugccauuuaccauugauaaguga

SEQ ID NO: 144167 - RNA, 1413 nt, Artificial Sequence
  derived and/or modified CDS sequence (opt3) from neuraminidase__InfluenzaA__ABV45940
augaaccccaaucagaagaucauuaccauaggcagcaucuccauugccaucgggauuaucucucugaugcuccaaauaggaaacaucauuucaaucugggcuagucacagcauucagacagguucccagaaucauacuggcaucugcaaccagagaauaauuagguacgaaaauucuacgugggugaaccacaccuaugucaauaucaacaauacaaacguuguggcagggaaagacaagacuucgguaacccuugccggaaauucaagccuguguaguauuuccggcugggcgaucuacacaaaagauaacucuauccggauugguagcaagggggacguguucgucauacgcgagccuuuuaucuccugcucacauuuggagugucgaaccuucuuuuuaacucaaggagcucugcuaaaugauaaacacaguaacggcacagugaaggaccguagcccauauagagcccucaugucuugcccgcugggcgaagcacccuccccuuacaauucaaaguucgagagcguugccuggagugcuucugcaugucaugaugggaugggauggcuuaccauugguaucuccggcccagacaacggggccguggcuguccugaaauauaacggaauaauuacggaaacuaucaagagcuggaaaaagcagaucuugaggacccaggagucggagugcguguguguaaauggcucuugcuuuacaauuaugacugauggucccuccaacggggccgcgucauacaaaaucuucaagauugaaaagggaaaaguuaccaagaguauagagcucaaugcaccuaacuuucacuaugaagaguguagcugcuacccagacacaggcaccgugaugugugucugccgggauaauuggcacggcuccaaccgccccugggugucuuucaaucagagccuggacuaccaagugggguauaucugcucaggagucuuuggugauaacccuagaccaaaagacggcaaggggaguuguaauccgaugacgguugauggagccgacggcgugaaagguuucuccuacaaguaugggaacggcguauggauuggaaggacuaaaagcaauaagcugcggaagggcuuugagaugaucugggaccccaacggguggacagauaccgacucugauuucucagugaaacaggacgucguggcuaucacugauuggaguggauacagcgguuccuuuguucagcauccugaacucacaggcuuagacugcauucgcccauguuucuggguggagcugguccgagggcuucccagagaaaauaccacgauauggaccucuggaucgagcaucuccuucugcggcguggauucagacacagccaacuggaguuggccugauggugcagaguugccauuuacuauugacaaguga

SEQ ID NO: 144168 - RNA, 1413 nt, Artificial Sequence; identical to SEQ ID NO: 144104
  derived and/or modified CDS sequence (opt3) from neuraminidase__InfluenzaA__ABV45951

SEQ ID NO: 144169 - RNA, 1410 nt, Artificial Sequence
  derived and/or modified CDS sequence (opt3) from neuraminidase__InfluenzaA__ABV45973
augaaccccaaucagaagaucauuaccauaggcagcgugucccugacaaucucuacuauuugcuucuuuaugcaaaucgccauucucaucacgaccgucacacuucacuucaaacaguacgaguuuaacucaccuccaaauaaccagguuaugcugugugaaccgacuauaaucgagagaaauauuaccgaaaucguguauuugacaaacaccacuauugagaaggaaaucugccccaaauuagcugaguacaggaauuggaguaagccucagugugacauaacaggguucgcaccauuuagcaaagauaacuccauucggcugucugccggaggugacaucuggguaacccgcgagcccuaugugucgugcgauccugacaaguguuaccaauucgcgcuaggccaggggacgacucucaauaacguccauucaaaugauaccgugcgagaccguacaccauauagaacucugcuuaugaacgaacugggaguucccuuucacuugggcaccaaacaggugugcauugcuuggagcaguuccucuugucaugaugguaaggccuggcuccacgucugcaucacaggggacgauaagaaugcaaccgccagcuucaucuacaacggaaggcugguggacuccauuguaucauggaguaaagagauacugcggacgcaggaaagcgaguguguuugcaucaauggcacuuguacaguggucaugaccgauggcucugcuuccggggaggcagacacuaagauucucuuuaucgaagagggaaaaauagugcauacaucaaccuuaagcgguagugcccaacacguggaagagugcucuugcuauccucgcuacccaggcgucagauguguuugcagggauaacuggaagggguccaaccggccgauuguggacaucaauaucaaggaccacagcauuguaucgucuuacguguguuccggacuggucggcgauacgccccgcaaaaacgacucaaguagcuccucucauugccuugauccuaauaacgaagagggugggcacggagugaagggcugggcuuucgacgauggcaaugacguuuggauggggcgaaccaucagcgagaaaucaagauugggauaugaaacauuuaaggugauugaggguuggaguaacccaaaauccaagcugcagauaaauaggcaggucaucguggaucggggcaaccguagcggguacucuggaauuuucucaguagaaggcaaaaguuguaucaaucgcugcuuuuauguugagcuaaucagagguaggaaggaagagacugacgugcucuggaccagcaacuccauugucguguucugugggacaucuggcacuuacggaaccggcucguggcccgauggggccgacauaaaucugaugccuaucuga

SEQ ID NO: 144170 - RNA, 1410 nt, Artificial Sequence
  derived and/or modified CDS sequence (opt3) from neuraminidase__InfluenzaA__ABV45984
augaaccccaaucagaagaucauuaccauaggcagcgugucccugacaaucucuacuauuugcuucuuuaugcagaucgccauucucgucacgaccguuacacuucacuucaaacaguacgaguuuaacucaccuccaaauaaccaggugaugcugugugaaccgacuaucauagagagaaauaucaccgaaauuguauauuugacaaacaccacuaucgagaaggaaauuugccccaaauuagcugaguacaggaauuggaguaagccucagugugacaucacaggguucgcaccauuuagcaaagauaacuccauacggcugucugccggaggugacauuugggugacccgcgagcccuaugucucgugcgauccugacaaguguuaccaauucgcgcuaggccaggggacgacucucaauaacgugcauucaaaugauaccguucgagaccguacaccauauagaacucugcuuaugaacgaacugggagugcccuuucacuugggcaccaagcaggucugcaucgcuuggagcaguuccucuugucaugaugguaaagccuggcuccacgugugcauuacaggggacgauaagaaugcaaccgccagcuucaucuacaacggaaggcugguagacuccaucguuucauggaguaaagagauucugcggacgcaggaaagcgagugugugugcauaaauggcacuuguacagucgugaugaccgauggcucugcuuccgggaaggcagacacuaaaauccucuuuauugaggaaggaaagaucgugcauacaucaaccuuaagcgguagugcccaacacgucgaggaaugcucuugcuauccucgcuacccaggcguuagaugugugugcagggauaacuggaagggguccaaccggccgauaguagacauuaauaucaaagaccacagcaucgugucgucuuacgucuguuccggacuggugggcgauacgccccgcaagaacgacucaaguagcuccucucauugccuugauccuaauaacgaggaaggugggcacggaguuaaaggcugggcuuucgacgauggcaaugacguguggauggggcgaaccauuagcgagaagucaagauugggauaugagacauuuaaagucaucgaagguuggaguaacccaaaguccaaacugcagauuaauaggcaagugauaguagaucggggcaaccguagcggguacucuggaaucuucucaguugagggcaagaguuguauuaaucgcugcuuuuauguggaacuaaucagagguaggaaggaggaaacugagguccucuggaccagcaacuccaucguggucuucugugggacaucuggcacuuacggaaccggcucguggcccgacggggccgauauuaaucugaugccuauauga

SEQ ID NO: 144171 - RNA, 1410 nt, Artificial Sequence; identical to SEQ ID NO: 143932
  derived and/or modified CDS sequence (opt3) from neuraminidase__InfluenzaA__ABV45995

SEQ ID NO: 144172 - RNA, 1413 nt, Artificial Sequence; identical to SEQ ID NO: 144091
  derived and/or modified CDS sequence (opt3) from neuraminidase__InfluenzaA__ABV82554

SEQ ID NO: 144173 - RNA, 1410 nt, Artificial Sequence; identical to SEQ ID NO: 144114
  derived and/or modified CDS sequence (opt3) from neuraminidase__InfluenzaA__ABV82565

SEQ ID NO: 144174 - RNA, 1410 nt, Artificial Sequence; identical to SEQ ID NO: 144114
  derived and/or modified CDS sequence (opt3) from neuraminidase__InfluenzaA__ABW36171

SEQ ID NO: 144175 - RNA, 1413 nt, Artificial Sequence; identical to SEQ ID NO: 144130
  derived and/or modified CDS sequence (opt3) from neuraminidase__InfluenzaA__ABW36193

SEQ ID NO: 144176 - RNA, 1413 nt, Artificial Sequence; identical to SEQ ID NO: 144078
  derived and/or modified CDS sequence (opt3) from neuraminidase__InfluenzaA__ABW36204

SEQ ID NO: 144177 - RNA, 1413 nt, Artificial Sequence
  derived and/or modified CDS sequence (opt3) from neuraminidase__InfluenzaA__ABW36215
augaaccccaaucagaagaucauuaccauaggcagcaucuccauugccaucgggauuaucucucugaugcuccaaauaggaaacaucauuucaaucugggcuagucacagcauucagacagguucccagaaucauacuggcaucugcaaccagagaauaauuacguacgaaaauucuaccugggugaaccacacauaugucaauaucaacaauacuaacguuguggcagggaaagacaagaccucgguaacacuugccggaaauucaagccuguguaguauuuccggcugggcgaucuacaccaaagauaacucuaucaggauugguagcaagggggacguguucgucauacgggagccuuuuaucuccugcucacauuuggagugucgcacuuucuuuuuaacacaaggagcucugcuaaaugauaaacacaguaacggcaccgugaaggaccgaagcccauaucgugcccucaugucuugcccgcugggcgaagcacccuccccuuacaauucaaaguucgagagcguugccuggagugcuucugcaugucaugaugggaaaggauggcuuacgauugguaucuccggcccagacaacggggccguggcuguccugaaguauaacggaauaauuacugaaaccaucaaaagcuggaauaagcagaucuugagaacacaggagucggagugcguguguguaaacggcucuugcuuuacuauuaugaccgauggucccuccaauggggccgcgucauacaaaaucuucaagauugaaaagggaaaaguuacaaagaguauagagcucaacgcaccuaauuuucacuaugaagaguguagcugcuacccagacaccggcacggugaugugugucugcagggauaacuggcacggcuccaaucggcccugggugucuuucaaccagaaucuggacuaccaaaucggguauauuugcagcggaguguuuggugauaacccucgcccaaaagacggcagagggucauguaauccggucacuguugauggagccgacggcgugaaggguuucaguuacaaauaugggaacggcguauggaucggaaggacaaaguccaaucggcugcgcaaaggcuuugagaugaucugggaccccaacggguggaccgauacugacagccauuucucugugaagcaggaugucguggcuauuacagacuggucaggauacagugguagcuuuguucagcacccugaacucaccggcuuagauugcauaaagccauguuucuggguggagcugguccgagggcuucccagagaaaauacgaccaucuggacauccggaucuucgauuagcuucugcggcguggacuccgauacugccaacuggucauggccugacggugcagaguugccauuuaucauugauaaauga

SEQ ID NO: 144178 - RNA, 1413 nt, Artificial Sequence; identical to SEQ ID NO: 144078
  derived and/or modified CDS sequence (opt3) from neuraminidase__InfluenzaA__ABW36226

SEQ ID NO: 144179 - RNA, 1413 nt, Artificial Sequence
  derived and/or modified CDS sequence (opt3) from neuraminidase__InfluenzaA__ABW36237
augaaccccaaucagaagaucauuaccauaggcagcaucuccauuacaaucgggauuaucucucugaugcuccaaauaggaaacaucauuucaaucugggccagucacagcauucagacugguucccagaaucauacgggcaucugcaaccagagaauaauuaccuacgaaaauucuacaugggugaaccacacuuaugucaauaucaacaauaccaacguuguggcugggaaagacaagacaucgguaacccuugcaggaaauucaagccuguguaguauuuccggcugggccaucuacacuaaagauaacucuaucaggauugguagcaagggggacguguucgucauacgggagccuuuuaucuccugcucacauuuggagugucgcacauucuuuuuaacccaaggagcgcugcuaaaugauaaacacaguaacggcacggugaaggaccgaagcccauaucgugcucucaugucuugcccgcugggcgaagcccccuccccuuacaauucaaaguucgagagcguugcauggagugccucugcuugucaugaugggaugggauggcuuacuauugguaucuccggcccagacaacggggcaguggccguccugaaauauaacggaauaauuaccgaaacaaucaagagcuggaaaaagagaaucuugaggacucaggagucggagugcguguguguaaauggcucuugcuuuaccauuaugacagauggucccuccaacggggcugccucauacaaaaucuucaagauugaaaagggaaaaguuaccaagaguauagagcucaaugcgccuaacuuucacuaugaagaguguagcugcuacccagacacgggcacugugaugugugucugccgggauaauuggcacggcuccaaccgccccugggugucuuucaaucagaaccuggacuaccaggugggguauaucugcagcggagucuuuggugauaauccuagaccaaaagacggcaaggggucauguaacccgaugacaguugauggagcagacggcgugaaagguuucaguuacaaguaugggaauggcguauggauuggaaggaccaaauccaacaagcugcggaagggcuuugagaugaucugggaccccaauggguggacugauacagacagcgauuucucugugaaacaagacgucguggccaucaccgauuggucaggauacagugguagcuuuguucagcauccugaacucacgggcuuagacugcauucgcccauguuucuggguggagcugguccgagggcuucccagagaaaacaccacaauauggacuuccggaucuucgaucagcuucugcggcguggauuccgacaccgcuaauuggucauggccugauggugccgaguugccauuuacaauugacaaguga

SEQ ID NO: 144180 - RNA, 1413 nt, Artificial Sequence; identical to SEQ ID NO: 144078
  derived and/or modified CDS sequence (opt3) from neuraminidase__InfluenzaA__ABW36248

SEQ ID NO: 144181 - RNA, 1413 nt, Artificial Sequence
  derived and/or modified CDS sequence (opt3) from neuraminidase__InfluenzaA__ABW36259
augaaccccaaucagaagaucauuaccauaggcagcaucuccauugccaucgggauuaucucucugaugcuccaaauaggaaacaucauuucaaucugggcuagucacagcauucagacagguucccagaauaacacuggcaucugcaaucagagaauaauuacguacgagaacucuaccugggugaaucauacauaugucaacaucaauaacacuaauguuguggcagggaaagacaagaccucgguaacacuugccggaaacucaagccuguguaguauuuccggcugggcgaucuacaccaaagauaauucuaucaggauugguagcaagggggacguguucgucauacgggaaccuuuuaucuccugcucacacuuggagugucgcacuuucuuuuuaacacaaggagcucugcuaaacgauaaacauaguaauggcaccgugaaggaccgaagcccauaucgugcccucaugucuugcccgcugggcgaagcacccuccccuuacaacucaaaguucgagagcguugccuggagugcuucugcaugucacgaugggaugggauggcuuacgauugguaucuccggcccagacaacggggccguggcuguccugaaauauaauggaauaauuacuggcaccaucaagagcuggaaaaagcagaucuugagaacacaggaaucggagugcguguguaugaacgguucuugcuuuacuauuaugaccgaugggcccuccaauagggccgcgucauacaaaaucuucaagauugagaagggaaaaguaacaaagaguauagaacucaacgcaccuaauuuucauuaugaggaauguagcugcuacccagacaccggcaucguuaugugugugugccgggauaacuggcacggcuccaaucgccccugggucucuuucaaccagaaucuggacuaccaaauuggguauaucugcagcggagugcugggugauaacccuagaccagaggacggcgaggggucauguaauccggugacggucgauggagccgacggcguuaaagguuuuaguuacaaguaugacaacgggguguggaucggcaggacuaaauccaaucggcuccgcaagggauucgaaaugauuugggaucccaacggcuggacaaauaccgacagcgauuuuucuguaaaacaggacguggucgcuauaacugauuggucaggguacagugguagcuucgugcagcacccugaguuaacaggacuggacugcauccgaccauguuuuuggguugaacuugugagaggcuugcccagggagaacaccacgauuuggaccuccgggucuucgaucagcuucugcggagucuccucagauacagccaacuggaguuggccugacggcgcagaacugccauucacuauugauaaguga

SEQ ID NO: 144182 - RNA, 1413 nt, Artificial Sequence; identical to SEQ ID NO: 144078
  derived and/or modified CDS sequence (opt3) from neuraminidase__InfluenzaA__ABW36281

SEQ ID NO: 144183 - RNA, 1413 nt, Artificial Sequence; identical to SEQ ID NO: 144078
  derived and/or modified CDS sequence (opt3) from neuraminidase__InfluenzaA__ABW36292

SEQ ID NO: 144184 - RNA, 1413 nt, Artificial Sequence; identical to SEQ ID NO: 144091
  derived and/or modified CDS sequence (opt3) from neuraminidase__InfluenzaA__ABW36303

SEQ ID NO: 144185 - RNA, 1413 nt, Artificial Sequence
  derived and/or modified CDS sequence (opt3) from neuraminidase__InfluenzaA__ABW36314
augaaccccaaucagaagaucauuaccauaggcagcaucugcauggccauugggaucauuucccugauccuccaaauaggaaacaucauuucuaucugggugucacacaguauucagacagguagccagaaucauacuggcaucuguaaccagagaauaauuacguacgaaaauuccaccugggucaaccaaacauauguuaauaucucuaacacuaaugugguagcugggaaagacaccacaucgaugacccuugcaggaaacucaagccugugcccuauuaggggcugggccaucuacaguaaggauaauuccauccggauugguucuaaaggggacguguucgucauacgcgaaccauuuaucagcuguucccacuuggagugccgaacuuucuuuuuaacacagggagcgcugcuaaacgauaagcauucaaauggcaccgugaaagaccguaguccguauagagcucucaugagcugucccauuggcgaagccccuucuccauacaacuccagguucgagucaguugcauggagcgccagugcuugccacgaugggaugggauggcugacgaucgguauaucuggccccgacgauggggcaguggccguccuuaaguauaauggaauuaucacugaaaccaucaaguccuggcggaaacagauucugcgcacacaggagagcgagugugugugcguaaacggcucguguuuuacuaucaugaccgacgguccuucugaugggcaggcuuccuacagaauuuucaagauagaaaaaggaaagaucacaaaaucaauugaguuggacgccccaaacuuucauuaugaagagugcaguuguuaccccgauaccggcacgguuaugugcgugugcagggacaauuggcacggcagcaaccggccuugggucuccuucaaucaaaaccucgauuaccagaucggguauaucuguucuggaguguuuggugacaauccacgcccgaaggacggcaaggggagcugcgaucccgugaacgucgacggagcggauggcguuaaagguuucucauaccgauaugggaauggcguguggauuggaagaacuaagaguaacuccagcaggaaaggcuuugagaugauaugggacccuaauggguggacagauaccgacucuaacuuccugguaaagcaggauguggucgcaaugacugacuggucaggauacagugguagcuuugugcaacacccagaacugacaggccucgauuguaugcggcccugcuucuggguugaguuaauccgugggcgcccuagagagaaaaccacgauuuggaccuccggaucuucgaucagcuucuguggcgucaauuccgacacagugaacuggucauggccagauggugccgagcugcccuuuacuauugacaaguga

SEQ ID NO: 144186 - RNA, 1410 nt, Artificial Sequence
  derived and/or modified CDS sequence (opt3) from neuraminidase__InfluenzaA__ABW38366
augaaccccaaucagaagaucauuaccauaggcagcgugucccugacaaucucuacuauuugcuucuuuaugcaaaucgccauucucaucacgaccgucacacuucacuucaaacaguacgaguuuaacucaccuccaaauaaccagguuaugcugugugaaccgacuauaaucgagagaaauauuaccgaaaucguguauuugacaaacaccacuauugagaaggaaaucugccccaaauuagcugaguacaggaauuggaguaagccucaguguaacauaacaggguucgcaccauuuagcaaagacaauuccauucggcugucugccggaggugauaucuggguaacccgcgagcccuaugugucgugcgacccugauaaguguuaccaauucgcgcuaggccaggggacgacucucaacaauguccauucaaacgacaccgugcacgaucgaacaccauaucguacucugcuuaugaaugaacugggaguucccuuucauuugggcaccaaacaggugugcauugcuuggagcaguuccucuugucacgacgguaaggccuggcuccaugucugcgugacaggggaugacaagaacgcaaccgccagcuucaucuacaauggaagacugguagauuccaucgcuucauggaguaaagagauucugaggacgcaggaaagcgaguguguuugcauaaacggcacuuguacaguggucaugaccgacggcucugcauccgggaaggccgauacuaaaauccucuuuauugaggaaggaaagaucgugcacacaucaaccuuaagcgguagugcucaacacguggaggaaugcucuugcuauccucgguacccaggcguccgcuguguuugcagagacaacuggaagggguccaauaggccgauaguggauauuaacaucaaagacuacagcaucguaucgucuuauguguguuccggacuggucggcgacacgccccggaagaaugauucaaguagcuccucucauugccuugacccuaacaaugaggaaggugggcacggagugaaaggcugggccuucgaugacggcaacgauguuuggauggggcgcaccauuagcgagaaguugcgaucaggauacgagacauuuaaagugaucgaagguuggaguaauccaaacuccaagcugcagauuaauagacaggucauaguggacaggggcaaccggagcggguauucuggaaucuucucaguagagggcaaaaguuguauuaaucguugcuuuuacguugaacuaauccgcgguagaaaggaggaaacugaggugcucuggaccagcaacuccaucgucguguucugugggacaucuggcacuuauggaaccggcucguggcccgauggggcggacauuaaucugaugccuauauga

SEQ ID NO: 144187 - RNA, 1413 nt, Artificial Sequence; identical to SEQ ID NO: 144177
  derived and/or modified CDS sequence (opt3) from neuraminidase__InfluenzaA__ABW39780

SEQ ID NO: 144188 - RNA, 1413 nt, Artificial Sequence
  derived and/or modified CDS sequence (opt3) from neuraminidase__InfluenzaA__ABW39809
augaaccccaaucagaagaucauuaccauaggcagcaucuccauugccaucgggauuaucucucugaugcuccaaauaggaaacaucauuucaaucugggcuagucacagcauucagacagguucccagaaucauacuggcaucugcaaccagagaauaauuacguacgagaauagcaccugggugaaccacacauaugucucgaucaauaacacuaauguuguggcagggaaagacaagacccuuguaacacuggccggaaacucaucuuuguguaguauuuccggcugggcgaucuacaccaaagauaauucuaucaggauugguagcaagggggacguguucgucauacgggaaccuuuuaucuccugcucacauuuagagugucgcacuuucuuucugacacaaggagcucuacucaacgauaaacacaguaauggcaccgugaaggaccgaagcccauaucgugcccugaugucuugcccgcuuggcgaagcacccuccccuuacaacucaaaguucgagagcguugccuggagugcuucugcaugucaugaugggaugggauggcugacgauugguaucuccggcccagacaauggggccguggcugucuugaaauauaacggaauaauuacugaaaccaucaagagcuggaaaaagagaauccucaggacacaggagucggagugcguguguguaaacggcucuugcuuuacuauuaugaccgauggucccuccaauggggccgcgucauacaaaaucuucaagauugaaaagggaaaaguuacaaagaguauagagcugaacgcaccuaauuuucacuaugaagaguguagcugcuacccagacaccggcacggugaugugugucugccgggauaacuggcacggcuccaaucgccccugggugucuuucaaccagaaucuggacuaccagaucggguauauuugcagcggaguguuuggugauaacccuagaccaaaagacggcaaggggucauguaauccggucacuguugauggagccgacggcgugaaagguuucaguuacaaguaugggaacggcguauggaucggaaggacaaaauccaaucggcuccgcaagggcuuugagaugaucugggaccccaacggguggaccgauacugacagcgauuucucugugaagcaagacgucguggcuauuacagauuggucaggauacagugguagcuuuguucagcauccugaauuaaccggccuggacugcauacgaccauguuucuggguggagcuugucagaggguugcccagggaaaauacgaccaucuggacauccggaucuucgauuagcuucugcggcguggauuccgacacugccaacuggucauggccugauggugcagagcugccauuuaccaucgacaaauga

SEQ ID NO: 144189 - RNA, 1413 nt, Artificial Sequence; identical to SEQ ID NO: 144091
  derived and/or modified CDS sequence (opt3) from neuraminidase__InfluenzaA__ABW39820

SEQ ID NO: 144190 - RNA, 1413 nt, Artificial Sequence
  derived and/or modified CDS sequence (opt3) from neuraminidase__InfluenzaA__ABW39831
augaaccccaaucagaagaucauuaccauaggcagcaucuccauugccaucgggauuaucucucugaugcuccaaauaggaaacaucauuucaaucugggcuagucacagcauucagacagguucccagaaucauacuggcaucugcaaccagagaauaauuacguacgaaaauucuaccugggugaaccacacauaugucaauaucaacaauacuaacguuguggcagggaaagacaagaccccuguaacacuugugggaaauucgucacuguguagcauuaguggcugggccaucuacaccaaagauaacuccaucaggauugguucuaagggggacgucuucgugauacgggagccauuuaucagcugcucccauuuggaguguaaaacuuucuuuuuaacacaaggagcgcugcuaaaugauaagcacucaaacggcaccguuaaggaccgcaguccguaucgagcucucaugagcugcccccugggcgaagccccuucuccauacaauuccaaauucgagucaguggcauggagcgccagugcuugucaugaugggauuggauggcuuacgaucgguauaucuggccccgacaacggggcagucgccgugcugaaguauaacggaauuaucacuggcaccaucaaauccuggaagaaacagauuuugcguacacaggaaagcgagugcguauguaugaaugguucgugcuuuacuaucaugaccgaugggccuucuaacggagcugccuccuacaagauuuucaagauagagaaaggcaagguuacaaaaucaauggaacucaaugcgccaaacuuucacuaugaggaauguaguugcuaccccgacaccggcacggugaugugugucugcagagauaauuggcacgggagcaacaggccuuggguguccuucaaucagaaccuggacuaccaaaucggauauauuugcucugguguguuuggcgauaauccacggccgaaggacggggagggaagcuguaaccccgucacuguugauggcgcaaauggugugaaaggguucucauacaaguauggcaacggaguauggaucggccgcacaaaaaguaauagaaucaggaagggguuugagaugauuugggacccuaacggauggaccaauacugacuccgauuucagcgugaagcaggacauagucgccaucacagauuggucugguuacucaggcaguuuugugcagcauccagaacugaccgggcucgacugcauucggcccuguuucuggguugaguuagugcgcggacugccucgagaaaacacgaccaucuggacaagcggcuccucuauuucguucugcggugucaacggggauaucgcuaauuggagcuggccagacggcgccgagcuucccuuuacuauagauaaauga

SEQ ID NO: 144191 - RNA, 1413 nt, Artificial Sequence; identical to SEQ ID NO: 144104
  derived and/or modified CDS sequence (opt3) from neuraminidase__InfluenzaA__ABW39842

SEQ ID NO: 144192 - RNA, 1413 nt, Artificial Sequence; identical to SEQ ID NO: 144078
  derived and/or modified CDS sequence (opt3) from neuraminidase__InfluenzaA__ABW39864

SEQ ID NO: 144193 - RNA, 1410 nt, Artificial Sequence; identical to SEQ ID NO: 144114
  derived and/or modified CDS sequence (opt3) from neuraminidase__InfluenzaA__ABW39875

SEQ ID NO: 144194 - RNA, 1413 nt, Artificial Sequence
  derived and/or modified CDS sequence (opt3) from neuraminidase__InfluenzaA__ABW39886
augaaccccaaucagaagaucauuaccauaggcagcaucuccauugccaucgggauuaucucucugauacuccaaaucggaaacauuaucucaauuugggcuagucacagcauccagacaagaaaucagaaccauacugguauaugcaaucagaggauuaucacguacgagaacuccaccugggugaaucacacauaugucucuauuaacaauacuaacguuguggcaggcaaagacaagaccucgguaacacuugccggaaauucaagccuguguaguaucuccggaugggcgaucuacaccaaagauaacucuauucggauaggcagcaagggugacguguucgucauccgcgaaccuuuuauuuccugcucacauuuggagugucgaacuuucuuuuuaacacaaggggcucugcuaaaugauaaacacaguaacggaaccgugaaggaccguagcccauauagagcccucaugucuugcccgcugggcgaagcacccuccccuuacaauucaaaguucgagagcguugccuggagugcuucugcaugucaugauggcaugggguggcuuacgaucggaauauccgguccagacaacggcgccguggcuguccugaaauauaacgggauuaucacugaaaccaucaagagcuggaaaaagaggauuuugcggacacaggagucggagugcguguguguaaauggaucuugcuuuacuaucaugaccgauggccccuccaacggugccgcgucauacaaaauuuucaagauagaaaaggggaaaguuacaaagaguaucgagcucaaugcaccuaacuuucacuaugaagaguguagcugcuacccagacaccggaacggugaugugugucugccgcgauaauuggcacggcuccaacagacccugggugucuuucaaucagaaccuggacuaccagauuggcuauaucugcagcgggguguuuggagauaauccuaggccaaaagacgguaagggcucauguaacccggucacuguugauggggccgacggagugaaaggcuucaguuacaaguaugguaaugggguauggaucggccggacaaaauccaaccgccugcgaaagggauuugagaugauuugggaccccaauggcuggaccgauacugacagcgauuucucugugaagcaagacgucguggcuauaacagauuggucaggguacagugggagcuuuguucagcauccugaacucaccgguuuagacugcaucagaccauguuucuggguggagcuggucaggggccuuccccgggaaaacacgaccauuuggacauccgggucuucgaucagcuucugcggaguggauuccgacacugccaauuggucauggccugauggcgcagaguugccauuuaccauugacaaauga

SEQ ID NO: 144195 - RNA, 1413 nt, Artificial Sequence; identical to SEQ ID NO: 144078
  derived and/or modified CDS sequence (opt3) from neuraminidase__InfluenzaA__ABW39897

SEQ ID NO: 144196 - RNA, 1413 nt, Artificial Sequence
  derived and/or modified CDS sequence (opt3) from neuraminidase__InfluenzaA__ABW39908
augaaccccaaucagaagaucauuaccauaggcagcaucuccauugccaucgggauuacaucucugaugcuccaaaucggaaacauaaucucaauuugggcuagucacagcauccagacugguucccagaaucauacgggcauuugcaaccagagaaucauaaccuacgaaaauucuacaugggugaaccacacuuaugucucgauuaauaacaccaauguuguggcagggaaagacaagacaucaguaacccuugccggaaacagcagucuguguuccaucucuggcugggcgauuuacacuaaagauaauagcaucaggaucgguuccaagggggacguguucgucauucgggagccuuuuauaucaugcagucauuuggagugucgcacauucuuuuuaacccaaggagcucugcuaaacgauaaacacagcaauggcacggugaaggaccgaucuccauaucgugcccucauguccugcccgcugggcgaagcacccucaccuuacaacagcaaguucgagaguguugccuggucugcuuccgcaugucaugaugggaugggauggcuuacuaucgguauuagcggcccagacaauggggccguggcuguccugaaauauaacggaaucauaaccgaaacaauuaagucguggaaaaagagaaucuugaggacucaggagucugagugcguguguguaaacggcuccugcuuuaccaucaugacagauggucccucaaauggggccgcgaguuacaaaauuuucaagaucgaaaagggaaaaguuaccaagagcauugagcucaacgcaccuaauuuucacuaugaagaguguuccugcuacccagacacgggcacugugaugugugucugccgggauaacuggcacggcucuaaucgccccugggugagcuucaaccagaaucuggacuaccagauaggguauaucugcucaggaguguuuggugauaacccuagaccaaaagacggcaaggggaguuguaauccggucacaguugauggagccgacggcgugaaagguuucuccuacaaguaugggaacggcguauggauuggaaggaccaaaagcaaucggcugcgcaagggcuuugagaugaucugggaccccaacggguggacugauacagacucugauuucucagugaagcaagacgucguggcuaucaccgauuggaguggauacagcgguuccuuuguucagcauccugaacucacgggcuuagacugcauucgaccauguuucuggguggagcuggucagagggcuucccagggaaaauaccacaauauggacuucuggaucgagcaucuccuucugcggcguggauucagacaccgccaacuggaguuggccugauggugcagaguugccauuuacaauugacaaauga

SEQ ID NO: 144197 - RNA, 1413 nt, Artificial Sequence
  derived and/or modified CDS sequence (opt3) from neuraminidase__InfluenzaA__ABW39930
augaaccccaaucagaagaucauuaccauaggcagcaucuccauugccaucgggauuaucucucugaugcuccaaauaggaaacaucauuucaaucugggcuagucacagcauucagacagguucccagaaucauacuggcaucugcaaccagagaauaauuacguacgaaaauucuaccugggugaaccacacauaugucucgaucaauaacacuaauguuguggcagggaaagacaagaccucaguaacacuugccggaaacagcagucuguguuccauuucuggcugggcgaucuacaccaaagauaauagcaucaggauugguuccaagggggacguguucgucauacgggagccuuuuaucucaugcagucauuuggagugucgcacuuucuuuuuaacacaaggagcucugcuaaacgauaaacacagcaauggcaccgugaaggaccgaucuccauaucgugcccucauguccugcccgcugggcgaagcacccucaccuuacaacagcaaguucgagaguguugccuggucugcuuccgcaugucaugaugggaugggauggcuuacgauugguaucagcggcccagacaauggggccguggcuguccugaaauauaacggaauaauuacugaaaccaucaagucguggaaaaagagaaucuugaggacacaggagucugagugcguguguguaaacggcuccugcuuuacuauuaugaccgauggucccucagacggggccgcgaguuacaaaaucuucaagauugaaaagggaaaaguuacaaagagcauagagcucaaugcaccuaacuuucacuaugaagaguguuccugcuacccagauaccggcacggugaugugugucugccgggacaauuggcacggcucuaaccgccccugggugagcuucaaucagaaccuggauuaccagaucggguauauuugcucaggaguguuuggugacaauccuagaccaaaagauggcaaggggaguuguaacccggucacuguugacggagccgacggcgugaaagguuucuccuacaaguaugggaauggcguauggaucggaaggacaaaaagcaaccggcugcgcaagggcuuugagaugaucugggaucccaauggguggaccgacacugauucugacuucucagugaagcaagaugucguggcuauuacagacuggaguggauacagcgguuccuuuguucagcauccugaacucaccggcuuagauugcauacgaccauguuucuggguggagcuggucagagggcuucccagggaaaacacgaccaucuggacaucuggaucgagcauuuccuucugcggcguggacucagauacugccaauuggaguuggccugacggugcagaguugccauuuaccaucgauaaauga

SEQ ID NO: 144198 - RNA, 1413 nt, Artificial Sequence
  derived and/or modified CDS sequence (opt3) from neuraminidase__InfluenzaA__ABW39952
augaaccccaaucagaagaucauuaccauaggcagcaucuccauuacaaucgggauuaucucucugaugcuccaaauaggaaacaucauuucaaucugggccagucacagcauucagacugguucccagaaucauacgggcaugugcaaccagagaaucauaaccuacgaaaauucuacaugggugaaccacacuuaugucucgauuaauaacaccaauguuguggcugggaaagacaagacaucaguaacccuugcaggaaacagcagucuguguuccaucucuggcugggccauuuacacuaaagauaauagcaucaggaucgguuccaagggggacguguucgucauucgggagccuuuuauaucaugcagucauuuggagugucgcacauucuuuuuaacccaaggagcgcugcuaaacgauaaacacagcaauggcacggugaaggaccgaucuccauaucgugcucucauguccugcccgcugggcgaagcccccucaccuuacaacagcaaguucgagaguguugcauggucugccuccgcuugucaugaugggaugggauggcuuacuaucgguauuagcggcccagacaauggggcaguggccguccugaaauauaacggaaucauaaccgaaacaauuaagucguggaaaaagagaaucuugaggacucaggagucugagugcguguguguaaacggcuccugcuuuaccaucaugacagauggucccucaaauggggcugccaguuacaaaauuuucaagaucgaaaagggaaaaguuaccaagagcauugagcucaacgcgccuaauuuucacuaugaagaguguuccugcuacccagacacgggcacugugaugugugucugccgggauaacuggcacggcucuaaucgccccugggugagcuucaaccagaaucuggacuaccagauaggguauaucugcucaggaguguuuggugauaacccuagaccaaaagacggcaaggggaguuguaauccggucacaguugauggagcagacggcgugaaagguuucuccuacaaguaugggaacggcguauggauuggaaggaccaaaagcaaucggcugcgcaagggcuuugagaugaucugggaccccaacggguggacugauacagacucugauuucucagugaagcaagacgucguggccaucaccgauuggaguggauacagcgguuccuuuguucagcauccugaacucacgggcuuagacugcauucgaccauguuucuggguggagcuggucagagggcuucccagggaaaauaccacaauauggacuucuggaucgagcaucuccuucugcggcguggauucagacaccgcuaacuggaguuggccugauggugccgaguugccauuuacaauugacaaauga

SEQ ID NO: 144199 - RNA, 1413 nt, Artificial Sequence; identical to SEQ ID NO: 144078
  derived and/or modified CDS sequence (opt3) from neuraminidase__InfluenzaA__ABW39963

SEQ ID NO: 144200 - RNA, 1413 nt, Artificial Sequence; identical to SEQ ID NO: 144078
  derived and/or modified CDS sequence (opt3) from neuraminidase__InfluenzaA__ABW39985

SEQ ID NO: 144201 - RNA, 1413 nt, Artificial Sequence
  derived and/or modified CDS sequence (opt3) from neuraminidase__InfluenzaA__ABW39996
augaaccccaaucagaagaucauuaccauaggcagcaucuccauugccaucgggauuaucucucugaugcuccaaauaggaaacaucauuucaaucugggcuagucacagcauucagacagguucccagaaucauacuggcaucugcaaccagagaauaauuacguacgaaaauucuaccugggugaaccacacauaugucaauaucaacaauacuaacguuguggcagggaaagacaagaccucgguaacacuugccggaaauucaagccuguguaguauuuccggcugggcgaucuacaccaaagauaacucuaucaggauugguagcaagggggacguguucgucauacgggagccuuuuaucuccugcucacauuuggagugucgcacuuucuuuuuaacacaaggagcucugcuaaaugauaaacacaguaacggcaccgugaaggaccgaagcccauaucgugcccucaugucuugcccgcugggcgaagcacccuccccuuacaauucaaaguucgagagcguugccuggagugcuucugcaugucaugaugggaugggauggcuuacgauugguaucuccggcccagacaacggggccguggcuguccugaaauauaacggaauaauuacugaaaccaucaagagcuggaaaaagagaaucuugaggacacaggagucggagugcguguguguaaauggcucuugcuuuacuauuaugaccgauggucccuccaacgggacagccucauacaaaaucuucaagauugaaaagggaaaaguuaccaagaguauagagcucaaugcgccuaacuuucacuaugaagaguguagcugcuacccagacacgggcacugugaugugugucugccgggauaauuggcacggcuccaaccgccccugggugucuuucaaucagaaccuggacuaccaggugggguauaucugcagcggagucuuuggugauaauccuagaccaaaagacggcaaggggucauguaacccgaugacaguugauggagcagacggcgugaaagguuucaguuacaaguaugggaauggcguauggauuggaaggaccaaauccaacaagcugcggaagggcuuugagaugaucugggaccccaauggguggacugauacagacagcgauuucucugugaaacaagacgucguggccaucaccgauuggucaggauacagugguagcuuuguucagcauccugaacucacgggcuuagacugcauucgcccauguuucuggguggagcugguccgagggcuucccagagaaaacaccacaauauggacuuccggaucuucgaucagcuucugcggcguggauuccgacaccgcuaauuggucauggccugauggugccgaguugccauuuacaauugacaaguga

SEQ ID NO: 144202 - RNA, 1413 nt, Artificial Sequence; identical to SEQ ID NO: 144078
  derived and/or modified CDS sequence (opt3) from neuraminidase__InfluenzaA__ABW40007

SEQ ID NO: 144203 - RNA, 1413 nt, Artificial Sequence
  derived and/or modified CDS sequence (opt3) from neuraminidase__InfluenzaA__ABW40018
augaaccccaaucagaagaucauuaccauaggcagcaucuccauugccaucgggauuaucucucugaugcuccaaauaggaaacaucauuucaaucugggcuagucacagcauucagacagguucccagaaucauacuggcaucugcaaccagagaauaauuacguacgaaaauucuaccugggugaaccacacauaugucaauaucaacaauacuaacguuguggcagggaaagacaagaccucgguaacacuugccggaaauucaagccuguguaguauuuccggcugggcgaucuacaccaaagauaacucuaucaggauugguagcaagggggacguguucgucauacgggagccuuuuaucuccugcucacauuuggagugucgcacuuucuuuuuaacacaaggagcucugcuaaaugauaaacacaguaacggcaccgugaaggaccgaagcccauaucgugcccucaugucuugcccgcugggcgaagcacccuccccuuacaauucaaaguucgagagcguugccuggagugcuucugcaugucaugaugggaugggauggcuuacgauugguaucuccggcccagacaacggggccguggcuguccugaaauauaacggaauaauuacugaaaccaucaagagcuggaaaaagagaaucuugaggacacaggagucggagugcguguguguaaauggcucuugcuuuacuauuaugaccgauggucccuccaacggggccgcgucauacaaaaucuucaagauugaaaagggaaaaguuacaaagaguauagagcucaaugcaccuaacuuucacuaugaagaguguagcugcuacccagacaccggcacggugaugugugucugccgggauaauuggcacggcuccaaccgccccugggugucuuucaaucagaaccuggacuaccagaucggguauauuugcagcggaguguuuggugauaauccuagaccaaaagacggcaaggggucauguaacccggucacuguugauggagccgacggcaucaaagguuucaguuacaaguaugggaauggcguguggaucggaaggacaaaauccaaccggcugcgcaagggcuuugagaugauuugggaccccaauggguggaccaacacugauagcgacuucucuguaaagcaagauguggucgcuauaacagacuggucaggauacagugguagcuuugugcagcauccugaacucaccggcuuagauugcauccgaccauguuucuggguugagcuggugagagggcuucccagggaaaauacgaccauuuggacauccggaucuucgaucagcuucugcggcgucgacggugauacugccaacugguccuggccugacggggcagaguugccauuuaccauugauaaauga

SEQ ID NO: 144204 - RNA, 1410 nt, Artificial Sequence; identical to SEQ ID NO: 143932
  derived and/or modified CDS sequence (opt3) from neuraminidase__InfluenzaA__ABW40029

SEQ ID NO: 144205 - RNA, 1413 nt, Artificial Sequence
  derived and/or modified CDS sequence (opt3) from neuraminidase__InfluenzaA__ABW40040
augaaccccaaucagaagaucauuaccauaggcagcaucuccauugccaucgggauuaucucucugaugcuccaaauaggaaacaucauuucaaucugggcuagucacagcauucagacagguucccagaaucauacuggcaucugcaaccagagaauaauuacguacgaaaauucuaccugggugaaccacacauaugucucgaucaauaacacuaauguuguggcagggaaagacaagaccucaguaacacuugccggaaacagcagucuguguuccauuucuggcugggcgaucuacaccaaagauaauagcaucaggauugguuccaagggggacguguucgucauacgggagccuuuuaucucaugcagucauuuggagugucgcacuuucuuuuuaacacaaggagcucugcuaaacgauaaacacagcaauggcaccgugaaggaccgaucuccauaucgugcccucauguccugcccgcugggcgaagcacccucaccuuacaacagcaaguucgagaguguugccuggucugcuuccgcaugucaugaugggaugggauggcuuacgauugguaucagcggcccagacaauggggccguggcuguccugaaauauaacggaauaauuacugaaaccaucaagucguggaaaaagagaaucuugaggacacaggagucugagugcguguguguaaacggcuccugcuuuacuauuaugaccgauggucccucaaauggggccgcgaguuacaaaaucuucaagauugaaaagggaaaaguuacaaagagcauagagcucaacgcaccuaauuuucacuaugaagaguguuccugcuacccagacaccggcacggugaugugugucugccgggauaacuggcacggcucuaaucgccccugggugagcuucaaccagaaucuggacuaccagaucggguauauuugcucaggaguguuuggugauaacccuagaccaaaagacggcaaggggaguuguaauccggucacuguugauggagccgacggcgugaaagguuucuccuacaaguaugggaacggcaucuggaucggaaggacaaaaagcaaucggcugcgcaagggcuuugagaugauuugggaccccaacggguggaccgauacugacucugauuucucaguaaagcaagacguggucgcuauaacagauuggaguggauacagcgguuccuuugugcagcauccugaacucaccggcuuagacugcauccgaccauguuucuggguugagcuggugagagggcuucccagggaaaauacgaccauuuggacaucuggaucgagcaucuccuucugcggcgucgauucagacacugccaacuggaguuggccugauggugcagaguugccauuuaccauugacaaauga

SEQ ID NO: 144206 - RNA, 1413 nt, Artificial Sequence; identical to SEQ ID NO: 144078
  derived and/or modified CDS sequence (opt3) from neuraminidase__InfluenzaA__ABW40051

SEQ ID NO: 144207 - RNA, 1413 nt, Artificial Sequence; identical to SEQ ID NO: 144078
  derived and/or modified CDS sequence (opt3) from neuraminidase__InfluenzaA__ABW40062

SEQ ID NO: 144208 - RNA, 1410 nt, Artificial Sequence; identical to SEQ ID NO: 144114
  derived and/or modified CDS sequence (opt3) from neuraminidase__InfluenzaA__ABW40084

SEQ ID NO: 144209 - RNA, 1413 nt, Artificial Sequence
  derived and/or modified CDS sequence (opt3) from neuraminidase__InfluenzaA__ABW40095
augaaccccaaucagaagaucauuaccauaggcagcaucuccguggccauugggaucauuucucugaugcuccaaaucggaaacauaaucucaauuugggcuagucacagcauccagacagguucccagaaucauacuggcauuugcaaccagagaaucauaacguacgaaaauucuaccugggucaaccacacauauguuucgauuaauaacacuaaugugguagcagggaaagacaagaccucagugacacuugccggaaacagcagucuguguuccaucucuggcugggcgauuuacaccaaagauaauagcaucaggaucgguuccaagggggacgucuucgugauucgggagccuuuuauaucaugcagucauuuggagugucgcacuuucuuuuuaacacaaggagcucugcuaaacgauaaacacagcaauggcaccguuaaggaccgaucuccauaucgugcccucauguccugcccgcugggcgaagcacccucaccuuacaacagcaaguucgagaguguggccuggucugcuuccgcaugucaugaugggaugggauggcuuacgaucgguauuagcggcccagacaauggggccgucgcugugcugaaauauaacggaaucauaacugaaaccauuaagucguggaaaaagagaaucuugaggacacaggagucugagugcguauguguuaacggcuccugcuuuacuaucaugaccgauggucccucaaauggggccgcgaguuacaaaauuuucaagaucgaaaagggaaaagugacaaagagcauugagcucaacgcaccuaauuuucacuaugaagaguguuccugcuacccagacaccggcacggucaugugugugugccgggauaacuggcacggcucuaaucgccccugggugagcuucaaccagaaucuggacuaccagauaggguauaucugcucaggagucuuuggugauaacccuagaccaaaagacggcaaggggaguuguaauccgaugacuguugauggagccgacggcgugaaagguuucuccuacaaguaugggaacggcguauggauuggaaggacaaaaagcaaucggcugcgcaagggcuuugagaugaucugggaccccaacggguggaccgauacugacucugauuucucagugaagcaagacgucguggcuaucacagauuggaguggauacagcgguuccuuuguucagcauccugaacucaccggcuuagacugcauucgaccauguuucuggguggagcuggucagagggcuucccagggaaaauacgaccauauggacaucuggaucgagcaucuccuucugcggcguggauucagacacugccaacuggaguuggccugauggugcagaguugccauuuaccauugacaaauga

SEQ ID NO: 144210 - RNA, 1413 nt, Artificial Sequence
  derived and/or modified CDS sequence (opt3) from neuraminidase__InfluenzaA__ABW40106
augaaccccaaucagaagaucauuaccauaggcagcaucuccauugccaucgggauuaucucucugaugcuccaaauaggaaacaucauuucaaucugggcuagucacagcauucagacagguucccagaaucauacuggcaucugcaaccagagaauaauuacguacgaaaauucuaccugggugaaccacacauaugucucgaucaauaacacuaauguuguggcagggaaagacaagaccucaguaacacuugccggaaacagcagucuguguuccauuucuggcugggcgaucuacaccaaagauaauagcaucaggauugguuccaagggggacguguucgucauacgggagccuuuuaucucaugcagucauuuggagugucgcacuuucuuuuuaacacaaggagcucugcuaaacgauaaacacagcaauggcaccgugaaggaccgaucuccauaucgugcccucauguccugcccgcugggcgaagcacccucaccuuacaacagcaaguucgagaguguugccuggucugcuuccgcaugucaugaugggaugggauggcuuacgauugguaucagcggcccagacaauggggccguggcuguccugaaauauaacggaauaauuacugaaaccaucaagucguggaaaaagagaaucuugaggacacaggagucugagugcgugugucucaacggcuccugcuuuacuauuaugaccgauggucccucaaauggggccgcgaguuacaaaaucuucaagauugaaaagggaaaaguaacaaagagcauagagcugaacgcaccuaauuuucacuaugaagaguguuccugcuacccagacaccggcacgguuaugugugugugccgggauaacuggcacggcucuaaucgccccugggucagcuucaaccagaaucuggacuaccagaucggguauauuugcucaggaguguuuggugauaacccuagaccaaaagacggcaaggggaguuguaauccggugacugucgauggagccgacggcguuaaagguuucuccuacaaguaugggaacggcguguggaucggaaggacaaaaagcaaucggcuccgcaagggcuuugagaugguaugggaccccaacggguggaccgauacugacucugauuucucagugaagcaagacgucguggcuaucacagauuggaguggauacagcgguuccuuuguucagcauccugaauuaaccggccuggacugcauucgaccauguuucuggguggagcuugucagaggguugcccagggaaaauacgaccauauggacaucuggaucgagcaucuccuucugcggcguggauucagacacugccaacuggaguuggccugauggugcagagcugccauuuaccauugacaaauga

SEQ ID NO: 144211 - RNA, 1413 nt, Artificial Sequence; identical to SEQ ID NO: 144078
  derived and/or modified CDS sequence (opt3) from neuraminidase__InfluenzaA__ABW40117

SEQ ID NO: 144212 - RNA, 1413 nt, Artificial Sequence; identical to SEQ ID NO: 144078
  derived and/or modified CDS sequence (opt3) from neuraminidase__InfluenzaA__ABW40128

SEQ ID NO: 144213 - RNA, 1410 nt, Artificial Sequence; identical to SEQ ID NO: 143932
  derived and/or modified CDS sequence (opt3) from neuraminidase__InfluenzaA__ABW40139

SEQ ID NO: 144214 - RNA, 1413 nt, Artificial Sequence; identical to SEQ ID NO: 144078
  derived and/or modified CDS sequence (opt3) from neuraminidase__InfluenzaA__ABW40150

SEQ ID NO: 144215 - RNA, 1413 nt, Artificial Sequence; identical to SEQ ID NO: 144078
  derived and/or modified CDS sequence (opt3) from neuraminidase__InfluenzaA__ABW40161

SEQ ID NO: 144216 - RNA, 1410 nt, Artificial Sequence
  derived and/or modified CDS sequence (opt3) from neuraminidase__InfluenzaA__ABW40172
augaaccccaaucagaagaucauuaccauaggcagcgugucccugacaaucucuacuauuugcuucuuuaugcaaaucgccauucucaucacgaccgucacacuucacuucaaacaguacgaguuuaacucaccuccaaauaaccagguuaugcugugugaaccgacuauaaucgagagaaauauuaccgaaaucguguauuugacaaacaccacuauugagaaggaaaucugccccaaauuagcugaguacaggaauuggaguaagccucagugugacauaacaggguucgcaccauuuagcaaagauaacuccauucggcugucugccggaggugacaucuggguaacccgcgagcccuaugugucgugcgauccugacaaguguuaccaauucgcgcuaggccaggggacgacucucaauaacguccauucaaaugauaccgugcgagaccguacaccauauagaacucugcuuaugaacgaacugggaguucccuuucacuugggcaccaaacaggugugcauugcuuggagcaguuccucuugucaugaugguaaggccuggcuccacgucugcaucacaggggacgauaagaaugcaaccgccagcuucaucuacaacggaaggcugguggacuccauuguaucauggaguaaagagauacugcggacgcaggaaagcgaguguguuugcaucaauggcacuuguacaguggucaugaccgauggcucugcuuccgggaaggcagacacuaaaauucucuuuaucgaggaaggaaagauagugcauacaucaaccuuaagcgguagugcccaacacguggaggaaugcucuugcuauccucgcuacccaggcgucagauguguuugcagggauaacuggaagggguccaaccggccgauuguggacaucaauaucaaagaccacagcauuguaucgucuuacguguguuccggacuggucggcgauacgccccgcaagaacgacucaaguagcuccucucauugccuugauccuaauaacgaggaaggugggcacggagugaaaggcugggcuuucgacgauggcaaugacguuuggauggggcgaaccaucagcgagaagucaagauugggauaugagacauuuaaagugauugaagguuggaguaacccaaaguccaaacugcagauaaauaggcaggucaucguggaucggggcaaccguagcggguacucuggaauuuucucaguagagggcaagaguuguaucaaucgcugcuuuuauguugaacuaacuagagguaggaaggaggaaaccgaggugcucuggacaagcaacuccaucgucguguucugugggacuucuggcaccuacggaacaggcucguggcccgacggggccgauauuaaucugaugccuauauga

SEQ ID NO: 144217 - RNA, 1413 nt, Artificial Sequence; identical to SEQ ID NO: 144078
  derived and/or modified CDS sequence (opt3) from neuraminidase__InfluenzaA__ABW40183

SEQ ID NO: 144218 - RNA, 1410 nt, Artificial Sequence; identical to SEQ ID NO: 143932
  derived and/or modified CDS sequence (opt3) from neuraminidase__InfluenzaA__ABW40194

SEQ ID NO: 144219 - RNA, 1413 nt, Artificial Sequence; identical to SEQ ID NO: 144113
  derived and/or modified CDS sequence (opt3) from neuraminidase__InfluenzaA__ABW40205

SEQ ID NO: 144220 - RNA, 1413 nt, Artificial Sequence; identical to SEQ ID NO: 144117
  derived and/or modified CDS sequence (opt3) from neuraminidase__InfluenzaA__ABW40216

SEQ ID NO: 144221 - RNA, 1413 nt, Artificial Sequence; identical to SEQ ID NO: 144117
  derived and/or modified CDS sequence (opt3) from neuraminidase__InfluenzaA__ABW40227

SEQ ID NO: 144222 - RNA, 1413 nt, Artificial Sequence; identical to SEQ ID NO: 144078
  derived and/or modified CDS sequence (opt3) from neuraminidase__InfluenzaA__ABW40238

SEQ ID NO: 144223 - RNA, 1410 nt, Artificial Sequence
  derived and/or modified CDS sequence (opt3) from neuraminidase__InfluenzaA__ABW40249
augaaccccaaucagaagaucauuaccauaggcagcgugucccugacaaucucuacuauuugcuucuuuaugcaaaucgccauucucaucacgaccgucacacuucacuucaaacaguacgaguuuaacucaccuccaaauaaccagguuaugcugugugaaccgacuauaaucgagagaaauauuaccgaaaucguguauuugacaaacaccacuauugagaaggaaaucugccccaaauuagcugaguacaggaauuggaguaagccucagugugacauaacaggguucgcaccauuuagcaaagauaacuccauucggcugucugccggaggugacaucuggguaacccgcgagcccuaugugucgugcgauccugacaaguguuaccaauucgcgcuaggccaggggacgacucucaauaacguccauucaaaugauaccgugcgagaccguacaccauauagaacucugcuuaugaacgaacugggaguucccuuucacuugggcaccaaacaggugugcauugcuuggagcaguuccucuugucaugaugguaaggccuggcuccacgucugcaucacaggggacgauaagaaugcaaccgccagcuucaucuacaacggaaggcugguggacuccauuguaucauggaguaaagagauacugcggacgcaggaaagcgaguguguuugcaucaauggcacuuguacaguggucaugaccgauggcucugcuuccgggaaggcagacacuaaaauucucuuuaucgaggaaggaaagauagugcauacaucaaccuuaagcgguagugcccaacacguggaggaaugcucuugcuauccucgcuacccaggcgucagauguguuugcagggauaacuggaagggguccaaccggccgauuguggacaucaauaucaaagaccacagcauuguaucgucuuacguguguuccggacuggucggcgauacgccccgcaagaacgacucaaguagcuccucucauugccuugauccuaauaacgaggaaggugggcacggagugaaaggcugggcuuucgacgauggcaaugacguuuggauggggcgaaccaucagcgagaagucaagauugggauaugagacauuuaaagugauugaagguuggaguaaccauaaguccaaacugcagauaaauaggcaggucaucguggaucggggcaaccguagcggguacucuggaauuuucucaguagagggcaagaguuguaucaaucgcugcuuuuauguugaacuaaucagagguaggaaggaggaaacugaggugcucuggaccagcaacuccauugucguguucugugggacaucuggcacuuacggaaccggcucguggccagacggggccgauauaaaucugaugcccaucuga

SEQ ID NO: 144224 - RNA, 1413 nt, Artificial Sequence; identical to SEQ ID NO: 144078
  derived and/or modified CDS sequence (opt3) from neuraminidase__InfluenzaA__ABW40260

SEQ ID NO: 144225 - RNA, 1410 nt, Artificial Sequence
  derived and/or modified CDS sequence (opt3) from neuraminidase__InfluenzaA__ABW40271
augaaccccaaucagaagaucauuaccauaggcagcgugucccugacaaucucuacuauuugcuucuuuaugcaaaucgccauucucaucacgaccgucacacuucacuucaaacaguacgaguuuaacucaccuccaaauaaccagguuaugcugugugaaccgacuauaaucgagagaaauauuaccgaaaucguguauuugacaaacaccacuauugagaaggaaaucugccccaaauuagcugagcauaggaauuggaguaagccucagugugacauaacaggguucgcaccauuuagcaaagauaacuccauucggcugucugccggaggugacaucuggguaacccgcgagcccuacgugucgugcgauccugacaaguguuaucaauucgcgcuaggccaggggacgacucucaauaacguccacucaaaugauaccgugcgagaccguacaccauacagaacucugcuuaugaacgaacugggaguucccuuucauuugggcaccaaacaggugugcauugcuuggagcaguuccucuugucacgaugguaaggccuggcuccaugucugcaucacaggggacgauaagaaugcaaccgccagcuucaucuauaacggaaggcugguggacuccauuguaucauggaguaaagagauacugcggacgcaggaaagcgaguguguuugcaucaauggcacuuguacaguggucaugaccgauggcucugcuuccgggaaggcagacacuaaaauucucuuuaucgaggaaggaaagauagugcacacaucaaccuuaagcgguagugcccaacacguggaggaaugcucuugcuacccucgcuauccaggcgucagauguguuugcagggauaacuggaagggguccaaccggccgauuguggacaucaauaucaaagaccauagcauuguaucgucuuacguguguuccggacuggucggcgauacgccccgcaagaacgacucaaguagcuccucucacugccuugauccuaauaacgaggaaggugggcauggagugaaaggcugggcuuucgacgauggcaaugacguuuggauggggcgaaccaucagcgagaagucaagauugggauacgagacauuuaaagugauugaagguuggaguaacccaaaguccaaacugcagauaaauaggcaggucaucguggaucggggcaaccguagcggguauucuggaauuuucucaguagagggcaagaguuguaucaaucgcugcuuuuacguugaacuaaucagagguaggaaggaggaaacugaggugcucuggaccagcaacuccauugucguguucugugggacaucuggcacuuauggaaccggcucguggcccgacggggccgauauaaaucugaugccuaucuga

SEQ ID NO: 144226 - RNA, 1413 nt, Artificial Sequence; identical to SEQ ID NO: 144078
  derived and/or modified CDS sequence (opt3) from neuraminidase__InfluenzaA__ABW40282

SEQ ID NO: 144227 - RNA, 1413 nt, Artificial Sequence; identical to SEQ ID NO: 144113
  derived and/or modified CDS sequence (opt3) from neuraminidase__InfluenzaA__ABW40293

SEQ ID NO: 144228 - RNA, 1413 nt, Artificial Sequence; identical to SEQ ID NO: 144078
  derived and/or modified CDS sequence (opt3) from neuraminidase__InfluenzaA__ABW40304

SEQ ID NO: 144229 - RNA, 1413 nt, Artificial Sequence; identical to SEQ ID NO: 144078
  derived and/or modified CDS sequence (opt3) from neuraminidase__InfluenzaA__ABW40315

SEQ ID NO: 144230 - RNA, 1410 nt, Artificial Sequence; identical to SEQ ID NO: 143932
  derived and/or modified CDS sequence (opt3) from neuraminidase__InfluenzaA__ABW40326

SEQ ID NO: 144231 - RNA, 1413 nt, Artificial Sequence; identical to SEQ ID NO: 144119
  derived and/or modified CDS sequence (opt3) from neuraminidase__InfluenzaA__ABW40337

SEQ ID NO: 144232 - RNA, 1413 nt, Artificial Sequence; identical to SEQ ID NO: 144113
  derived and/or modified CDS sequence (opt3) from neuraminidase__InfluenzaA__ABW40359

SEQ ID NO: 144233 - RNA, 1413 nt, Artificial Sequence
  derived and/or modified CDS sequence (opt3) from neuraminidase__InfluenzaA__ABW40370
augaaccccaaucagaagaucauuaccauaggcagcaucuccauugccaucgggauuaucucucugaugcuccaaauaggaaacaucauuucaaucugggcuagucacagcauucagacagguucccagaaucauacuggcaucugcaaccagagaauaauuacguacgaaaauucuaccugggugaaccacacauaugucucgaucaauaacacuaauguuguggcagggaaagacaagaccucaguaacacuugccggaaacagcagucuguguuccauuucuggcugggcgaucuacaccaaagauaauagcaucaggauugguuccaagggggacguguucgucauacgggagccuuuuaucucaugcagucauuuggagugucgcacuuucuuuuuaacacaaggagcucugcuaaacgauaaacacagcaauggcaccgugaaggaccgaucuccauaucgugcccucauguccugcccgcugggcgaagcacccucaccuuacaacagcaaguucgagaguguugccuggucugcuuccgcaugucaugaugggaugggauggcuuacgauugguaucagcggcccagacaauggggccguggcuguccugaaauauaacggaauaauuacugaaaccaucaagucguggaaaaagagaaucuugaggacacaggagucugagugcguguguguaaacggcuccugcuuuacuauuaugaccgauggucccucaaauggggccgcgaguuacaaaaucuucaagauugaaaagggaaaaguuacaaagagcauagagcucaacgcaccuaauuuucacuaugaagaguguuccugcuacccagacucuggcaccgugaugugugucugccgggauaacuggcacggcagcaaucgccccugggugucauucaaccagaaucuggacuaccagaucggguauauuugcaguggaguguuuggugauaacccuagaccaaaagacggcaagggguccuguaauccggucacgguugauggagccgacggcgugaaagguuucagcuacaaguaugggaacggcguauggaucggaaggacuaaaucuaaucggcugcgcaagggcuuugagaugaucugggaccccaacggguggacagauaccgacucagauuucagugugaagcaagacgucguggcuauuacugauuggagcggauacuccgguucuuuuguucagcauccugaacucacaggcuuagacugcauacgaccauguuucuggguggagcuggucagagggcuucccagggaaaauaccacgaucuggaccucgggaagcuccauuucauucugcggcguggauagugacacagccaacuggucuuggccugauggugcagaguugccauuuacuaucgacaaauga

SEQ ID NO: 144234 - RNA, 1413 nt, Artificial Sequence; identical to SEQ ID NO: 144078
  derived and/or modified CDS sequence (opt3) from neuraminidase__InfluenzaA__ABW40403

SEQ ID NO: 144235 - RNA, 1413 nt, Artificial Sequence
  derived and/or modified CDS sequence (opt3) from neuraminidase__InfluenzaA__ABW40414
augaaccccaaucagaagaucauuaccauaggcagcaucuccauugccaucgggauuaucucucugaugcuccaaauaggaaacaucauuucaaucugggcuagucacagcauucagacagguucccagaaucauacuggcaucugcaaccagagaauaauuacguacgaaaauucuaccugggugaaccacacauaugucucgaucaauaacacuaauguuguggcagggaaagacaagaccucaguaacacuugccggaaacagcagucuguguuccauuucuggcugggcgaucuacaccaaagauaauagcaucaggauugguuccaagggggacguguucgucauacgggagccuuuuaucucaugcagucauuuggagugucgcacuuucuuuuuaacacaaggagcucugcuaaacgauaaacacagcaauggcaccgugaaggaccgaucuccauaucgugcccucauguccugcccgcugggcgaagcacccucaccuuacaacagcaaguucgagaguguugccuggucugcuuccgcaugucaugaugggaugggauggcuuacgauugguaucagcggcccagacaauggggccguggcuguccugaaauauaacggaauaauuacugaaaccaucaagucguggaaaaagagaaucuugaggacacaggagucugagugcguguguguaaacggcuccugcuuuacuauuaugaccgauggucccucaaauggggccgcgaguuacaaaaucuucaagauugaaaagggaaaaguuacaaagagcauagagcucaacgcaccuaauuuucacuaugaagaguguuccugcuacccagacaccggcacggugaugugugucugccgggauaacuggcacggcucuaaucgccccugggugagcuucgaccagaaccuggauuaccagaucggguauauuugcucaggaguguuuggugacaauccuagaccaaaagauggcaaggggaguuguaacccggucacuguugacggagccgacggcgugaaagguuucuccuacaaguaugggaauggcguauggaucggaaggacaaaaagcaaccggcugcgcaagggcuuugagaugaucugggaucccaauggguggaccgacacugauucugacuucucagugaagcaagaugucguggcuauuacagacuggaguggauacagcgguuccuuuguucagcauccugaacucaccggcuuagauugcauacgaccauguuucuggguggagcuggucagagggcuucccagggaaaacacgaccaucuggacaucuggaucgagcauuuccuucugcggcguggacucagauacugccaauuggaguuggccugacggugcagaguugccauuuaccaucgauaaauga

SEQ ID NO: 144236 - RNA, 1413 nt, Artificial Sequence; identical to SEQ ID NO: 144078
  derived and/or modified CDS sequence (opt3) from neuraminidase__InfluenzaA__ABW40425

SEQ ID NO: 144237 - RNA, 1413 nt, Artificial Sequence; identical to SEQ ID NO: 144119
  derived and/or modified CDS sequence (opt3) from neuraminidase__InfluenzaA__ABW40436

SEQ ID NO: 144238 - RNA, 1413 nt, Artificial Sequence
  derived and/or modified CDS sequence (opt3) from neuraminidase__InfluenzaA__ABW40447
augaaccccaaucagaagaucauuaccauaggcagcaucuccauugccaucgggauuaucucucugaugcuccaaauaggaaacaucauuucaaucugggcuagucacagcauucagacagguucccagaaucauacuggcaucugcaaccagagaauaauuacguacgaaaauucuaccugggugaaccacacauaugucaauaucaacaauacuaacguuguggcagggaaagacaagaccucgguaacacuugccggaaauucaagccuguguaguauuuccggcugggcgaucuacaccaaagauaacucuaucaggauugguagcaagggggacguguucgucauacgggagccuuuuaucuccugcucacauuuggagugucgcacuuucuuuuuaacacaaggagcucugcuaaaugauaaacacaguaacggcaccgugaaggaccgaagcccauaucgugcccucaugucuugcccgcugggcgaagcacccuccccuuacaauucaaaguucgagagcguugccuggagugcuucugcaugucaugaugggaugggauggcuuacgauugguaucuccggcccagacaacggggccguggcuguccugaaauauaacggaauaauuacugaaaccaucaagagcuggaaaaagagaaucuugaggacacaggagucggagugcguguguguaaauggcucuugcuuuacuauuaugaccgauggucccuccaacggggccgcgucauacaaaaucuucaagauugaaaagggaaaaguuacaaagaguauagagcucaaugcaccuaacuuucacuaugaagaguguagcugcuacccagacaccggcacggugaugugugucugccgggauaauuggcacggcuccaaccgccccugggugucuuucaaucagaaccuggacuaccaggugggguauaucugcagcggagucuuuggugauaauccuagaccaaaagacggcaaggggucauguaacccgaugacuguugauggagccgacggcgugaaagguuucaguuacaaguaugggaauggcguauggauuggaaggacaaaauccaacaagcugcggaagggcuuugagaugaucugggaccccaauggguggaccgauacugacagcgauuucucugugaaacaagacgucguggcuaucacagauuggucaggauacagugguagcuuuguucagcauccugaacucaccggcuuaaacugcauucgcccauguuucuggguggagcugguccgagggcuucccagagaaaauacgaccauauggacauccggaucuucgaucagcuucugcggcguggacuccgauacugccaacuggucauggccugacggugcagaguugccauuuaccauugauaaguga

SEQ ID NO: 144239 - RNA, 1413 nt, Artificial Sequence; identical to SEQ ID NO: 144104
  derived and/or modified CDS sequence (opt3) from neuraminidase__InfluenzaA__ABW40458

SEQ ID NO: 144240 - RNA, 1413 nt, Artificial Sequence; identical to SEQ ID NO: 144078
  derived and/or modified CDS sequence (opt3) from neuraminidase__InfluenzaA__ABW40469

SEQ ID NO: 144241 - RNA, 1413 nt, Artificial Sequence; identical to SEQ ID NO: 144078
  derived and/or modified CDS sequence (opt3) from neuraminidase__InfluenzaA__ABW40491

SEQ ID NO: 144242 - RNA, 1413 nt, Artificial Sequence; identical to SEQ ID NO: 144078
  derived and/or modified CDS sequence (opt3) from neuraminidase__InfluenzaA__ABW40502

SEQ ID NO: 144243 - RNA, 1413 nt, Artificial Sequence; identical to SEQ ID NO: 144119
  derived and/or modified CDS sequence (opt3) from neuraminidase__InfluenzaA__ABW40513

SEQ ID NO: 144244 - RNA, 1413 nt, Artificial Sequence; identical to SEQ ID NO: 144078
  derived and/or modified CDS sequence (opt3) from neuraminidase__InfluenzaA__ABW40524

SEQ ID NO: 144245 - RNA, 1413 nt, Artificial Sequence
  derived and/or modified CDS sequence (opt3) from neuraminidase__InfluenzaA__ABW40546
augaaccccaaucagaagaucauuaccauaggcagcaucuccauugccaucgggauuaucucucugaugcuccaaauaggaaacaucauuucaaucugggcuagucacagcauucagacagguucccagaaucauacuggcaucugcaaccagagaauaauuacguacgaaaauucuaccugggugaaccacacauaugucaauaucaacaauacuaacguuguggcagggaaagacaagaccucgguaacacuugccggaaauucaagccuguguaguauuuccggcugggcgaucuacaccaaagauaacucuaucaggauugguagcaagggggacguguucgucauacgggagccuuuuaucuccugcucacauuuggagugucgcacuuucuuuuuaacacaaggagcucugcuaaaugauaaacacaguaacggcaccgugaaggaccgaagcccauaucgugcccucaugucuugcccgcugggcgaagcacccuccccuuacaauucaaaguucgagagcguugccuggagugcuucugcaugucaugaugggaugggauggcuuacgauugguaucuccggcccagacaacggggccguggcuguccugaaauauaacggaauaauuacugaaaccaucaagagcuggaaaaagagaaucuugaggacacaggagucggagugcguguguguaaauggcucuugcuuuacuauuaugaccgauggucccuccaacggggccgcgucauacaaaaucuucaagauugaaaagggaaaaguuacaaagaguauggagcucaaugcaccuaacuuucacuaugaagaguguagcugcuacccagacaccggcacggugaugugugucugccgggauaauuggcacggcuccaaccgccccugggugucuuucaaucagaaccuggacuaccagauaggguauaucugcagcggaguguuuggugauaauccuagaccaaaagacggcaaggggucauguaacccggucacuguugauggagccgacggcgugaaagguuucaguuacaaguaugggaauggcguauggauuggaaggacaaaauccaaccggcugcgcaagggcuuugagaugaucugggaccccaauggguggaccgauacugacagcgauuucucugugaagcaagacgucguggcuaucacagauuggucaggauacagugguagcuuuguucagcauccugaacucaccggcuuagacugcauucgaccauguuucuggguggagcuggucagagggcuucccagggaaaacacgaccauauggacauccggaucuucgaucagcuucugcggcguggauuccgacacugccaauuggucauggccugauggugcagaguugccauuuaccauugacaaauga

SEQ ID NO: 144246 - RNA, 1413 nt, Artificial Sequence; identical to SEQ ID NO: 144078
  derived and/or modified CDS sequence (opt3) from neuraminidase__InfluenzaA__ABW40557

SEQ ID NO: 144247 - RNA, 1413 nt, Artificial Sequence
  derived and/or modified CDS sequence (opt3) from neuraminidase__InfluenzaA__ABW40568
augaaccccaaucagaagaucauuaccauaggcagcaucuccauugccaucgggauuaucucucugaugcuccaaauaggaaacaucauuucaaucugggcuagucacagcauucagacagguucccagaaucauacuggcaucugcaaccagagaauaauuacguacgaaaauucuaccugggugaaccacacauaugucucgaucaauaacacuaauguuguggcagggaaagacaagaccucaguaacacuugccggaaacagcagucuguguuccauuucuggcugggcgaucuacaccaaagauaauagcaucaggauugguuccaagggggacguguucgucauacgggagccuuuuaucucaugcagucauuuggagugucgcacuuucuuuuuaacacaaggagcucugcuaaacgauaaacacagcaauggcaccgugaaggaccgaucuccauaucgugcccucauguccugcccgcugggcgaagcacccucaccuuacaacagcaaguucgagaguguugccuggucugcuuccgcaugucaugaugggaugggauggcuuacgauugguaucagcggcccagacaauggggccguggcuguccugaaauauaacggaauaauuacugaaaccaucaagucguggaaaaagcagaucuugagaacacaggagucugagugcguguguguaaacggcuccugcuuuacuauuaugaccgauggucccucaaauggggccgcgaguuacaaaaucuucaagauugaaaagggaaaaguuacaaagagcauagagcucaacgcaccuaauuuucacuaugaagaguguuccugcuacccagacaccggcacggugaugugugucugcagggauaacuggcacggcucuaaucggcccugggugagcuucaaccagaaucuggacuaccaaaucggguauauuugcucaggaguguuuggugauaacccucgcccaaaagacggcaaggggaguuguaauccggucacuguugauggagccgacggcgugaaagguuucuccuacaaguaugggaacggcguauggaucggaagaacaaaaagcaauaggcugcggaagggcuuugagaugaucugggaccccaacggguggaccgauacugacucugauuucucagugaagcaggacgucguggcuauuacagauuggaguggauacagcgguuccuuuguucagcauccugaacucaccggcuuagacugcauacgcccauguuucuggguggagcugguccgagggcuucccagagaaaauacgaccaucuggacaucuggaucgagcauuuccuucugcggcguggauucagacacugccaacuggaguuggccugauggugcagaguugccauuuaccaucgacaaauga

SEQ ID NO: 144248 - RNA, 1413 nt, Artificial Sequence
  derived and/or modified CDS sequence (opt3) from neuraminidase__InfluenzaA__ABW40579
augaaccccaaucagaagaucauuaccauaggcagcaucuccauugccaucgggauuaucucucugaugcuccaaauaggaaacaucauuucaaucugggcuagucacagcauucagacagguucccagaaucauacuggcaucugcaaccagagaauaauuacguacgaaaauucuaccugggugaaccacacauaugucucgaucaauaacacuaauguuguggcagggaaagacaagaccucaguaacacuugccggaaacagcagucuguguuccauuucuggcugggcgaucuacaccaaagauaauagcaucaggauugguuccaagggggacguguucgucauacgggagccuuuuaucucaugcagucauuuggagugucgcacuuucuuuuuaacacaaggagcucugcuaaacgauaaacacagcaauggcaccgugaaggaccgaucuccauaucgugcccucauguccugcccgcugggcgaagcacccucaccuuacaacagcaaguucgagaguguugccuggucugcuuccgcaugucaugaugggaugggauggcuuacgauugguaucagcggcccagacaauggggccguggcuguccugaaauauaacggaauaauuacugaaaccaucaagucguggaaaaagagaaucuugaggacacaggagucugagugcguguguguaaacggcuccugcuuuacuauuaugaccgauggucccaauaacggggccgcgucauacaaaaucuucaagauugaaaagggaaaaguuacaaagaguauagagcucaaugcaccuaacuuucacuaugaagaguguagcugcuacccagacaccggcacggugaugugugucugccgggauaauuggcacggcuccaaccgccccugggugucuuucaaucagaaccuggacuaccagaucggguauauuugcagcggaguguuuggugauaauccuagaccaaaagacggcaaggggucauguaacccggucacuguugauggagccgacggcgugaaagguuucaguuacaaguaugggaauggcguauggaucggaaggacaaaauccaaccggcugcgcaagggcuuugagaugaucugggaccccaauggguggaccgauacugacagcgauuucucugugaagcaagacgucguggcuauuacagauuggucaggauacagugguagcuuuguucagcauccugaacucaccggcuuagacugcauacgaccauguuucuggguggagcuggucagagggcuucccagggaaaacacgaccaucuggacauccggaucuucgauuagcuucugcggcguggauuccgacacugccaauuggucauggccugauggugcagaguugccauuuaccaucgacaaauga

SEQ ID NO: 144249 - RNA, 1413 nt, Artificial Sequence
  derived and/or modified CDS sequence (opt3) from neuraminidase__InfluenzaA__ABW40601
augaaccccaaucagaagaucauuaccauaggcagcaucuccauugccaucggggugauuucucugaugcuccaaaucggaaacauaaucucaauuugggcuagucacagcauccagacagguucccagaaucauacuggcauuugcaaccagagaaucauaacguacgaaaauucuaccugggucaaccacacauauguuaauauuaacaauacuaacgugguagcagggaaagacaagaccucggugacacuugccggaaauucaagccuguguaguaucuccggcugggcgauuuacaccaaagauaacucuaucaggaucgguagcaagggggacgucuucgugauucgggagccuuuuauauccugcucacauuuggagugucgcacuuucuuuuuaacacaaggagcucugcuaaaugauaaacacaguaacggcaccguuaaggaccgaagcccauaucgugcccucaugucuugcccgcugggcgaagcacccuccccuuacaauucaaaguucgagagcguggccuggagugcuucugcaugucaugaugggaugggauggcuuacgaucgguauuuccggcccagacaacggggccgucgcugugcugaaauauaacggaaucauaacugaaaccauuaagagcuggaaaaagagaaucuugaggacacaggagucggagugcguauguguuaauggcucuugcuuuacuaucaugaccgauggucccuccaacggggccgcgucauacaaaauuuucaagaucgaaaagggaaaagugacaaagaguauugagcucaaugcaccuaacuuucacuaugaagaguguagcugcuacccagacaccggcacggucaugugugugugccgggauaauuggcacggcuccaaccgccccugggugucuuucaaucagaaccuggacuaccagauaggguauaucugcagcggagucuuuggugauaauccuagaccaaaagacggcaaggggucauguaacccgguuacuguggauggagccgacggcauuaaagguuucaguuacaaguaugggaauggcguauggaucggaaggacaaaauccaaccggcugcgcaagggcuuugagaugaucugggaccccaauggguggaccaacacugauagcgacuucucugugaagcaagaugucguggcuauuacagacuggucaggauacagugguagcuuuguucagcauccugaacucaccggcuuagauugcauacgaccauguuucuggguggagcuggucagagggcuucccagggaaaauacgaccaucuggacauccggaucuucgauuagcuucugcggcguggacggugauacugccaacugguccuggccugacggggcagaguugccauuuaccaucgauaaauga

SEQ ID NO: 144250 - RNA, 1413 nt, Artificial Sequence; identical to SEQ ID NO: 144113
  derived and/or modified CDS sequence (opt3) from neuraminidase__InfluenzaA__ABW40612

SEQ ID NO: 144251 - RNA, 1413 nt, Artificial Sequence; identical to SEQ ID NO: 144078
  derived and/or modified CDS sequence (opt3) from neuraminidase__InfluenzaA__ABW40623

SEQ ID NO: 144252 - RNA, 1410 nt, Artificial Sequence; identical to SEQ ID NO: 143932
  derived and/or modified CDS sequence (opt3) from neuraminidase__InfluenzaA__ABW40634

SEQ ID NO: 144253 - RNA, 1413 nt, Artificial Sequence; identical to SEQ ID NO: 144078
  derived and/or modified CDS sequence (opt3) from neuraminidase__InfluenzaA__ABW40645

SEQ ID NO: 144254 - RNA, 1410 nt, Artificial Sequence
  derived and/or modified CDS sequence (opt3) from neuraminidase__InfluenzaA__ABW40656
augaaccccaaucagaagaucauuaccauaggcagcgugucccugacaaucucuacuauuugcuucuuuaugcaaaucgccauucucaucacgaccgucacacuucacuucaaacaguacgaguuuaacucaccuccaaauaaccagguuaugcugugugaaccgacuauaaucgagagaaauauuaccgaaaucguguauuugacaaacaccacuauugagaaggaaaucugccccaaauuagcugaguacaggaauuggaguaagccucagugugacauaacaggguucgcaccauuuagcaaagauaacuccauucggcugucugccggagguggcaucuggguaacccgcgagcccuaugugucgugcgacccugauaaguguuaccaauucgcgcuagggcagggaacgacucucaauaacguccauucaaaugacaccgugcgagaucguacaccauauagaacucugcuuaugaacgaacugggcguucccuuucacuuggguaccaaacaggugugcauugcuuggagcaguuccucuugucaugacgggaaggccuggcuccacgucugcaucacaggagaugacaagaaugcaaccgccagcuucaucuacaacggcaggcugguggauuccauuguaucauggaguaaagagauacugcggacgcaggaaagcgaguguguuugcaucaauggcacuuguacaguggucaugaccgacgggucugcuuccggaaaggcagauacuaaaauucucuuuaucgaggaagguaagauagugcauacaucaaccuuaagcggcagugcccaacacguggaggaaugcucuugcuauccucgcuacccaggggucagauguguuugcagggacaacuggaagggauccaaccggccgauuguggauaucaauaucaaagaccacagcauuguaucgucuuacguguguuccggccuggucggugacacgccccgcaagaacgauucaaguagcuccucucauugccuugacccuaauaacgaggaagggggacacggcgugaaaggcugggcuuucgaugacgggaaugauguuuggaugggacgaaccaucagcgagaagucaagauuggguuaugagacauuuaaagugauugaaggcuggaguaacccaaaguccaaacugcagauaaauaggcaggucaucguggaccgggggaaccguagcggauacucuggcauuuucucaguagaggguaagaguuguaucaaucgcugcuuuuauguugaacuaaucagagggaggaaggaggaaacugaggugcucuggaccagcaacuccauugucguguucuguggcacaucuggaacuuacggcaccgggucguggcccgauggagccgacauaaaucugaugccuaucuga

SEQ ID NO: 144255 - RNA, 1413 nt, Artificial Sequence; identical to SEQ ID NO: 144119
  derived and/or modified CDS sequence (opt3) from neuraminidase__InfluenzaA__ABW40667

SEQ ID NO: 144256 - RNA, 1413 nt, Artificial Sequence; identical to SEQ ID NO: 144104
  derived and/or modified CDS sequence (opt3) from neuraminidase__InfluenzaA__ABW40678

SEQ ID NO: 144257 - RNA, 1413 nt, Artificial Sequence; identical to SEQ ID NO: 144113
  derived and/or modified CDS sequence (opt3) from neuraminidase__InfluenzaA__ABW71297

SEQ ID NO: 144258 - RNA, 1413 nt, Artificial Sequence; identical to SEQ ID NO: 144119
  derived and/or modified CDS sequence (opt3) from neuraminidase__InfluenzaA__ABW71308

SEQ ID NO: 144259 - RNA, 1413 nt, Artificial Sequence; identical to SEQ ID NO: 144078
  derived and/or modified CDS sequence (opt3) from neuraminidase__InfluenzaA__ABW71319

SEQ ID NO: 144260 - RNA, 1413 nt, Artificial Sequence; identical to SEQ ID NO: 144078
  derived and/or modified CDS sequence (opt3) from neuraminidase__InfluenzaA__ABW71330

SEQ ID NO: 144261 - RNA, 1413 nt, Artificial Sequence
  derived and/or modified CDS sequence (opt3) from neuraminidase__InfluenzaA__ABW71341
augaaccccaaucagaagaucauuaccauaggcagcaucuccauugccaucgggauuaucucucugaugcuccaaauaggaaacaucauuucaaucugggcuagucacagcauucagacagguucccagaaucauacuggcaucugcaaccagagaauaauuacguacgaaaauucuaccugggugaaccacacauaugucucgaucaauaacacuaauguuguggcagggaaagacaagaccucaguaacacuugccggaaacagcagucuguguuccauuucuggcugggcgaucuacaccaaagauaauagcaucaggauugguuccaagggggacguguucgucauacgggagccuuuuaucucaugcagucauuuggagugucgcacuuucuuuuuaacacaaggagcucugcuaaacgauaaacacagcaauggcaccgugaaggaccgaucuccauaucgugcccucauguccugcccgcugggcgaagcacccucaccuuacaacagcaaguucgagaguguugccuggucugcuuccgcaugucaugaugggaugggauggcuuacgauugguaucagcggcccagacaauggggccguggcuguccugaaauauaacggaauaauuacugaaaccaucaagucguggaaaaagagaaucuugaggacacaggagucugagugcguguguguaaacggcuccugcuuuacuauuaugaccgauggucccucaaauggggccgcgaguuacaaaaucuucaagauugaaaagggaaaaguuacaaagagcauagagcucaacgcaccuaauuuucacuaugaagaguguuccugcuacccagacaccggcacggugaugugugucugccgggauaacuggcacggcucuaaucgccccugggugagcuucaaccagaaucuggacuaccagaucggguauauuugcucaggaguguuuggugauaacccuagaccaaaagacggcaaggggaguuguaauccggucacuguugauggagccgacggcgugaaagguuucuccuacaaguaugggaacggcguauggcugggaaggacaaaaagcaaucggcuccgcaagggcuuugagaugaucugggaccccaacggguggaccgauacugacucugauuucucagugaagcaagacgucguggcuaucacagauuggaguggauacagcgguuccuuuguucagcauccugaauuaaccggccuggacugcauucgaccauguuucuggguggagcuugucagaggguugcccagggaaaauacgaccauauggacaucuggaucgagcaucuccuucugcggcguggauucagacacugccaacuggaguuggccugauggugcagagcugccauuuaccauugacaaauga

SEQ ID NO: 144262 - RNA, 1410 nt, Artificial Sequence; identical to SEQ ID NO: 144105
  derived and/or modified CDS sequence (opt3) from neuraminidase__InfluenzaA__ABW71352

SEQ ID NO: 144263 - RNA, 1413 nt, Artificial Sequence; identical to SEQ ID NO: 144119
  derived and/or modified CDS sequence (opt3) from neuraminidase__InfluenzaA__ABW71363

SEQ ID NO: 144264 - RNA, 1413 nt, Artificial Sequence; identical to SEQ ID NO: 144104
  derived and/or modified CDS sequence (opt3) from neuraminidase__InfluenzaA__ABW71374

SEQ ID NO: 144265 - RNA, 1413 nt, Artificial Sequence; identical to SEQ ID NO: 144078
  derived and/or modified CDS sequence (opt3) from neuraminidase__InfluenzaA__ABW71385

SEQ ID NO: 144266 - RNA, 1413 nt, Artificial Sequence
  derived and/or modified CDS sequence (opt3) from neuraminidase__InfluenzaA__ABW71396
augaaccccaaucagaagaucauuaccauaggcagcaucuccauugccaucgggauuaucucucugaugcuccaaauaggaaacaucauuucaaucugggcuagucacagcgugcagacagguucccagaaucauacuggcauuugcaaccagagaaucauaacguacgagaauagcaccugggucaaccacacauauguuaauauuaacaauacuaacgugguagcagggaaagacaagaccucggugacacuugccggaaauucaagccuguguaguaucuccggcugggcgauuuacaccaaagauaacucuaucaggaucgguagcaagggggacgucuucgugauucgggaaccuuuuauauccugcucacauuuggagugucgcacuuucuuuuuaacacaaggagcucugcuaaaugauaaacacaguaacggcaccguuaaggaccgaagcccauaucgugcccucaugucuugcccgcugggcgaagcacccuccccuuacaauucaaaguucgagagcguggccuggagugcuucugcaugucaugaugggaugggauggcuuacgaucgguauuuccggcccagacaacggggccgucgcugugcugaaauauaacggaaucauaacugaaaccauuaagagcuggaaaaagagaaucuugaggacacaggagucggagugcguauguguuaauggcucuugcuuuacuaucaugaccgauggucccuccaacggggccgcgucauacaaaauuuucaagaucgaaaagggaaaagugacaaagaguauugagcucaaugcaccuaacuuucacuaugaagaguguagcugcuacccagacaccggcacggucaugugugugugccgggauaauuggcacggcuccaaccgccccugggugucuuucaaucagaaccuggacuaccaggucggguauauaugcagcggaguuuuuggugauaauccuagaccaaaagacggcaaggggucauguaacccgaugacuguggauggagccgacggcguaaaagguuucaguuacaaguaugggaauggcguguggaucggaaggacaaaauccaacaagcugcggaagggcuuugagaugauuugggaccccaauggguggaccgauacugacagcgauuucucugucaaacaagacgugguugcuaucacagauuggucaggauacagugguagcuuugugcagcauccugaacucaccggcuuagacugcauccgcccauguuucugggucgagcuggugcgagggcuucccagagaaaacgccacgauuuggaccuccggaucuucgauaucuuucugcggcguagauuccgacacagcaaauuggucauggccugauggugcugaguugccauuuacuaucgacaaguga

SEQ ID NO: 144267 - RNA, 1413 nt, Artificial Sequence
  derived and/or modified CDS sequence (opt3) from neuraminidase__InfluenzaA__ABW71407
augaaccccaaucagaagaucauuaccauaggcagcaucuccauugccaucgggauuaucucucugaugcuccaaauaggaaacaucauuucaaucugggcuagucacagcauucagacagguucccagaaucauacuggcaucugcaaccagagaauaauuacguacgaaaauucuaccugggugaaccacacauaugucaauaucaacaauacuaacguuguggcagggaaagacaagaccucgguaacacuugccggaaauucaagccuguguaguauuuccggcugggcgaucuacaccaaagauaacucuaucaggauugguagcaagggggacguguucgucauacgggagccuuuuaucuccugcucacauuuggagugucgcacuuucuuuuuaacacaaggagcucugcuaaaugauaaacacaguaacggcaccgugaaggaccgaagcccauaucgugcccucaugucuugcccgcugggcgaagcacccuccccuuacaauucaaaguucgagagcguugccuggagugcuucugcaugucaugaugggaugggauggcuuacgauugguaucuccggcccagacaacggggccguggcuguccugaaauauaacggaauaauuacugaaaccaucaagagcuggaaaaagagaaucuugaggacacaggagucggagugcguguguguaaauggcucuugcuuuacuauuaugaccgauggucccuccaacggggccgcgucauacaaaaucuucaagauugaaaagggaaaaguuacaaagaguauagagcucaaugcaccuaacuuucacuaugaagaguguagcugcuacccagacaccggcacggugaugugugucugccgggauaauuggcacggcuccaaccgccccugggugucuuucaaucagaaccuggacuaccaggugggguauaucugcagcggagucuuuggugauaauccuagaccaaaagacggcaaggggucauguaacccgaugacuguugauggagccgacggcgugaaagguuucaguuacaaguaugggaauggcguauggauuggaaggacaaaauccaacaagauccggaagggcuuugagaugaucugggaccccaauggguggaccgauacugacagcgauuucucugugaaacaagacgucguggcuauuacagauuggucaggauacagugguagcuuuguucagcauccugaacugaccggccucgacugcauacgcccauguuucuggguggaguuaguccgagggcugcccagagaaaacacgaccaucuggacauccggaucuucgauuagcuucugcggcguggauuccgacacugccaauuggucauggccugauggugcagagcuuccauuuaccaucgacaaguga

SEQ ID NO: 144268 - RNA, 1413 nt, Artificial Sequence; identical to SEQ ID NO: 144104
  derived and/or modified CDS sequence (opt3) from neuraminidase__InfluenzaA__ABW71418

SEQ ID NO: 144269 - RNA, 1413 nt, Artificial Sequence; identical to SEQ ID NO: 144078
  derived and/or modified CDS sequence (opt3) from neuraminidase__InfluenzaA__ABW71440

SEQ ID NO: 144270 - RNA, 1413 nt, Artificial Sequence; identical to SEQ ID NO: 144078
  derived and/or modified CDS sequence (opt3) from neuraminidase__InfluenzaA__ABW71451

SEQ ID NO: 144271 - RNA, 1413 nt, Artificial Sequence; identical to SEQ ID NO: 144113
  derived and/or modified CDS sequence (opt3) from neuraminidase__InfluenzaA__ABW71462

SEQ ID NO: 144272 - RNA, 1410 nt, Artificial Sequence; identical to SEQ ID NO: 142375
  derived and/or modified CDS sequence (opt3) from neuraminidase__InfluenzaA__ABW80980

SEQ ID NO: 144273 - RNA, 1410 nt, Artificial Sequence; identical to SEQ ID NO: 142219
  derived and/or modified CDS sequence (opt3) from neuraminidase__InfluenzaA__ABW80981

SEQ ID NO: 144274 - RNA, 1413 nt, Artificial Sequence
  derived and/or modified CDS sequence (opt3) from neuraminidase__InfluenzaA__ABW81474
augaaccccaaucagaagaucauuaccauaggcagcaucuccguggccauugggaucauuucucugauccuccaaauaggaaacaucauuucaaucugggcuagucacagcauucagacagguucccagaauuacacuggcaucugcaaccagaaaauaauuacguaugagaauagaaccugggucaaccaaacauacguuaauuucaacaauacuaacgugguagcagggaaggacaaaccuucuaugacccuugccggaaauucgucacuguguccaaucaggggcugggcgauuuauacaaaggauaacagcauccggaucgguaguaaaggggacguguuugucauucgcgaaccguucauauccugcucucauuuggagugucgaaccuuuuucuuaacucagggagcucugcuaaaugauaagcacagcaacggcacaaucaaggaccguucccccuuuagagcccucaugucaugcccucugggcgaagcaccaagucccuacaauagcagguucgagucuguggccugguccgcuucagcaugucaugaugggcuuggauggcugaccauugguaucagcggcccugacaacggggccguugcuguguugaaauauaacggaauaauuacggaaacuaucaagaguuggaaaaagcagauccuccggacccaggagucugagugcgucugugugaauggcuccugcuuuacaauuaugacugaugguccaagcaaccgcgccgcgucguacagaaucuucaaaauugaaaaggggaggguaaccaagucuauagagcuggacgcacccaauuaucacuacgaagaguguuccugcuacccugauacaggaaccguuaugugugugugccgggacaacuggcauggcucaaaucgcccaugggucaguuuuaaccaaaaucuggauuaucagaucggcuacauuugcagcgggguguucggagacaacccgcgacccaaagauggugagggcuccuguaauccugugacggucgacggggccgacggaguuaagggcuuuucuuauagauacgguaacgggguguggaucggcaggacuaaaagcaaucggcuccguaagggauucgaaaugaucugggauccaaacggcuggacagacaccgauucagacuuuaguaugaaacaggauguaguggcuaugacugacugguccggguauagcggaucuuucguccagcaccccgaguuaacaggucuggauugcaugcgcccuuguuucuggguggaacuuguuagaggcuugccaagggagaauaccacgauuuggaccucagggaguagcauauccuuuugcggagugaacucugaaacagccaauuggucguggcccgacggcgcagagcugccguucacuaucgauaaguga

SEQ ID NO: 144275 - RNA, 1413 nt, Artificial Sequence
  derived and/or modified CDS sequence (opt3) from neuraminidase__InfluenzaA__ABW81475
augaaccccaaucagaagaucauuaccauaggcagcaucuccauugccaucgggauuaucucucugaugcuccaaauaggaaacaucauuucaaucugggcuagucacagcauucagacagguucccagaaucauacuggcaucugcaaccagagaauaauuacguacgaaaauucuaccugggugaaccacacauaugucaauaucaacaauacuaacguuguggcagggaaagacaagucgucaguaacccuugccggaaauagcagucuguguuccauuucuggcugggcgaucuacacaaaagauaacagcaucaggauugguuccaagggggacguguucgucauacgggagccuuuuaucucaugcagucauuuggagugucgcaccuucuuuuuaacucaaggagcucugcuaaaugauaaacacagcaacggcacagugaaggaccgaucuccauaucgugcccucauguccugcccgcugggcgaagcacccucaccuuacaauagcaaguucgagaguguugccuggucugcuuccgcaugucaugaugggaugggauggcuuaccauugguaucagcggcccagacaacggggccguggcuguccugaaauauaacggaauaauuacggaaacuaucaagucguggaaaaagagaaucuugaggacccaggagucugagugcguguguguaaauggcuccugcuuuacaauuaugacugauggucccucaaacggggccgcgaguuacaaaaucuucaagauugaaaagggaaaaguuaccaagagcauagagcucaaugcaccuaacuuucacuaugaagaguguuccugcuacccagacacaggcaccgugaugugugucugccgggauaauuggcacggcucuaaccgccccugggugagcuucaaucagaaccuggacuaccagaucggguauauuugcucaggaguguuuggugauaauccuagaccaaaagacggcgaggggaguuguaacccggucacgguugauggagccgacggcgugaaggguuucuccuacaaauaugggaauggcguauggaucggaaggacuaagagcaaccggcugcgcaaaggcuuugaaaugaucugggaccccaauggguggacagauaccgacucugauuucucacucaagcaagacguggucgcuauuacugauuggaguggauacagcgguuccuuugugcagcauccugaguuaacaggccuggacugcauacgaccauguuucuggguugaacuugugagaggguugcccagggagaacaccacgaucuggaccucuggaucgagcauuuccuucugcggcgucaauucagauacagccaacuggaguuggccugacggugcagaacugccauuuacuaucgauaaguga

SEQ ID NO: 144276 - RNA, 1413 nt, Artificial Sequence
  derived and/or modified CDS sequence (opt3) from neuraminidase__InfluenzaA__ABW81477
augaaccccaaucagaagaucauuaccauaggcagcaucuccauugccaucgggauuaucucucugaugcuccaaauaggaaacaucauuucaaucugggcuagucacagcauucagacagguucccagaaucauacuggcgugugcaaccagagaaucauaacguacgaaaauucuaccugggugaaccacacauauguuaauauuaacaauacuaacgugaucgcagggaaagacaagaccucgguaacacuugccggaaauucaagccuguguaguauuuccggcugggcgaucuacaccaaagauaacucuaucaggauugguagcaagggggacguguucgucauacgggagccuuuuaucuccugcucacauuuggagugucgcacuuucuuuuuaacacaaggagcucugcuaaaugauaaacacaguaacggcaccgugaaggaccgaagcccauaucgugcccucaugucuugcccgcugggcgaagcacccuccccuuacaauucaaaguucgagagcguugccuggagugcuucugcaugucaugaugggaugggauggcuuacgauugguaucuccggcccagacaacggggccguggcuguccugaaauauaacggaauaauuacugaaaccaucaagagcuggaaaaagcagaucuugagaacacaggagucggagugcguguguguaaauggcucuugcuuuacuauuaugaccgauggucccuccaacggggccgcgucauacaaaaucuucaagauugaaaagggaaaaguuacaaagaguauagagcucagcgcaccuaauuuucacuaugaagaguguuccugcuacccagacaccggcacggugaugugugucugcagggauaacuggcacggcucuaaucggcccugggugagcuucaaccagaaucuggacuaccaaaucggguauauuugcucaggaguguuuggugauaacccucgcccaaaagacggcgaggggaguuguaauccggucacuguugauggagccaacggcgugaaggguuucuccuacaaauaugggaauggcguauggaucggaagaacaaagagcaacaggcugcggaaaggcuuugaaaugaucugggaccccaauggguggccugacaccgauucugacuucucagugaagcaggaugucguggcuauuacugacuggaguggauacagcgguuccuuuguucagcauccagagcucacaggcuuagauugcauacgccccuguuucuggguggaacugguccgagggcuuccuaaggagaacaccacgaucuggaccucuggaucgagcauuuccuucugcggcgucaauucagacacagccaacuggaguuggccagauggugcagaauugcccuuuacuaucgacaaauga

SEQ ID NO: 144277 - RNA, 1413 nt, Artificial Sequence
  derived and/or modified CDS sequence (opt3) from neuraminidase__InfluenzaA__ABW81478
augaaccccaaucagaagaucauuaccauaggcagcaucuccauugccaucgggauuaucucucugaugcuccaaauaggaaacaucauuucaaucugggcuagucacagcauucagacagguucccagaaucauacuggcaucugcaaccagagaauaauuacguacgaaaauucuaccugggugaaccacacauaugucaauaucaacaauacuaacguuguggcagggaaagacaagaccucgguaacacuugccggaaauucaagccuguguaguauuuccggcugggcgaucuacaccaaagauaacucuaucaggauugguagcaagggggacguguucgucauacgggagccuuuuaucuccugcucacauuuggagugucgcacuuucuuuuuaacacaaggagcucugcuaaaugauaaacacaguaacggcaccgugaaggaccgaagcccauaucgugcccucaugucuugcccgcugggcgaagcacccuccccuuacaauucaaaguucgagagcguugccuggagugcuucugcaugucaugaugggaugggauggcuuacgauugguaucuccggcccagacaacggggccguggcuguccugaaauauaacggaauaauuacugaaaccaucaagagcuggaaaaagagaaucuugaggacacaggagucggagugcguguguguaaauggcucuugcuuuacuauuaugaccgauggucccuccaacggggccgcgucauacaaaaucuucaagauugaaaagggaaaaguuacaaagaguauagagcucaaugcaccuaacuuucacuaugaagaguguagcugcuacccagacaccggcacggugaugugugucugccgggauaauuggcacggcuccaaccgccccugggugucuuucaaucagaaccuggacuaccagaucggguauauuugcagcggaguguuuggugauaauccuagaccaaaagacggcgaggggucauguaacccggucacuguugauggagccgacggcgugaaggguuucaguuacaaauaugggaauggcguauggaucggaaggacaaagaacaaucggcugcgcaaaggcuuugaaaugaucugggaccccaacggguggaccgauacugacuccgauuucagcgugaagcaagacgucguggcuauuacagauuggucuggauacucagguaguuuuguucagcauccugagcucaccggcuuagacugcauacgaccauguuucuggguggaacuggucagagggcuucccagggagaauacgaccaucuggacaagcggauccucuauuucguucugcggcgugaacagcgauacugccaacugguccuggccugacggugcagaauugccauuuaccaucgauaaguga

SEQ ID NO: 144278 - RNA, 1413 nt, Artificial Sequence
  derived and/or modified CDS sequence (opt3) from neuraminidase__InfluenzaA__ABW81479
augaaccccaaucagaagaucauuaccauaggcagcaucuccguggccauugggaucauuucucugauccuccaaauaggaaacaucauuucaaucugggcuagucacagcauucagacagguucccagaauuacacuggcaucugcaaccagaaaauaauuacguaugagaauagaaccugggucaaccaaacauacguuaauaucaacaauacuaacgugguagcagggaaggacaaaccuucuaugacccuugccggaaauucgucacuguguccaauuaggggcugggcgaucuauacaaaggauaacagcauccggauugguaguaaaggggacguguucgucauacgcgaaccguuuaucuccugcucucauuuggagugucgaaccuucuuuuuaacucagggagcucugcuaaaugauaagcacagcaacggcacaauuaaggaccguucccccuucagagcccucaugucaugcccucugggcgaagcaccaagucccuacaauagcagguuugagucuguggccugguccgcuucagcaugucaugaugggcuuggauggcugaccaucgguauaagcggcccugacaacggggccguugcuguguugaaauauaacggaauuaucacggaaacuaucaagaguuggaaaaagcagauucuccggacccaggagucugagugcgucugugugaauggcuccugcuucacaaucaugacugaugguccaagcaaccgcgccgcgucguacagaauuuuuaaaauagaaaaggggaggguaaccaagucuaucgagcuggacgcacccaauuaucacuacgaagaguguuccugcuacccugauacaggaaccguuaugugugugugccgggacaacuggcauggcucaaaucgcccaugggucaguuucaaccaaaaucuggauuaucagauuggcuacaucugcagcgggguguuuggagacaacccgcgacccaaagauggugagggcuccuguaauccugugacggucgacggggccgacggaaucaagggcuucucuuauagauacgguaacgggguuuggauuggcaggacuaaaagcaaucggcuccguaagggauuugaaaugauaugggauccaaacggcuggacagacaccgauucagacuucaguaugaaacaggaugugguagcuaugacugacugguccggguauagcggaucuuuugugcagcaccccgaguuaacaggucuggauugcaugcgcccuuguuucugggucgaacuugugagaggcuugccaagggagaauaccacgaucuggaccucagggaguagcauuuccuucugcggaguuaacucugaaacagccaauuggucguggcccgacggcgcagagcugccguuuacuaucgauaaguga

SEQ ID NO: 144279 - RNA, 1413 nt, Artificial Sequence; identical to SEQ ID NO: 142444
  derived and/or modified CDS sequence (opt3) from neuraminidase__InfluenzaA__ABW81480

SEQ ID NO: 144280 - RNA, 1413 nt, Artificial Sequence
  derived and/or modified CDS sequence (opt3) from neuraminidase__InfluenzaA__ABW81481
augaaccccaaucagaagaucauuaccauaggcagcaucuccguggccauugggaucauuucucugauccuccaaauaggaaacaucauuucaaucugggcuagucacagcauucagacagguucccagaauuacacuggcaucugcaaccagaaaauaauuacguaugagaauagaaccugggucaaccaaacauacguuaauaucaacaauacuaacgugguagcagggaaggacaaaccuucuaugacccuugccggaaauucgucacuguguccaauuaggggcugggcgaucuauacaaaggauaacagcauccggauugguaguaaaggggacguguucgucauacgcgaaccguuuaucuccugcucucauuuggagugucgaaccuucuuuuuaacucagggagcucugcuaaaugauaagcacagcaacggcacaauuaaggaccguucccccuucagagcccucaugucaugcccucugggcgaagcaccaagucccuacaauagcagguuugagucuguggccugguccgcuucagcaugucaugaugggcuuggauggcugaccaucgguauaagcggcccugacaacggggccguugcuguguugaaauauaacggaauuaucacggaaacuaucaagaguuggaaaaagcagauucuccggacccaggagucugagugcgucugugugaauggcuccugcuucacaaucaugacugaugguccaagcaaccgcgccgcgucguacagaauuuuuaaaauagaaaaggggaggguaaccaagucuaucgagcuggacgcacccaauuaucacuacgaagaguguuccugcuacccugauacaggaaccguuaugugugugugccgggacaacuggcauggcucaaaucgcccaugggucaguuucaaccaaaaucuggauuaucagauuggcuacaucugcagcgggguguuuggagacaacccgcgacccaaagauggugagggcuccuguaauccugugacggucgacggggccgacggaguuaagggcuucucuuauagauacgguaacgggguguggaucggcaggacuaaaagcaaucggcuccguaagggauuugaaaugauuugggauccaaacggcuggacagacaccgauucagacuucaguaugaaacaggauguaguggcuaugacugacugguccggguauagcggaucuuuuguccagcaccccgaguuaacaggucuggauugcaugcgcccuuguuucuggguggaacuuguuagaggcuugccaagggagaauaccacgauauggaccucagggaguagcaucuccuucugcggagugaacucugaaacagccaauuggucguggcccgacggcgcagagcugccguuuacuauugauaaguga

SEQ ID NO: 144281 - RNA, 1413 nt, Artificial Sequence
  derived and/or modified CDS sequence (opt3) from neuraminidase__InfluenzaA__ABW81482
augaaccccaaucagaagaucauuaccauaggcagcaucuccguggccauugggaucauuucucugauccuccaaauaggaaacaucauuucaaucugggcuagucacagcauucagacagguucccagaauuacacuggcaucugcaaccagaaaauaauuacguaugagaauagaaccugggucaaccaaacauacguuaauaucaacaauacuaacgugguagcagggaaggacaaaccuucuaugacccuugccggaaauucgucacuguguccaauuaggggcugggcgaucuauacaaaggauaacagcauccggauugguaguaaaggggacguguucgucauacgcgaaccguuuaucuccugcucucauuuggagugucgaaccuucuuuuuaacucagggagcucugcuaaaugauaagcacagcaacggcacaauuaaggaccguucccccuucagagcccucaugucaugcccucugggcgaagcaccaagucccuacaauagcagguuugagucuguggccugguccgcuucagcaugucaugaugggcuuggauggcugaccaucgguauaagcggcccugacaacggggccguugcuguguugaaauauaacggaauuaucacggaaacuaucaagaguuggaaaaagcagauucuccggacccaggagucugagugcgucugugugaauggcuccugcuucacaaucaugacugaugguccaagcaaccgcgccgcgucguacagaauuuuuaaaauagaaaaggggaggguaaccaagucuaucgagcuggacgcacccaauuaucacuacgaagaguguuccugcuacccugauacaggaaccguuaugugugugugccgggacaacuggcauggcucaaaucgcccaugggucaguuucaaccaaaaucuggauuaucagauuggcuacaucugcagcgggguguuuggagacaacccgcgacccaaagauggugagggcuccuguaauccugugacggucgacggggccgacggaguuaagggcuucucuuauagauacgguaacgggguguggaucggcaggacuaaaagcaaucggcuccguaagggauuugaaaugauuugggauccaaacggcuggacagacaccgauucagacuucaguaugaaacaggauguaguggcuaugacugacugguccggguauagcggaucuuuuguccagcaccccgaguuaacaggucuggccugcaugcgcccuuguuucuggguggaacuuguuagaggcuugccaagggagaauaccacgauauggaccucagggaguagcaucuccuucugcggagugaacucugaaacagcaaauuggucguggcccgauggcgcugagcugccguuuacuauugacaaguga

SEQ ID NO: 144282 - RNA, 1413 nt, Artificial Sequence; identical to SEQ ID NO: 142434
  derived and/or modified CDS sequence (opt3) from neuraminidase__InfluenzaA__ABW81483

SEQ ID NO: 144283 - RNA, 1413 nt, Artificial Sequence
  derived and/or modified CDS sequence (opt3) from neuraminidase__InfluenzaA__ABW81484
augaaccccaaucagaagaucauuaccauaggcagcaucuccauugccaucgggauuaucucucugaugcuccaaauaggaaacaucauuucaaucugggcuagucacagcauucagacagguaaucagaaccauacuggcaucugcaaucagagaauaauuacguacgagaacuccaccugggugaaucacacauaugucaacaucaauaacacuaauguuguggcagggaaaggaaagaccucuguaacacuugccggcaacucgucacuguguagcauuagugguugggcgaucuacaccaaagacaauuccaucaggauugggucuaagggagauguguucgucauacgggaaccuuuuaucagcugcucccauuuggagugucgcacuuucuuuuuaacacaaggcgcucugcuaaacgacaaacacucaaauggcaccgugaaggaucgaaguccauaucgugcccucaugagcugcccgcugggggaagcacccucuccuuacaacuccaaguucgagucaguugccuggagcgcuagugcaugucaugacggaauggguuggcuuacgauuggcaucucugggccagauaacggagccguggcuguccugaaauauaauggcauaauuacugaaaccaucaaguccuggaaaaagagaaucuugaggacacaggagagcgagugcguguguguaaacgguucgugcuuuacuauuaugaccgacgggcccucuaauggagccgcguccuacaaaaucuucaagauugaaaagggcaaaguuacaaagucaauagagcucaacgcaccuaauuuucacuaugaagaguguaguugcuacccagauaccggcacggugaugugugucugccgggacaacuggcacgggagcaaucgccccuggguguccuucaaccagaaucuggauuaccagaucggauauauuugcucugguguguuuggcgacaacccuagaccaaaagaugggaagggaagcuguaauccggucacuguugacggcgccgauggugugaaaggguucucauacaaguauggcaacggaguauggaucggcaggacaaaaaguaaucggcugcgcaagggguuugagaugaucugggaccccaacggauggaccgacacugauuccgacuucagcgugaagcaagaugucguggcuauuacagacuggucugguuacucaggcaguuuuguucagcauccugaacucaccggguuagauugcauacgaccauguuucuggguggagcuggucagaggacuucccagggaaaauacgaccaucuggacaagcggcuccucuauuucguucugcgguguggacagcgauacugccaacugguccuggccugacggggcagaguugccauuuaccaucgauaaauga

SEQ ID NO: 144284 - RNA, 1413 nt, Artificial Sequence
  derived and/or modified CDS sequence (opt3) from neuraminidase__InfluenzaA__ABW81487
augaaccccaaucagaagaucauuaccauaggcagcaucuccauugccaucgggauuaucucucugaugcuccaaauaggaaacaucauuucaaucugggcuagucacagcauucagacagguucccagaaucauacuggcaucugcaaccagagaauaauuacguacgaaaauucuaccugggugaaccacacauaugucaauaucaacaauacuaacguuguggcagggaaagacaagaccucgguaacacuugccggaaauucaagccuguguaguauuuccggcugggcgaucuacaccaaagauaacucuaucaggauugguagcaagggggacguguucgucauacgggagccuuuuaucuccugcucacauuuggagugucgcacuuucuuuuuaacacaaggagcucugcuaaaugauaaacacaguaacggcaccgugaaggaccgaagcccauaucgugcccucaugucuugcccgcugggcgaagcacccuccccuuacaauucaaaguucgagagcguugccuggagugcuucugcaugucaugaugggaugggauggcuuacgauugguaucuccggcccagacaacggggccguggcuguccugaaauauaacggaauaauuacugaaaccaucaagagcuggaaaaagagaaucuugaggacacaggagucggagugcguguguguaaauggcucuugcuuuacuauuaugaccgauggucccuccaacggggccgcgucauacaaaaucuucaagauugaaaagggaaaaguuacaaagaguauagagcucaaugcaccuaacuuucacuaugaagaguguagcugcuacccagacaccggcacggugaugugugucugccgggauaauuggcacggcuccaaccgccccugggugucuuucaaucagaaccuggacuaccagaucggguauauuugcagcggaguguuuggugauaauccuagaccaaaagacggcaaggggucauguaacccggucacuguugauggagccgacggcgugaaagguuucaguuacaaguaugggaauggcguauggaucggaaggacaaaauccaaccggcugcgcaagggcuuugagaugaucugggaccccaauggguggaccgauacugacagcgauuucucugugaagcaagacgucguggcuauuacagauuggucaggauacagugguagcuuuauacagcauccugaacucaccggcuuagacugcauccgaccauguuucuggguugagcuggugagagggcuucccagggaaaacacgaccauuuggacauccggaucuucgaucagcuucugcggcgucgauuccgacacugccaauuggucauggccugauggugcagaguugccauuuaccauugacaaauga

SEQ ID NO: 144285 - RNA, 1413 nt, Artificial Sequence; identical to SEQ ID NO: 142434
  derived and/or modified CDS sequence (opt3) from neuraminidase__InfluenzaA__ABW81488

SEQ ID NO: 144286 - RNA, 1413 nt, Artificial Sequence; identical to SEQ ID NO: 142434
  derived and/or modified CDS sequence (opt3) from neuraminidase__InfluenzaA__ABW81489

SEQ ID NO: 144287 - RNA, 1413 nt, Artificial Sequence
  derived and/or modified CDS sequence (opt3) from neuraminidase__InfluenzaA__ABW81490
augaaccccaaucagaagaucauuaccauaggcagcaucuccauugccaucgggauuaucucucugaugcuccaaauaggaaacaucauuucaaucugggcuagucacagcauucagacagguucccagaaucauacuggcaucugcaaccagagaauaauuacguacgaaaauucuaccugggugaaccacacauaugucaauaucaacaauacuaacguuguggcagggaaagacaagaccucgguaacacuugccggaaauucaagccuguguaguauuuccggcugggcgaucuacaccaaagauaacucuaucaggauugguagcaagggggacguguucgucauacgggagccuuuuaucuccugcucacauuuggaguguaaaacuuucuuuuuaacacaaggagcucugcuaaaugauaagcacaguaacggcaccgugaaggaccgcagcccauaucgagcccucaugucuugcccgcugggcgaagcacccuccccuuacaauucaaaauucgagagcguugccuggagugcuucugcaugucaugaugggaugggauggcuuacgauugguaucuccggcccagacaacggggccguggcuguccugaaguauaacggaauaauuacugaaaccaucaaaagcuggaagaaacguaucuugagaacacaggagucggagugcguguguguaaauggcucuugcuuuacuauuaugaccgauggucccuccaacggggccgcgucauacaagaucuucaagauugaaaaaggaaagguuacaaaaaguauagagcucaaugcaccuaacuuucacuaugaagaguguagcugcuacccagacaccggcacggugaugugugucugcagggauaauuggcacggcuccaaccggcccugggugucuuucaaucagaaccuggacuaccagaucggguauauuugcagcggaguguuuggugauaauccucgcccaaaggacggcaaagggucauguaacccggucacuguugauggagccgacggcgugaaggguuucaguuacaaauaugggaauggcguauggaucggaagaacaaaguccaacaggcugcggaagggcuuugagaugaucugggaccccaauggguggaccgauacugacagcgauuucucugugaaacaagacgucguggcuauuacagauuggucaggauacagugguagcuuuguucagcauccugaacucaccggcuuagacugcauacgcccauguuucuggguggagcugguccgagggcuucccagagaaaacacgaccaucuggacauccggaucuucgauuagcuucugcggcguggauuccgacacugccaauuggucauggccugauggugcagaguugccauuuaccaucgacaaguga

SEQ ID NO: 144288 - RNA, 1413 nt, Artificial Sequence
  derived and/or modified CDS sequence (opt3) from neuraminidase__InfluenzaA__ABW81491
augaaccccaaucagaagaucauuaccauaggcagcaucuccauugccaucgggauuaucucucugaugcuccaaauaggaaacaucauuucaaucugggcuagucacagcauucagacagguucccagaaucauacuggcaucugcaaccagagaauaauuacguacgaaaauucuaccugggugaaccacacauaugucaauaucaacaauacuaacguuguggcagggaaagacaagaccucgguaacacuugccggaaauucaagccuguguaguauuuccggcugggcgaucuacaccaaagauaacucuaucaggauugguagcaagggggacguguucgucauacgggagccuuuuaucuccugcucacauuuggagugucgcacuuucuuuuuaacacaaggagcucugcuaaaugauaaacacaguaacggcaccgugaaggaccgaagcccauaucgugcccucaugucuugcccgcugggcgaagcacccuccccuuacaauucaaaguucgagagcguugccuggagugcuucugcaugucaugaugggaugggauggcuuacgauugguaucuccggcccagacaacggggccguggcuguccugaaauauaacggaauaauuacugaaaccaucaagagcugggagaaaagaaucuugaggacacaggagucggaaugcguguguguaaauggcucuugcuuuacuauuaugaccgauggucccuccaacggggccgcgucauacaagaucuucaaaauugagaagggaaagguuacaaaaaguauagaacucaaugcaccuaacuuucacuaugaggaguguagcugcuacccagacaccggcacggugaugugugucugccgggauaauuggcacggcuccaaccgccccugggugucuuucaaucagaaccuggacuaccagaucggguauauuugcagcggaguguuuggugauaauccuagaccaaaggacggcaaagggucauguaacccggucacuguugauggagccgacggcgugaaggguuucaguuacaaauaugggaauggcguauggaucggaaggacaaaguccaaccggcugcgcaaaggcuuugaaaugaucugggaccccaauggguggaccgauacugacagcgauuucucugugaagcaagacgucguggcuauuacagauuggucaggauacagugguagcuuuguucagcauccugagcucaccggcuuagacugcauacgaccauguuucuggguggaacuggucagagggcuucccagggagaacacgaccaucuggacauccggaucuucgauuagcuucugcggcguggauuccgacacugccaauuggucauggccugauggugcagaauugccauuuaccaucgacaaguga

SEQ ID NO: 144289 - RNA, 1413 nt, Artificial Sequence
  derived and/or modified CDS sequence (opt3) from neuraminidase__InfluenzaA__ABW81492
augaaccccaaucagaagaucauuaccauaggcagcaucuccauugccaucgggauuaucucucugaugcuccaaauaggaaacaucauuucaaucugggcuagucacagcauucagacagguucccagaaucauacuggcaucugcaaccagagaauaauuacguacgaaaauucuaccugggugaaccacacauaugucaauaucaacaauacuaacguuguggcagggaaagacaagaccucgguaacacuugccggaaauucaagccuguguaguauuuccggcugggcgaucuacaccaaagauaacucuaucaggauugguagcaagggggacguguucgucauacgggagccuuuuaucuccugcucacauuuggagugucgcacuuucuuuuuaacacaaggagcucugcuaaaugauaaacacaguaacggcaccgugaaggaccgaagcccauaucgugcccucaugucuugcccgcugggcgaagcacccuccccuuacaauucaaaguucgagagcguugccuggagugcuucugcaugucaugaugggaugggauggcuuacgauugguaucuccggcccagacaacggggccguggcuguccugaaauauaacggaauaauuacugaaaccaucaagagcuggaaaaagagaaucuugaggacacaggagucggagugcguguguguaaauggcucuugcuuuacuauuaugaccgauggucccuccaacggggccgcgucauacaaaaucuucaagauugaaaagggaaaaguuacaaagaguauagagcucaaugcaccuaacuuucacuaugaagaguguagcugcuacccagacaccggcacggugaugugugucugccgggauaauuggcacggcuccaaccgccccugggugucuuucaaucagaaccuggacuaccagaucggguauauuugcagcggaguguuuggugauaauccuagaccaaaagacggcaaggggucauguaacccggucacuguugauggagccgacggcgugaaagguuucaguuacaaguaugggaauggcguauggaucggaaggacaaaauccaaccggcugcgcaagggcuuugagaugaucugggaccccaauggguggaccgauacugacagcgauuucucugugaagcaagacgucguggcuauuacagauuggucaggauacagugguagcuuuguucagcauccugaacucaccggcuuagacugcauacgaccauguuucuggguggagcuggucagagggcuucccagggaaaacacgaccaucugggccuccggaucuucgauuagcuucugcggcguggauuccgacacagcaaauuggucauggccugauggugcugaguugccauuuacuaucgacaaauga

SEQ ID NO: 144290 - RNA, 1413 nt, Artificial Sequence; identical to SEQ ID NO: 142434
  derived and/or modified CDS sequence (opt3) from neuraminidase__InfluenzaA__ABW81493

SEQ ID NO: 144291 - RNA, 1413 nt, Artificial Sequence; identical to SEQ ID NO: 142434
  derived and/or modified CDS sequence (opt3) from neuraminidase__InfluenzaA__ABW81494

SEQ ID NO: 144292 - RNA, 1413 nt, Artificial Sequence; identical to SEQ ID NO: 142434
  derived and/or modified CDS sequence (opt3) from neuraminidase__InfluenzaA__ABW81495

SEQ ID NO: 144293 - RNA, 1413 nt, Artificial Sequence; identical to SEQ ID NO: 144288
  derived and/or modified CDS sequence (opt3) from neuraminidase__InfluenzaA__ABW81497

SEQ ID NO: 144294 - RNA, 1413 nt, Artificial Sequence
  derived and/or modified CDS sequence (opt3) from neuraminidase__InfluenzaA__ABW81498
augaaccccaaucagaagaucauuaccauaggcagcaucuccauugccaucgggauuaucucucugaugcuccaaauaggaaacaucauuucaaucugggcuagucacagcauucagacagguucccagaaucauacuggcaucugcaaccagagaauaauuacguacgaaaauucuaccugggugaaccacacauaugucaauaucaacaauacuaacguuguggcagggaaagacaagaccucgguaacacuugccggaaauucaagccuguguaguauuuccggcugggcgaucuacaccaaagauaacucuaucaggauugguagcaagggggacguguucgucauacgggagccuuuuaucuccugcucacauuuggagugucgcacuuucuuuuuaacacaaggagcucugcuaaaugauaaacacaguaacggcaccgugaaggaccgaagcccauaucgugcccucaugucuugcccgcugggcgaagcacccuccccuuacaauucaaaguucgagagcguugccuggagugcuucugcaugucaugaugggaugggauggcuuacgauugguaucuccggcccagacaacggggccguggcuguccugaaauauaacggaauaauuacugaaaccaucaagagcugggagaaaagaaucuugaggacacaggagucggaaugcguguguguaaauggcucuugcuuuacuauuaugaccgauggucccuccaacggggccgcgucauacaagaucuucaaaauugagaagggaaagguuacaaaaaguauagaacucaaugcaccuaacuuucacuaugaggaguguagcugcuacccagacaccggcacggugaugugugucugccgggauaauuggcacggcuccaaccgccccugggugucuuucaaucagaaccuggacuaccaggugggguauaucugcagcggagucuuuggugauaauccuagaccaaaggacggcaaagggucauguaacccgguuacuguggauggagccgacggcguaaaggguuucaguuacaaauaugggaauggcguguggauuggaaggacaaaguccaaccggcugcgcaaaggcuuugaaaugaucugggaccccaauggguggaccgauacugacagcgauuucucugucaagcaagacgugguugcuaucacagauuggucaggauacagugguagcuuugugcagcauccugagcucaccggcuuagacugcauucgaccauguuucugggucgaacuggugagagggcuucccagggagaacacgaccauauggacauccggaucuucgaucagcuucugcggcguagauuccgacacugccaauuggucauggccugauggugcagaauugccauuuaccauugacaaguga

SEQ ID NO: 144295 - RNA, 1413 nt, Artificial Sequence
  derived and/or modified CDS sequence (opt3) from neuraminidase__InfluenzaA__ABW81499
augaaccccaaucagaagaucauuaccauaggcagcaucuccauugccaucgggauuaucucucugaugcuccaaauaggaaacaucauuucaaucugggcuagucacagcauucagacagguucccagaaucauacuggcaucugcaaccagagaauaauuacguacgaaaauucuaccugggugaaccacacauaugucaauaucaacaauacuaacguuguggcagggagggacaaaaccucgguaacacuugccggaaauucaagccuguguaguauuuccggcugggcgaucuacaccaaggauaacucuauccggauugguagcaaaggggacguguucgucauacgcgagccuuuuaucuccugcucacauuuggagugucgaacuuucuuuuuaacacaaggagcucugcuaaaugauaagcacaguaacggcaccgugaaagaccguagcccauauagagcccucaugucuugcccgcugggcgaagcacccuccccuuacaauucaaaguucgagagcguugccuggagugcuucugcaugucaugaugggaugggauggcuuacgauugguaucuccggcccagacaacggggccguggcuguccugaaguauaacggaauaauuacugaaaccaucaaaagcuggaagaaaaggaucuugcggacacaggagucggagugcguguguguaaauggcucuugcuuuacuauuaugaccgauggucccuccaacggggccgcgucauacaagaucuucaaaauugaaaagggaaagguuacaaaaaguauagagcucaaugcaccuaacuuucacuaugaagaguguagcugcuacccagacaccggcacggugaugugugucugccgcgauaauuggcacggcuccaacagacccugggugucuuucaaucagaaccuggacuaccagaucggguauauuugcagcggaguguuuggugauaauccuaggccaaaggacggcaaagggucauguaacccggucacuguugauggagccgacggcgugaaggguuucaguuacaaauaugggaauggcguauggaucggacggacaaaguccaaccgccugcgaaaaggcuuugagaugaucugggaccccaauggguggaccgauacugacagcgauuucucugugaagcaagacgucguggcuauuacagauuggucaggauacagugguagcuuuguucagcauccugaacucaccggcuuagacugcauaagaccauguuucuggguggagcuggucagggggcuuccccgggaaaacacgaccaucuggacauccggaucuucgauuagcuucugcggcguggauuccgacacugccaauuggucauggccugauggugcagaguugccauuuaccaucgacaaguga

SEQ ID NO: 144296 - RNA, 1413 nt, Artificial Sequence
  derived and/or modified CDS sequence (opt3) from neuraminidase__InfluenzaA__ABW81500
augaaccccaaucagaagaucauuaccauaggcagcaucuccauugccaucgggauuaucucucugaugcuccaaauaggaaacaucauuucaaucugggcuagucacagcauucagacagguucccagaaucauacuggcaucugcaaccagagaauaauuacguacgaaaauucuaccugggugaaccacacauaugucaauaucaacaauacuaacguuguggcagggaaagacaagaccucgguaacacuugccggaaauucaagccuguguaguauuuccggcugggcgaucuacaccaaagauaacucuaucaggauugguagcaagggggacguguucgucauacgggagccuuuuaucuccugcucacauuuggagugucgcacuuucuuuuuaacacaaggagcucugcuaaaugauaaacacaguaacggcaccgugaaggaccgaagcccauaucgugcccucaugucuugcccgcugggcgaagcacccuccccuuacaauucaaaguucgagagcguugccuggagugcuucugcaugucaugaugggaugggauggcuuacgauugguaucuccggcccagacaacggggccguggcuguccugaaauauaacggaauaauuacugaaaccaucaagagcuggaaaaagagaaucuugaggacacaggagucggagugcguguguguaaauggcucuugcuuuacuauuaugaccgauggucccuccaacggggccgcgucauacaaaaucuucaagauugaaaagggaaaaguuacaaagaguauagagcucaaugcaccuaacuuucacuaugaagaguguagcugcuacccagacaccggcacggugaugugugucugccgggauaauuggcacggcuccaaccgccccugggugucuuucaaucagaaccuggacuaccagaucggguauauuugcagcggaguguuuggugauaauccuagaccaaaagacggcaaggggucauguaacccggucacugccgauggagcugacggcguuaaagguuucaguuacaaguaugggaauggcguguggaucggaaggacaaaauccaaccggcugcgcaagggcuuugagaugaucugggaccccaauggguggaccgauacugacagcgauuucucuguaaagcaagacguggucgccauuacagauuggucaggauacagugguagcuuugugcagcauccugaacucaccggcuuagacugcauacgaccauguuucuggguugagcuggugagagggcuucccagggaaaacacgaccaucuggacauccggaucuucgauuagcuucugcggcgucgauuccgacacugcaaauuggucauggccugauggugcugaguugccauuuaccaucgacaaauga

SEQ ID NO: 144297 - RNA, 1413 nt, Artificial Sequence
  derived and/or modified CDS sequence (opt3) from neuraminidase__InfluenzaA__ABW81501
augaaccccaaucagaagaucauuaccauaggcagcaucuccauugccaucgggauuaucucucugaugcuccaaauaggaaacaucauuucaaucugggcuagucacagcauucagacagguucccagaaucauacuggcaucugcaaccagaaaauaauuacguacgaaaauucuaccugggugaaccacacauaugucaauaucaacaauacuaacguuguggcagggaaggacaaaaccucgguaacacuugccggaaauucaagccuguguaguguguccggcugggcgauuuacaccaaggauaacucuaucagaaucgguagcaaaggggacgucuucgugauuagggagccuuuuauauccugcucacauuuggagugucggacuuucuuuuuaacacaaggagcucugcuaaaugauaagcacaguaacggcaccguuaaggaccgcagcccauaucgagcccucaugucuugcccgcugggcgaagcacccuccccuuacaauucaaaauucgagagcguggccuggagugcuucugcaugucaugaugggaugggauggcuuacgaucgguauuuccggcccagacaacggggccgucgcugugcugaaguauaacggaaucauaacugaaaccauuaaaagcuggaagaaacguaucuugagaacacaggagucggagugcguauguguuaauggcucuugcuuuacuaucaugaccgauggucccuccaacggggccgcgucauacaagauuuucaagaucgaaaaaggaaaggugacaaaaaguauugagcucaaugcaccuaacuuucacuaugaagaguguagcugcuacccagacaccggcacggucaugugugugugcagggauaauuggcacggcuccaaccggcccugggugucuuucaaucagaaccuggacuaccagauaggguauaucugcagcggagucuuuggugauaauccucgcccaaaggacggcaaagggucauguaacccgguuacuguggauggagccgacggcguaaaggguuucaguuacaaauaugggaauggcguguggauuggaagaacaaaguccaacaggcugcggaagggcuuugagaugaucugggaccccaauggguggaccgauacugacagcgauuucucugucaaacaagacgugguugcuaucacagauuggucaggauacagugguagcuuugugcagcauccugaacucaccggcuuagacugcauucgcccauguuucugggucgagcuggugcgagggcuucccagagaaaacacgaccauauggacauccggaucuucgaucagcuucugcggcguagauuccgacacugccaauuggucauggccugauggugcagaguugccauuuaccauugacaaguga

SEQ ID NO: 144298 - RNA, 1413 nt, Artificial Sequence; identical to SEQ ID NO: 144119
  derived and/or modified CDS sequence (opt3) from neuraminidase__InfluenzaA__ABW86324

SEQ ID NO: 144299 - RNA, 1413 nt, Artificial Sequence; identical to SEQ ID NO: 144091
  derived and/or modified CDS sequence (opt3) from neuraminidase__InfluenzaA__ABW86335

SEQ ID NO: 144300 - RNA, 1413 nt, Artificial Sequence; identical to SEQ ID NO: 144078
  derived and/or modified CDS sequence (opt3) from neuraminidase__InfluenzaA__ABW86346

SEQ ID NO: 144301 - RNA, 1413 nt, Artificial Sequence; identical to SEQ ID NO: 144078
  derived and/or modified CDS sequence (opt3) from neuraminidase__InfluenzaA__ABW86357

SEQ ID NO: 144302 - RNA, 1413 nt, Artificial Sequence; identical to SEQ ID NO: 144078
  derived and/or modified CDS sequence (opt3) from neuraminidase__InfluenzaA__ABW86368

SEQ ID NO: 144303 - RNA, 1413 nt, Artificial Sequence; identical to SEQ ID NO: 144104
  derived and/or modified CDS sequence (opt3) from neuraminidase__InfluenzaA__ABW86379

SEQ ID NO: 144304 - RNA, 1413 nt, Artificial Sequence; identical to SEQ ID NO: 144078
  derived and/or modified CDS sequence (opt3) from neuraminidase__InfluenzaA__ABW86390

SEQ ID NO: 144305 - RNA, 1413 nt, Artificial Sequence; identical to SEQ ID NO: 144119
  derived and/or modified CDS sequence (opt3) from neuraminidase__InfluenzaA__ABW86401

SEQ ID NO: 144306 - RNA, 1413 nt, Artificial Sequence; identical to SEQ ID NO: 144078
  derived and/or modified CDS sequence (opt3) from neuraminidase__InfluenzaA__ABW86412

SEQ ID NO: 144307 - RNA, 1413 nt, Artificial Sequence
  derived and/or modified CDS sequence (opt3) from neuraminidase__InfluenzaA__ABW86423
augaaccccaaucagaagaucauuaccauaggcagcaucuccauugccaucgggauuaucucucugaugcuccaaauaggaaacaucauuucaaucugggcuagucacagcauucagacagguucccagaaucauacuggcaucugcaaccagagaauaauuacguacgaaaauucuaccugggugaaccacacauaugucaauaucaacaauacuaacguuguggcagggaaagacaagaccucgguaacacuugccggaaauucaagccuguguaguauuuccggcugggcgaucuacaccaaagauaacucuaucaggauugguagcaagggggacguguucgucauacgggagccuuuuaucuccugcucacauuuggagugucgcacuuucuuuuuaacacaaggagcucugcuaaaugauaaacacaguaacggcaccgugaaggaccgaagcccauaucgugcccucaugucuugcccgcugggcgaagcacccuccccuuacaauucaaaguucgagagcguugccuggagugcuucugcaugucaugaugggaugggauggcuuacgauugguaucuccggcccagacaacggggccguggcuguccugaaauauaacggaauaauuacugaaaccaucaagagcuggaaaaagagaaucuugaggacacaggagucggagugcguguguguaaauggcucuugcuuugccauuaugacugauggucccuccaacggggcggcaucauacaaaaucuucaagauugaaaagggaaaaguuaccaagaguauagagcucaaugccccuaacuuucacuaugaagaguguagcugcuacccagacacaggcaccgugaugugugucugccgggauaauuggcacggcuccaaccgccccugggugucuuucaaucagaaccuggacuaccaggugggguauaucugcagcggagucuuuggugauaauccuagaccaaaagacggcaaggggucauguaacccgaugacgguugauggagcugacggcgugaaagguuucaguuacaaguaugggaauggcguauggauuggaaggacuaaauccaacaagcugcggaagggcuuugagaugaucugggaccccaauggguggacagauaccgacagcgauuucucugugaaacaagacgucguggccaucacugauuggucaggauacagugguagcuuuguucagcauccugaacucacaggcuuagacugcauucgcccauguuucuggguggagcugguccgagggcuucccagagaaaacaccacgauauggaccuccggaucuucgaucagcuucugcggcguggauuccgacacagcaaauuggucauggccugauggugcugaguugccauuuacuauugacaaguga

SEQ ID NO: 144308 - RNA, 1413 nt, Artificial Sequence; identical to SEQ ID NO: 144078
  derived and/or modified CDS sequence (opt3) from neuraminidase__InfluenzaA__ABW86434

SEQ ID NO: 144309 - RNA, 1413 nt, Artificial Sequence; identical to SEQ ID NO: 144078
  derived and/or modified CDS sequence (opt3) from neuraminidase__InfluenzaA__ABW86445

SEQ ID NO: 144310 - RNA, 1413 nt, Artificial Sequence; identical to SEQ ID NO: 144113
  derived and/or modified CDS sequence (opt3) from neuraminidase__InfluenzaA__ABW86456

SEQ ID NO: 144311 - RNA, 1413 nt, Artificial Sequence
  derived and/or modified CDS sequence (opt3) from neuraminidase__InfluenzaA__ABW86467
augaacaccaaucagaagaucauuacaauaggcagcaucuccauugccaucgggauuaucucucugaugcuccaaauaggaaacaucauuucaaucugggcuagucacagcauucagacugguucccagaaucauacgggcaucugcaaccagagaauaauuaccuacgaaaauucuacaugggugaaccacacuuaugucucgaucaauaacaccaauguuguggcagggaaagacaagacaucaguaacccuugccggaaacagcagucuguguuccauuucuggcugggcgaucuacacuaaagauaauagcaucaggauugguuccaagggggacguguucgucauacgggagcccuuuaucucaugcagucauuuggagugucgcacauucuuuuuaacccaaggagcucugcuaaacgauaaacacagcaauggcacggugaaggaccgaucuccuuaucgugcccucauguccugcccacugggcgaagcaccgucacccuacaacagcaaguucgagaguguugccuggucugcuuccgcaugucaugaugggaugggauggcuuacuauugguaucagcggcccugacaauggggccguggcuguccugaaauauaacggaauaauuaccgaaacaaucaagucguggaaaaagagaaucuugaggacucaggagucugagugcguguguguaaacggcuccugcuuuaccauuaugacagaugguccaucaaauggggccgcgaguuacaaaaucuucaagauugaaaagggaaaaguuaccaagagcauagagcucaacgcacccaauuuucacuaugaagaguguuccugcuacccugacacgggcacugugaugugugucugccgggauaacuggcacggcucuaaucgcccaugggugagcuucaaccagaaucuggacuaccagaucggguauauuugcucaggaguguuuggugauaaccccagaccuaaagacggcaaggggaguuguaauccagucacaguugauggagccgacggcgugaaagguuucuccuacaaguaugggaacggcguauggaucggaaggaccaaaagcaaucggcugcgcaagggcuuugagaugaucugggacccgaacggguggacugauacagacucugauuucucaauuaagcaagacguggucgcuauaaccgauuggaguggauacagcgguuccuuugugcagcaucccgaacucacgggcuuagacugcauccgaccuuguuucuggguugagcuggugagagggcuuccaagggaaaauaccacaauuuggacuucuggaucgagcaucuccuucugcggcgucgauucagacaccgccaacuggaguuggcccgauggugcagaguugccuuuuacaauugacaaauga

SEQ ID NO: 144312 - RNA, 1413 nt, Artificial Sequence; identical to SEQ ID NO: 144113
  derived and/or modified CDS sequence (opt3) from neuraminidase__InfluenzaA__ABW86478

SEQ ID NO: 144313 - RNA, 1413 nt, Artificial Sequence
  derived and/or modified CDS sequence (opt3) from neuraminidase__InfluenzaA__ABW86489
augaaccccaaucagaagaucauuaccauaggcagcaucuccauugccaucgggauuaucucucugaugcuccaaauaggaaacaucauuucaaucugggcuagucacagcauucagacagguucccagaaucauacuggcaucugcaaccagagaauaauuacguacgaaaauucuaccugggugaaccacacauaugucucgaucaauaacacuaauguuguggcagggaaagacaagaccucaguaacacuugccggaaacagcagucuguguuccauuucuggcugggcgaucuacaccaaagauaauagcaucaggauugguuccaagggggacguguucgucauacgggagccuuuuaucucaugcagucauuuggagugucgcacuuucuuuuuaacacaaggagcucugcuaaacgauaaacacagcaauggcaccgugaaggaccgaucuccauaucgugcccucauguccugcccgcugggcgaagcacccucaccuuacaacagcaaguucgagaguguugccuggucugcuuccgcaugucaugaugggaugggauggcuuacgauugguaucagcggcccagacaauggggccguggcuguccugaaauauaacggaauaauuacugaaaccaucaagucguggaaaaagagaaucuugaggacacaggagucugagugcguguguguaaacggcuccugcuuuacuauuaugaccgauggucccucaaauggggccgcgaguuacaaaaucuucaagauugaaaagggaaaaguuacaaagagcauagagcucaacgcaccuaauuuucacuaugaagaguguuccugcuacccagacaccggcacggugaugugugucugccgggauaacuggcacggcucuaaucgccccugggugagcuucaaccagaaucuggacuaccagaucggguauauuugcucaggaguguuuggugauaacccuagaccaaaagacggcaaggggaguuguaauccggucacuguugauggagccgacggcgugaaagguuucuccuacaaguaugggaacggcguauggaucggaaggacaaaaagcaaucggcugcgcaagggcuuugagaugaucugggaccccaacggguggaccgauacugacucugauuucucagugaagcaagacgucgugggaauuacagauuggagugguuacagcggcuccuuuguucagcauccugaacucaccggguuagacugcauacgaccauguuucuggguggagcuggucagaggacuucccagggaaaauacgaccaucuggacaucuggcucgagcauuuccuucugcgguguggauucagacacugcuaacuggaguuggccugauggggccgaguugccauuuaccaucgacaaauga

SEQ ID NO: 144314 - RNA, 1413 nt, Artificial Sequence
  derived and/or modified CDS sequence (opt3) from neuraminidase__InfluenzaA__ABW86500
augaaccccaaucagaagaucaugaccauuggcagcauauccaucgccauugggaucauuucucugaugcuccaaaucggaaacauaaucucaauuugggcuagucacagcauccagacagguucccagaaucauacuggcauuugcaaccagagaaucauaacguacgaaaauucuaccugggugaaccacacauaugucaauauuaacaauacuaacguuguggcagggaaagacaagaccucgguaacacuugccggaaauucaagccuguguaguaucuccggcugggcgauuuacaccaaagauaacucuaucaggaucgguagcaagggggacguguucgucauucgggagccuuuuauauccugcucacauuuggagugucgcacuuucuuuuuaacacaaggagcucugcuaaaugauaaacacaguaacggcaccgugaaggaccgaagcccauaucgugcccucaugucuugcccgcugggcgaagcacccuccccuuacaauucaaaguucgagagcguugccuggagugcuucugcaugucaugaugggaugggauggcuuacgaucgguauuuccggcccagacaacggggccguggcuguccugaaauauaacggaaucauaacugaaaccauuaagagcuggaaaaagagaaucuugaggacacaggagucggagugcguguguguaaauggcucuugcuuuacuaucaugaccgauggucccuccaacggggccgcgucauacaaaauuuucaagaucgaaaagggaaaaguuacaaagaguauugagcucaaugcaccuaacuuucacuaugaagaguguagcugcuacccagacaccggcacggugaugugugucugccgggauaauuggcacggcuccaaccgccccugggugucuuucaaucagaaccuggacuaccagauaggguauaucugcagcggaguguuuggugauaauccuagaccaaaagacggcaaggggucauguaacccggucacuguugauggagccgacggcgugaaagguuucaguuacaaguaugggaauggcguauggauuggaaggacaaaauccaaccggcugcgcaagggcuuugagaugaucugggaccccaauggguggaccaacacugauagcgacuucucuaugaagcaagauguggucgcuaucacagacuggucaggauacagugguagcuuugugcagcauccugaacucaccggcuuagauugcauucgaccauguuucuggguugagcuggugagagggcuucccagggaaaauacgaccauauggacauccggaucuucgaucagcuucugcggcgucgacuccgauacugccaacuggucauggccugacggugcagaguugccauuuaccauugauaaauga

SEQ ID NO: 144315 - RNA, 1413 nt, Artificial Sequence; identical to SEQ ID NO: 144078
  derived and/or modified CDS sequence (opt3) from neuraminidase__InfluenzaA__ABW86511

SEQ ID NO: 144316 - RNA, 1413 nt, Artificial Sequence
  derived and/or modified CDS sequence (opt3) from neuraminidase__InfluenzaA__ABW86522
augaaccccaaucagaagaucauuaccauaggcagcaucuccauugccaucgggauuaucucucugaugcuccaaauaggaaacaucauuucaaucugggcuagucacagcauucagacagguucccagaaucauacuggcaucugcaaccagagaauaauuacguacgagaauagcaccugggugaaccacacauaugucaauaucaacaauacuaacguuguggcagggaaagacaagaccucgguaacacuugccggaaauucaagccuguguaguauuuccggcugggcgaucuacaccaaagauaacucuaucaggauugguagcaagggggacguguucgucauacgggaaccuuuuaucuccugcucacauuuggagugucgcacuuucuuuuuaacacaaggagcucugcuaaaugauaaacacaguaacggcaccgugaaggaccgaagcccauaucgugcccucaugucuugcccgcugggcgaagcacccuccccuuacaauucaaaguucgagagcguugccuggagugcuucugcaugucaugaugggaugggauggcuuacgauugguaucuccggcccagacaacggggccguggcuguccugaaauauaacggaauaauuacugaaaccaucaagagcuggaaaaagagaaucuugaggacacaggagucggagugcguguguguaaauggcucuugcuuuacuauuaugaccgauggucccuccaacggggccgcgucauacaaaaucuucaagauugaaaagggaaaaguuacaaagaguauagagcucaaugcaccuaacuuucacuaugaagaguguagcugcuacccagacaccggcacggugaugugugucugccgggauaauuggcacggcuccaaccgccccugggugucuuucaaucagaaccuggacuaccaggugggguauaucugcagcggagucuuuggugauaauccuagaccaaaagacggcaaggggucauguaacccgaugacuguugauggagccgacggcgugaaagguuucaguuacaaguaugggaauggcguauggauuggaaggacaaaauccaacaagcugcggaagggcuuugagaugaucugggaccccaauggguggaccgauacugacagcgauuucucugugaaacaagacgucguggcuguuacagauuggucaggauacagugguagcuuugugcagcauccugaacucaccggcuuagacugcauccgcccauguuucugggucgagcuggugcgagggcuucccagagaaaacgccacgauuuggaccuccggaucuucgauaucuuucugcggcguagauuccgacacagcaaauuggucauggccugauggugcugaguugccauuuacuaucgacaaguga

SEQ ID NO: 144317 - RNA, 1413 nt, Artificial Sequence; identical to SEQ ID NO: 144078
  derived and/or modified CDS sequence (opt3) from neuraminidase__InfluenzaA__ABW86533

SEQ ID NO: 144318 - RNA, 1413 nt, Artificial Sequence; identical to SEQ ID NO: 144113
  derived and/or modified CDS sequence (opt3) from neuraminidase__InfluenzaA__ABW86544

SEQ ID NO: 144319 - RNA, 1413 nt, Artificial Sequence; identical to SEQ ID NO: 144078
  derived and/or modified CDS sequence (opt3) from neuraminidase__InfluenzaA__ABW86555

SEQ ID NO: 144320 - RNA, 1410 nt, Artificial Sequence
  derived and/or modified CDS sequence (opt3) from neuraminidase__InfluenzaA__ABW86566
augaaccccaaucagaagaucauuaccauaggcagcgugucccugacaaucucuacuauuugcuucuuuaugcaaacggccauccucauuaccacagucacucuucacuucaaacaguacgaguuuaacucaccuccaaauaaccagguuaugcugugugaaccgaccgugaucgagagaaauauaacagaaaucguauauuugaccaacacuacaauugagaaggaaaucugccccaaauuagcugaguacaggaauuggaguaagccucagugugacauuaccggguucgcaccauuuagcaaagauaacuccauccggcugucugccggaggugacauaugggugacgcgcgagcccuaugucucgugcgauccugacaaguguuaccaauucgcgcuaggccaggggacuacccucaauaacgugcauucaaaugauacaguucgagaccguacuccauauagaacccugcuuaugaacgaacugggagugcccuuucacuugggcacaaagcaggucugcauugcuuggagcaguuccucuugucaugaugguaaagccuggcuccacgugugcaucaccggggacgauaagaaugcaacggccagcuucauuuacaacggaaggcugguagacuccaucguuucauggaguaaagagauccugcggacucaggaaagcgagugugugugcauuaauggcacauguaccgucgugaugacugauggcucugcuuccgggaaggcagacacaaaaauacucuuuaucgaggaaggaaagauugugcauaccucaacguuaagcgguagugcccaacacgucgaggaaugcucuugcuauccucgcuacccaggcguuagaugugugugcagggauaacuggaagggguccaaccggccgaucguagacauaaauauuaaagaccacagcaucgugucgucuuacgucuguuccggacuggugggcgauacccccaggaagaacgacucaaguagcuccucucauugccuugauccuaauaacgaggaaggugggcacggaguuaaaggcugggcuuucgacgauggcaaugacguguggauggggcgaacaaucagcgagaagucaagauugggauaugagacuuuuaaagucauugaagguuggaguaacccaaaguccaaacugcagaucaaucgccaggugauuguagaucggggcaaccguagcggguacucuggaauauucucaguugagggcaagaguuguaucaaucgcugcuuuuauguggaacuaauuagagguaggaaggaggaaaccgagguccucuggacaagcaacuccaucguggucuucugugggacuucuggcaccuacggaacaggcucguggcccgacggggccgauaucaaucugaugccuauuuga

SEQ ID NO: 144321 - RNA, 1413 nt, Artificial Sequence; identical to SEQ ID NO: 144104
  derived and/or modified CDS sequence (opt3) from neuraminidase__InfluenzaA__ABW86609

SEQ ID NO: 144322 - RNA, 1413 nt, Artificial Sequence; identical to SEQ ID NO: 143107
  derived and/or modified CDS sequence (opt3) from neuraminidase__InfluenzaA__ABW91188

SEQ ID NO: 144323 - RNA, 1410 nt, Artificial Sequence
  derived and/or modified CDS sequence (opt3) from neuraminidase__InfluenzaA__ABW91210
augaaccccaaucagaagaucauuaccauaggcagcgugucccugacaaucucuacuauuugcuucuuuaugcaaaucgccauucucaucacgaccgucacacuucacuucaaacaguacgaguuuaacucaccuccaaauaaccagguuauacugugugaaccgacuaucauugagagaaauaucaccgaaauuguguauuugacaaacaccacuaucgagaaggaaauaugccccaaauuagcugaguacaggaauuggaguaagccucagugugacauuacaggguucgcaccauuuagcaaagauaacuccauccggcugucugccggaggugacauuuggguaacccgcgagcccuaugugucgugcgauccugacaaguguuaccaauucgcgcuaggccaggggacgacucucaauaacguccauucaaaugauaccgugcgagaccguacaccauauagaacucugcuuaugaacgaacugggaguucccuuucacuugggcaccaaacaggugugcaucgcuuggagcaguuccucuugucaugaugguaaggccuggcuccacgucugcaucacaggggacgauaagaaugcaaccgccagcuucauuuacaacggaaggcugguggacuccauaguaucauggaguaaagagauccugcggacgcaggaaagcgaguguguuugcauuaauggcacuuguacaguggucaugaccgauggcucugcuuccgggaaggcagacacuaaaauccucuuuauagaggaaggaaagauugugcauacaucaaccuuaagcgguagugcccaacacguggaggaaugcucuugcuauccucgcuacccaggcgucagauguguuugcagggauaacuggaagggguccaaccggccgaucguggacaucaauauuaaagaccacagcaucguaucgucuuacguguguuccggacuggucggcgauacgccccgcaagaacgacucaaguagcuccucucauugccuugauccuaauaacgaggaaggugggcacggagugaaaggcugggcuuucgacgauggcaaugacguuuggauggggcgaaccauuagcgagaagucaagauugggauaugagacauuuaaagugauagaagguuggaguaacccaaaguccaaacugcagaucaauaggcaggucauuguggaucggggcaaccguagcggguacucuggaaucuucucaguagagggcaagaguuguaucaaucgcugcuuuuauguugaacuaauuagagguaggaaggaggaaacugaggugcucuggaccagcaacuccauagucguguucugugggacaucuggcacuuacggaaccggcucguggcccgacggggccgauaucaaucugaugccuauuuga

SEQ ID NO: 144324 - RNA, 1413 nt, Artificial Sequence; identical to SEQ ID NO: 144078
  derived and/or modified CDS sequence (opt3) from neuraminidase__InfluenzaA__ABW91221

SEQ ID NO: 144325 - RNA, 1410 nt, Artificial Sequence
  derived and/or modified CDS sequence (opt3) from neuraminidase__InfluenzaA__ABW91232
augaaccccaaucagaagaucauuaccauaggcagcgugucccugacaaucucuacuauuugcuucuuuaugcaaaucgccauucucaucacgaccgucacacuucacuucaaacaguacgaguuuaacucaccuccaaauaaccagguuaugcugugugaaaguacuauaaucgagagaaauauuaccgaaaucguguauuugacaaacaccacuauugagaaggaaaucugcccgaaauuagcugaguacaggaauuggagcaagccccagugugacauaacaggguucgcaccuuuuuccaaagauaacucuauucggcugucggccggaggugacaucuggguaacccgcgagccauaugugucaugcgaucccgacaaguguuaccaauucgcgcuaggccaggggacgacucucaauaacguccauagcaaugauaccgugcgagaccguacaccuuauagaacucugcuuaugaacgaacugggaguuccauuucacuugggcaccaaacaggugugcauugcuuggaguuccucuagcugucaugaugguaaggccuggcuccacgucugcaucacaggggacgauaagaaugcaaccgccuccuucaucuacaacggaaggcugguggacucaauuguaaguuggagcaaagagauacugcggacgcaggaaucugaguguguuugcaucaauggcacuuguacaguggucaugaccgauggcuccgcuucagggaaggcagacacuaaaauucucuuuaucgaggaaggaaagauagugcauacaagcaccuuaagugguucugcccaacacguggaggaaugcuccugcuauccccgcuacccuggcgucagauguguuugcagggauaacuggaaggggagcaaccggccaauuguggacaucaauaucaaagaccacucgauuguaucuuccuacguguguucaggacuggucggcgauacgccgcgcaagaacgacaguagcuccucuggucauugccuugaucccaauaacgaggaagggggacacggcgugaaaggcugggcuuucgacgaugggaaugacguuuggaugggacgaaccaucagcgagaagucaagauuggguuaugagacauuuaaagugauugaaggcuggaguaacccuaaguccaaacugcagauaaauaggcaggucaucguggaucgggggaaccguagcggauacucuggcauuuucucaguagaggguaagaguuguaucaaucgcugcuuuuauguugaacuaaucagagggaggaaggaggaaacugaggugcucuggaccagcaacuccauugucguguucuguggcacaucuggaacuuacggcaccgggucguggccagacggagccgauauaaaucugaugcccaucuga

SEQ ID NO: 144326 - RNA, 1410 nt, Artificial Sequence; identical to SEQ ID NO: 144114
  derived and/or modified CDS sequence (opt3) from neuraminidase__InfluenzaA__ABW91243

SEQ ID NO: 144327 - RNA, 1410 nt, Artificial Sequence; identical to SEQ ID NO: 143932
  derived and/or modified CDS sequence (opt3) from neuraminidase__InfluenzaA__ABW91254

SEQ ID NO: 144328 - RNA, 1410 nt, Artificial Sequence; identical to SEQ ID NO: 143932
  derived and/or modified CDS sequence (opt3) from neuraminidase__InfluenzaA__ABW91265

SEQ ID NO: 144329 - RNA, 1413 nt, Artificial Sequence; identical to SEQ ID NO: 144078
  derived and/or modified CDS sequence (opt3) from neuraminidase__InfluenzaA__ABW91276

SEQ ID NO: 144330 - RNA, 1413 nt, Artificial Sequence
  derived and/or modified CDS sequence (opt3) from neuraminidase__InfluenzaA__ABW91287
augaaccccaaucagaagaucauuaccauaggcagcaucuccauugccaucgggauuaucucucugauacuccaaaucggaaacauuaucucaauuugggcuagucacagcauccagacagguucccagaaucauacuggcauaugcaaccagagaauuaucacguacgaaaauucuaccugggugaacaauacauaugucaacauuaauaacacuaauguuguggcagagaaagacaagaccucgguaacacuugccgggaacucaagccuguguaguaucuccggaugggcgaucuacaccaaagauaauucuauuaggauaggcagcaagggugacaucuucgugauucgggagccuuuuaucuccugcucacacuuggaaugucgcacuuucuuuuuaacacaaggggcucugcuaaacgauaaacauaguaauggaaccgucaaggaccgaagcccauaucgugcccucaugucuugcccgcugggcgaggcacccuccccuuacaacucaagauucgaaagcguggccuggagugcuucugcaugucacgauggcaugggguggcuuacgauaggaauuuccgguccagacaacggcgccguugcugugcugaaguauaaugggaucaucacugagaccauuaaaagcuggaagaaaaggaucuugcggacacaggagucggaaugcgucuguaugaacggaucuugcuuuacuauuaugaccgauggccccuccaauggugccgcgucauacaagauauucaaaaucgagaaggggaaggugacaaaaaccauugaacucaacgcaccuaauuuucauuaugaggaguguaguugcuacccagacacgggaacuguaauguguguuugccgcgauaacuggcacggcagcaauagacccuggguguccuucaaccagaaucuggacuaccagaucggcuauaucugcucuggggucuuuggagauaacccuaggccaaaggacggugaaggcagcuguaauccggugacaguggauggggccgacggagucaaaggcuucucauacaaguaugguaacgggguuuggauuggccggaccaaaaguaaucgccugcgaaagggauuugagaugauaugggaccccaacggcuggacuaauacagauuccgacuucagcgugaaacaagauaucguagcuauuaccgacuggucuggguacucaggaaguuuugugcagcacccugaacucacggguuuagauugcaucagaccauguuucugggucgagcuggugaggggccuuccccgggaaaacaccacaauuuggacuagcggguccucuaucucguucugcggaguuaacagcggcaccgccaauugguccuggccugacggugcagaguugccauuuacaauagauaaguga

SEQ ID NO: 144331 - RNA, 1413 nt, Artificial Sequence; identical to SEQ ID NO: 144078
  derived and/or modified CDS sequence (opt3) from neuraminidase__InfluenzaA__ABW91298

SEQ ID NO: 144332 - RNA, 1413 nt, Artificial Sequence
  derived and/or modified CDS sequence (opt3) from neuraminidase__InfluenzaA__ABW91309
augaaccccaaucagaagaucauuaccauaggcagcaucuccauugccaucgggauuaucucucugaugcuccaaauaggaaacaucauuucaaucugggcuagucacagcauucagacagguucccagaaucauacuggcaucugcaaccagagaauaauuacguacgaaaauucuaccugggugaaccacacauaugucucgaucaauaacacuaauguuguggcagggaaagacaagaccucaguaacacuugccggaaacagcagucuguguuccauuucuggcugggcgaucuacaccaaagauaauagcaucaggauugguuccaagggggacguguucgucauacgggagccuuuuaucucaugcagucauuuggagugucgcacuuucuuuuuaacacaaggagcucugcuaaacgauaaacacagcaauggcaccgugaaggaccgaucuccauaucgugcccucauguccugcccgcugggcgaagcacccucaccuuacaacagcaaguucgagaguguugccuggucugcuuccgcaugucaugaugggaugggauggcuuacgauugguaucagcggcccagacaauggggccguggcuguccugaaauauaacggaauaauuacugaaaccaucaagucguggaaaaagagaaucuugaggacacaggagucugagugcguguguguaaacggcuccugcuuuacuauuaugaccgauggucccucagacggggccgcgaguuacaaaaucuucaagauugaaaagggaaaaguuacaaagagcauagagcucaaugcaccuaacuuucacuaugaagaguguuccugcuacccagauaccggcacggugaugugugucugccgggacaauuggcacggcucuaaccgccccugggugagcuucaaucagaaccuggauuaccagaucggguauauuugcucaggaguguuuggugacaauccuagaccaaaagauggcaaggggaguuguaacccggucacugccgacggagcugacggcguuaaagguuucuccuacaaguaugggaauggcguguggaucggaaggacaaaaagcaaccggcugcgcaagggcuuugagaugaucugggaucccaauggguggaccgacacugauucugacuucucaguaaagcaagauguggucgccauuacagacuggaguggauacagcgguuccuuugugcagcauccugaacucaccggcuuagauugcauacgaccauguuucuggguugagcuggugagagggcuucccagggaaaacacgaccaucuggacaucuggaucgagcauuuccuucugcggcgucgacucagauacugcaaauuggaguuggccugacggugcugaguugccauuuaccaucgauaaauga

SEQ ID NO: 144333 - RNA, 1413 nt, Artificial Sequence; identical to SEQ ID NO: 144078
  derived and/or modified CDS sequence (opt3) from neuraminidase__InfluenzaA__ABW91320

SEQ ID NO: 144334 - RNA, 1413 nt, Artificial Sequence; identical to SEQ ID NO: 144078
  derived and/or modified CDS sequence (opt3) from neuraminidase__InfluenzaA__ABW91331

SEQ ID NO: 144335 - RNA, 1413 nt, Artificial Sequence; identical to SEQ ID NO: 144078
  derived and/or modified CDS sequence (opt3) from neuraminidase__InfluenzaA__ABW91342

SEQ ID NO: 144336 - RNA, 1413 nt, Artificial Sequence; identical to SEQ ID NO: 144078
  derived and/or modified CDS sequence (opt3) from neuraminidase__InfluenzaA__ABW91353

SEQ ID NO: 144337 - RNA, 1413 nt, Artificial Sequence
  derived and/or modified CDS sequence (opt3) from neuraminidase__InfluenzaA__ABW91364
augaacaccaaucagaagaucauuacaauaggcagcaucuccauugccaucgggauuaucucucugaugcuccaaauaggaaacaucauuucaaucugggcuagucacagcauucagacugguucccagaaucauacgggcaucugcaaccagagaauaauuaccuacgaaaauucuacaugggugaaccacacuuaugucaauaucaacaauaccaacguugugacagggaaagacaagaccucgguaacucuugcaggaaauucaagccuguguaguauuuccggcugggccaucuacacaaaagauaacucuaucaggauugguagcaagggggacguguucgucauacgggagcccuuuaucuccugcucacauuuggagugucgcaccuucuuuuuaacgcaaggagcgcugcuaaaugauaaacacaguaacggcacugugaaggaccgaagcccuuaucgugcucucaugucuugcccacugggcgaagccccgucccccuacaauucaaaguucgagagcguugcauggagugccucugcuugucaugaugggaugggauggcuuaccauugguaucuccggcccugacaacggggcaguggccguccugaaauauaacggaauaauuacagaaacuaucaagagcuggaaaaagagaaucuugaggacccaggagucggagugcguguguguaaauggcucuugcuuuacaauuaugaccgaugguccauccgacggggcugccucauacaaaaucuucaagauugaaaagggaaaaguuacgaagaguauagagcucaacgcgcccaauuuucacuaugaagaguguagcugcuacccugauacuggcacagugaugugugucugccgggacaacuggcacggcuccaaucgcccaugggugucuuucaaccagaaucuggauuaccagaucggguauauuugcagcggaguguuuggugacaaccccagaccuaaagauggcaaggggucauguaauccagucaccguugacggagcagacggcgugaaagguuucaguuacaaguaugggaacggcguauggaucggaaggacuaaauccaauaagcugcggaagggcuuugagaugaucugggauccgaacggguggacagacaccgauaaugacuucagcgugaaacaagaugucguggccauuacggacuggucuggauacucagguaguuuuguucagcaucccgaacucaccggcuuagauugcauacgcccuuguuucuggguggagcugguccgagggcuuccaagagaaaacacaacuaucuggaccagcggauccucuauuucguucugcggcguggacagcgauacagcuaauugguccuggcccgacggugccgaguugccuuuuacuaucgauaaguga

SEQ ID NO: 144338 - RNA, 1413 nt, Artificial Sequence; identical to SEQ ID NO: 144078
  derived and/or modified CDS sequence (opt3) from neuraminidase__InfluenzaA__ABW91375

SEQ ID NO: 144339 - RNA, 1413 nt, Artificial Sequence; identical to SEQ ID NO: 144104
  derived and/or modified CDS sequence (opt3) from neuraminidase__InfluenzaA__ABW91386

SEQ ID NO: 144340 - RNA, 1410 nt, Artificial Sequence
  derived and/or modified CDS sequence (opt3) from neuraminidase__InfluenzaA__ABW91397
augaaccccaaucagaagaucauuaccauaggcagcgugucccugacaaucucuacuauuugcuucuuuaugcagaucgccauucucaucacgaccgucacacuucacuucaaacaguacgaguuuaacucaccuccaaauaaccagguuaugcugugugaaccgacuauaaucgagagaaauauuaccgaaaucguguauuugacaaacaccacuauugagaaggaaaucugccccaaauuagcugaguacaggaauuggaguaagccucagugugacauaacaggguucgcaccauuuagcaaagauaacuccauucggcugucugccggaggugacaucuggguaacccgcgagcccuaugugucgugcgauccugacaaguguuaccaauucgcgcuaggccaggggacgacucucaauaacguccauucaaaugauaccgugcgagaccguacaccauauagaacucugcuuaugaacgaacugggaguucccuuucacuugggcaccaaacaggugugcauugcuuggagcaguuccucuugucaugaugguaaggccuggcuccacgucugcaucacaggggacgauaagaaugcaaccgccagcuucaucuacaacggaaggcugguggacuccauuguaucauggaguaaagagauacugcggacgcaggaaagcgaguguaucugcauuaauggcacuuguacaguugugaugaccgauggcucugcuuccgggaaggcagacacuaaaauccucuuuauagaggaaggaaagauuguccauacaucaaccuuaagcgguagugcccaacacguggaggaaugcucuugcuauccucgcuacccaggcgugagaugugucugcagggauaacuggaagggguccaaccggccgaucguugacaucaauauuaaagaccacagcaucgugucgucuuacguauguuccggacuggugggcgauacgccccgcaagaacgacucaaguagcuccucucauugccuugauccuaauaacgaggaaggugggcacggagucaaaggcugggcuuucgacgauggcaaugacguguggauggggcgaaccauuagcgagaagucaagauugggauaugagacauuuaaaguuauagaagguuggaguaacccaaaguccaaacugcagaucaauaggcaagugauugucgaucggggcaaccguagcggguacucuggaaucuucucaguggagggcaagaguuguaucaaucgcugcuuuuauguagaacuaauuagagguaggaaggaggaaacugagguucucuggaccagcaacuccauaguggucuucugugggacaucuggcacuuacggaaccggcucguggcccgacggggccgauaucaaucugaugccuauuuga

SEQ ID NO: 144341 - RNA, 1413 nt, Artificial Sequence; identical to SEQ ID NO: 144249
  derived and/or modified CDS sequence (opt3) from neuraminidase__InfluenzaA__ABW91408

SEQ ID NO: 144342 - RNA, 1413 nt, Artificial Sequence
  derived and/or modified CDS sequence (opt3) from neuraminidase__InfluenzaA__ABW91419
augaaccccaaucagaagaucauuaccauaggcagcaucuccauugccaucgggauuaucucucugaugcuccaaauaggaaacaucauuucaaucugggcuagucacagcauucagacagguucccagaaucauacuggcaucugcaaccagagaauaauuacguacgaaaauucuaccugggugaaccacacauaugucaauaucaacaauacuaacguuguggcagagaaagacaagaccucgguaacacuugccggaaauucaagccuguguaguauuuccggaugggcgaucuacaccaaagauaacucuaucaggauuggcagcaagggugacguguucgucauacgggagccuuuuaucuccugcucacauuuggaaugucgcacuuucuuuuuaacacaaggggcucugcuaaaugauaaacacaguaacggaaccgugaaggaccgaagcccauaucgugcccucaugucuugcccgcugggcgaggcacccuccccuuacaauucaaaguucgaaagcguugccuggagugcuucugcaugucaugauggcaugggguggcuuacgauuggaaucuccgguccagacaacggcgccguggcuguccugaaauauaacgggauaauuacugagaccaucaagagcuggaaaaagagaaucuugaggacacaggagucggaaugcguguguguaaauggaucuugcuuuacuauuaugaccgauggccccuccaacggugccgcgucauacaaaaucuucaagauugagaaggggaaaguuacaaagaguauagaacucaaugcaccuaacuuucacuaugaggaguguagcugcuacccagacaccggaacggugaugugugucugccgggauaauuggcacggcuccaaccgccccugggugucuuucaaucagaaccuggacuaccaggugggcuauaucugcagcggggucuuuggagauaauccuagaccaaaagacgguaagggcucauguaacccgaugacuguugauggggccgacggagugaaaggcuucaguuacaaguaugguaaugggguauggauuggcaggacaaaauccaacaagcugcggaagggauuugaaaugaucugggaccccaauggcuggaccgauacugacagcgauuucucugugaaacaagacgucguggcuaucacagauuggucaggguacagugggagcuuuguucagcauccugagcucaccgguuuagacugcauucgcccauguuucuggguggaacugguccgaggccuucccagagagaacacgaccauauggacauccgggucuucgaucagcuucugcggaguggauuccgacacugccaauuggucauggccugauggcgcagaauugccauuuaccauugacaaguga

SEQ ID NO: 144343 - RNA, 1413 nt, Artificial Sequence
  derived and/or modified CDS sequence (opt3) from neuraminidase__InfluenzaA__ABW91430
augaaccccaaucagaagaucauuaccauaggcagcaucuccauugccaucgggauuaucucucugaugcuccaaauaggaaacaucauuucaaucugggcuagucacagcauucagacagguucccagaaucauacuggcaucugcaaccagagaauaauuacguacgaaaauucuaccugggugaaccacacauaugucaauaucaacaauacuaacguuguggcagggaaagacaagaccucgguaacacuugccggaaauucaagccuguguaguauuuccggcugggcgaucuacaccaaagauaacucuaucaggauugguagcaagggggacguguucgucauacgggagccuuuuaucuccugcucacauuuggagugucgcacuuucuuuuuaacacaaggagcucugcuaaaugauaaacacaguaacggcaccgugaaggaccgaagcccauaucgugcccucaugucuugcccgcugggcgaagcacccuccccuuacaauucaaaguucgagagcguugccuggagugcuucugcaugucaugaugggaugggauggcuuacgauugguaucuccggcccagacaacgggagcguggccguccugaaauauaacggaauaauuacugaaaccaucaagucguggaaaaagagaaucuugaggacacaggagucugagugcguguguguaaauggcuccugcuuuacuauuaugaccgauggucccucaaacggggcugccaguuacaaaaucuucaagauugaaaagggaaaaguuacaaagagcauagagcucaaugcgccuaacuuucacuaugaagaguguuccugcuacccagacaccggcacggugaugugugucugccgggauaauuggcacggcucuaaccgccccugggugagcuucaaucagaaccuggacuaccaggugggguauaucugcucaggagucuuuggugauaauccuagaccaaaagacggcaaggggaguuguaacccgaugacuguugauggagcagacggcgugaaagguuucuccuacaaguaugggaauggcguauggauuggaaggacaaaaagcaacaagcugcggaagggcuuugagaugaucugggaccccaauggguggaccgauacugacucugauuucucagugaaacaagacgucguggccaucacagauuggaguggauacagcgguuccuuuguucagcauccugaacucaccggcuuagacugcauucgcccauguuucuggguggagcugguccgagggcuucccagagaaaacacgaccauauggacaucuggaucgagcaucuccuucugcggcguggauucagacacugcuaauuggaguuggccugauggugccgaguugccauuuaccauugacaaguga

SEQ ID NO: 144344 - RNA, 1410 nt, Artificial Sequence; identical to SEQ ID NO: 143932
  derived and/or modified CDS sequence (opt3) from neuraminidase__InfluenzaA__ABW91441

SEQ ID NO: 144345 - RNA, 1413 nt, Artificial Sequence; identical to SEQ ID NO: 144119
  derived and/or modified CDS sequence (opt3) from neuraminidase__InfluenzaA__ABW91452

SEQ ID NO: 144346 - RNA, 1413 nt, Artificial Sequence; identical to SEQ ID NO: 144119
  derived and/or modified CDS sequence (opt3) from neuraminidase__InfluenzaA__ABW91463

SEQ ID NO: 144347 - RNA, 1413 nt, Artificial Sequence; identical to SEQ ID NO: 144078
  derived and/or modified CDS sequence (opt3) from neuraminidase__InfluenzaA__ABW91474

SEQ ID NO: 144348 - RNA, 1413 nt, Artificial Sequence; identical to SEQ ID NO: 144119
  derived and/or modified CDS sequence (opt3) from neuraminidase__InfluenzaA__ABW91485

SEQ ID NO: 144349 - RNA, 1413 nt, Artificial Sequence; identical to SEQ ID NO: 144078
  derived and/or modified CDS sequence (opt3) from neuraminidase__InfluenzaA__ABW91496

SEQ ID NO: 144350 - RNA, 1413 nt, Artificial Sequence; identical to SEQ ID NO: 144104
  derived and/or modified CDS sequence (opt3) from neuraminidase__InfluenzaA__ABW91507

SEQ ID NO: 144351 - RNA, 1413 nt, Artificial Sequence; identical to SEQ ID NO: 144119
  derived and/or modified CDS sequence (opt3) from neuraminidase__InfluenzaA__ABW91518

SEQ ID NO: 144352 - RNA, 1413 nt, Artificial Sequence
  derived and/or modified CDS sequence (opt3) from neuraminidase__InfluenzaA__ABW91529
augaaccccaaucagaagaucauuaccauaggcagcaucuccauugccaucgggacaauuucucugaugcuccaaaucggaaacauaaucucaauuugggcuagucacagcauccagacugguucccagaaucauacgggcauuugcaaccagagaaucauaaccuacgaaaauucuacaugggugaaccacacuuaugucucgauuaauaacaccaauguuguggcagggaaagacaagacaucaguaacccuugccggaaacagcagucuguguuccaucucuggcugggcgauuuacacuaaagauaauagcaucaggaucgguuccaagggggacguguucgucauucgggagccuuuuauaucaugcagucauuuggagugucgcacauucuuuuuaacccaaggagcucugcuaaacgauaaacacagcaauggcacgaucaaggaccgaucuccauaucgugcccucauguccugcccgcugggcgaagcacccucaccuuacaacagcaaguucgagaguguggccuggucugcuuccgcaugucaugaugggaugggauggcuuacuauugguaucagcggcccagacaauggggccguugcugugcugaaauauaacggaauaauuaccgaaacaaucaagucguggaaaaagagaaucuugaggacucaggagucugagugcgucugugugaacggcuccugcuuuaccauuaugacagauggucccucaaauggggccgcgaguuacaaaaucuucaagauugaaaagggaaaaguaaccaagagcauagagcucaacgcaccuaauuuucacuaugaagaguguuccugcuacccagacacgggcacuguuaugugugugugccgggauaacuggcacggcucuaaucgccccugggucagcuucaaccagaaucuggacuaccagaucggguauauuugcucaggaguguuuggugauaacccuagaccaaaagacggcaaggggaguuguaauccggugacagucgauggagccgacggcguuaaagguuucuccuacaaguaugggaacggcguguggaucggaaggaccaaaagcaaucggcugcgcaagggcuuugagaugaucugggaccccaacggguggacugauacagacucugauuucucaguaaagcaagacguggucgcuauuaccgauuggaguggauacagcgguuccuuugugcagcauccugaacucacgggcuuagacugcauacgaccauguuucuggguugagcuggugagagggcuucccagggaaaauaccacaaucuggacuucuggaucgagcauuuccuucugcggcgucgauucagacaccgccaacuggaguuggccugauggugcagaguugccauuuacaaucgacaaauga

SEQ ID NO: 144353 - RNA, 1413 nt, Artificial Sequence
  derived and/or modified CDS sequence (opt3) from neuraminidase__InfluenzaA__ABW91540
augaaccccaaucagaagaucauuaccauaggcagcaucuccauugccaucgggauuaucucucugaugcuccaaauaggaaacaucauuucaaucugggcuagucacagcauucagacagguucccagaaucauacuggcaucugcaaccagagaauaauuacguacgaaaauucuaccuggaugaaccacacauaugugucgaucaauaacacuaaugucguugcagggaaagacaagaccucagugacacuugccggaaacagcagucuguguuccauuucuggcugggcgaucuacaccaaagauaauagcaucaggauugguuccaagggggacguauucgugauacgggagccuuuuaucucaugcagucauuuggagugucgcacuuucuuuuuaacacaaggagcucugcuaaacgauaaacacagcaauggcaccgucaaggaccgaucuccauaucgugcccucauguccugcccgcugggcgaagcacccucaccuuacaacagcaaguucgagaguguggccuggucugcuuccgcaugucaugaugggaugggauggcuuacgauugguaucagcggcccagacaauggggccguugcugugcugaaauauaacggaauaauuacugaaaccaucaagucguggaaaaagagaaucuugaggacacaggagucugagugcgucugugugaacggcuccugcuuuacuauuaugaccgauggucccucaaauggggccgcgaguuacaaaaucuucaagauugaaaagggaaaaguaacaaagagcguugagcucaacgcaccuaauuuucacuaugaagaguguuccugcuacccagacaccggcacggugaugugugucugccgggauaacuggcacggcucuaaucgccccugggugagcuucaaccagaaucuggacuaccagauaggguauaucugcucaggaguguuuggugauaacccuagaccaaaagacggcaaggggaguuguaauccggucacuguugauggagccgacggcgugaaagguuucuccuacaaguaugggaacggcguauggauuggaaggacaaaaagcaaucggcugcgcaagggcuuugagaugaucugggaccccaacggguggaccgauacugacucugauuucucagugaagcaagacgucguggcuaucacagauuggaguggauacagcgguuccuuuguucagcauccugaacucaccggcuuagacugcauucgaccauguuucuggguggagcuggucagagggcuucccagggaaaauacgaccauauggacaucuggaucgagcaucuccuucugcggcguggauucagacacugccaacuggaguuggccugauggugcagaguugccauuuaccauugacaaauga

SEQ ID NO: 144354 - RNA, 1410 nt, Artificial Sequence
  derived and/or modified CDS sequence (opt3) from neuraminidase__InfluenzaA__ABW91551
augaaccccaaucagaagaucauuaccauaggcagcgugucccugacaaucucuacuauuugcuucuuuaugcaaaucgccauucucaucacgaccgucacacuucacuucaaacaguacgaguuuaacuucccuccaaauaaccagguuaugcugugugaaccgacuauaaucgagagaaauauuaccgaaaucguguauuugacaaacaccacuauugagaaggaaaucugccccaaauuagcugaguacaggaauuggucaaagccucagugugacauaacaggguuugcaccauucaguaaagauaacagcauucggcuguccgccggaggugacaucuggguaacccgcgagcccuaugugucuugcgauccugacaaguguuaccaauuugcgcuaggccaggggacgacucucaauaacguccauucgaaugauaccgugcgagaccguacaccauauagaacucugcuuaugaacgaacugggaguucccuuccacuugggcaccaaacaggugugcauugcuuggucaagcaguuccugucaugaugguaaggccuggcuccacgucugcaucacaggggacgauaagaaugcaaccgccucuuuuaucuacaacggaaggcugguggacagcauuguauccuggucaaaagagauacugcggacgcaggaaagugaguguguuugcaucaauggcacuuguacaguggucaugaccgauggcagcgcuucugggaaggcagacacuaaaauucucuucaucgaggaaggaaagauagugcauacauccaccuuaucagguagcgcccaacacguggaggaaugcaguugcuauccucgcuacccaggcgucagauguguuugcagggauaacuggaaggggucuaaccggccgauuguggacaucaauaucaaagaccacuccauuguaagcucguacguguguucuggacuggucggcgauacgccccgcaagaacgacuccucaaguagcucccauugccuugauccuaauaacgaggaaggugggcacggagugaaaggcugggcuuuugacgauggcaaugacguuuggauggggcgaaccaucucugagaagucuagauugggauaugagacauucaaagugauugaagguuggucaaacccaaagaguaaacugcagauaaauaggcaggucaucguggaucggggcaaccguuccggguacagcggaauuuuuagcguagagggcaagucauguaucaaucgcugcuucuauguugaacuaaucagagguaggaaggaggaaacugaggugcucuggaccaguaacagcauugucguguucugugggacauccggcacuuacggaaccggcucuuggcccgacggggccgauauaaaucugaugccuaucuga

SEQ ID NO: 144355 - RNA, 1413 nt, Artificial Sequence; identical to SEQ ID NO: 144078
  derived and/or modified CDS sequence (opt3) from neuraminidase__InfluenzaA__ABW91562

SEQ ID NO: 144356 - RNA, 1413 nt, Artificial Sequence; identical to SEQ ID NO: 144113
  derived and/or modified CDS sequence (opt3) from neuraminidase__InfluenzaA__ABW91584

SEQ ID NO: 144357 - RNA, 1413 nt, Artificial Sequence; identical to SEQ ID NO: 144078
  derived and/or modified CDS sequence (opt3) from neuraminidase__InfluenzaA__ABW91595

SEQ ID NO: 144358 - RNA, 1413 nt, Artificial Sequence; identical to SEQ ID NO: 144119
  derived and/or modified CDS sequence (opt3) from neuraminidase__InfluenzaA__ABW91606

SEQ ID NO: 144359 - RNA, 1413 nt, Artificial Sequence; identical to SEQ ID NO: 144113
  derived and/or modified CDS sequence (opt3) from neuraminidase__InfluenzaA__ABW91617

SEQ ID NO: 144360 - RNA, 1413 nt, Artificial Sequence; identical to SEQ ID NO: 144078
  derived and/or modified CDS sequence (opt3) from neuraminidase__InfluenzaA__ABW91628

SEQ ID NO: 144361 - RNA, 1413 nt, Artificial Sequence; identical to SEQ ID NO: 144078
  derived and/or modified CDS sequence (opt3) from neuraminidase__InfluenzaA__ABW91639

SEQ ID NO: 144362 - RNA, 1410 nt, Artificial Sequence; identical to SEQ ID NO: 143932
  derived and/or modified CDS sequence (opt3) from neuraminidase__InfluenzaA__ABW91650

SEQ ID NO: 144363 - RNA, 1350 nt, Artificial Sequence
  derived and/or modified CDS sequence (opt3) from neuraminidase__InfluenzaA__ABX10517
augaaccccaauaagaaaaucauuaccauaggcagcaucugcauggugacagggauggucucccugaugcuccagauuggaaaccuuaucucuauuuggguuucacacaguauccauacugguaaucaacacaaggccgagccuauaagcaacacgaauuuccugaccgaaaaagcuguggcauccguaaaguuggccggcaacucuucguuauguccaaucaaugggugggcggugcauucaaaagacaacagcauuagaaucggaaguaagggcgaugucuuugugauuagggagccguucaucuccugcucucaccuggaaugucggacauuuuuccuaacucagggugcucuccugaaugacaagcauagcaacgggaccguuaaagaucgcucaccccaccgaacacuuauguccugcccugugggagaggccccaagucccuacaauagccguuuugaaucugucgcaugguccgccucagcuugucacgacggcaccagcuggcugacuauaggcauuagugggccugauaacggagcaguggccguauugaaguauaaugguaucauuacagacaccaucaaaucuuggagaaacaauauccucaggacgcaggaguccgagugcgcuuguguuaacggcagcugcuucacugugaugaccgaugggccaucgaacggacaggccucucauaagauuuuuaaaauggaaaagggcaaggucgugaaauccguggagcuggacgcgcccaauuaccacuaugaagaguguucaugcuacccugaugccggugagauaacaugugucugccgggacaacuggcaugggaguaaucgcccauggguuagcuucaaccaaaaucuggaauaucagaucggauacauuugcuccggcguguuuggcgauaacccgagacccaaugacgggacuggaucuugugguccuguaagcucaaacggcgcauauggggugaagggauucaguuuuaaauacggcaauggugucuggaucgggaggaccaaguccacaaacagccggucuggcuucgagaugauaugggauccaaauggauggaccgaaacggacucaaguuuuagcgugaaacaggacauuguugcuaucacugauugguccggcuacucugggucguucgugcagcaccccgagcucacaggauuagacugcauccgcccuuguuucugggucgaacugauucgagguagaccaaaggagagcaccaucugggccuccggcucaaguauuucuuuuugcggggugaacagcgauacuguaggaugguccuggcccgacggcgcagagcuuccguucacaauagauaaauga

SEQ ID NO: 144364 - RNA, 1410 nt, Artificial Sequence; identical to SEQ ID NO: 143977
  derived and/or modified CDS sequence (opt3) from neuraminidase__InfluenzaA__ABX10527

SEQ ID NO: 144365 - RNA, 1413 nt, Artificial Sequence
  derived and/or modified CDS sequence (opt3) from neuraminidase__InfluenzaA__ABX58242
augaaccccaaucagaagaucauuaccauaggcagcaucuccauugccaucgggauuaucucucugaugcuccaaauaggaaacaucauuucaaucuggacaagucacagcauucagacugguucccagaaucauacgggcaucugcaaccagagaauaauuaccuacgaaaauucuacaugggugaaccacacuuaugucucgaucaauaacaccaauguuguggcugggaaagacaagacaucaguaacccuugcaggaaacagcagucuguguuccauuucuggcugggccaucuacacuaaagauaauagcaucaggauugguuccaagggggacguguucgucauacgggagccuuuuaucucaugcagucauuuggagugucgcacauucuuuuuaacccaaggagcgcugcuaaacgauaaacacagcaauggcacggugaaggaccgaucuccauaucgugcucucauguccugcccgcugggcgaagcccccucaccuuacaacagcaaguucgagaguguugcauggucugccuccgcuugucaugaugggaugggauggcuuacuauugguaucagcggcccagacaauggggcaguggccguccugaaauauaacggaauaauuaccgaaacaaucaagucguggaaaaagagaaucuugaggacucaggagucugagugcguguguguaaacggcuccugcuuuaccauuaugacagauggucccucaaauggggcugccaguuacaaaaucuucaagauugaaaagggaaaaguuaccaagagcauagagcucaacgcgccuaauuuucacuaugaagaguguuccugcuacccagacacgggcacugugaugugugucugccgggauaacuggcacggcucuaaucgccccugggugagcuucaaccagaaucuggacuaccagaucggguauauuugcucaggaguguuuggugauaacccuagaccaaaagacggcaaggggaguuguaauccggucacaguugauggagcagacggcgugaaagguuucuccuacaaguaugggaacggcguauggaucggaaggaccaaaagcaaucggcugcgcaagggcuuugagaugaucugggaccccaacggguggacugauacagacucugauuucucagugaagcaagacgucguggccauuaccgauuggaguggauacagcgguuccuuuguucagcauccugaacucacgggcuuagacugcauacgaccauguuucuggguggagcuggucagagggcuucccagggaaaauaccacaaucuggacuucuggaucgagcauuuccuucugcggcguggauucagacaccgcuaacuggaguuggccugauggugccgaguugccauuuacaaucgacaaauga

SEQ ID NO: 144366 - RNA, 1413 nt, Artificial Sequence; identical to SEQ ID NO: 144177
  derived and/or modified CDS sequence (opt3) from neuraminidase__InfluenzaA__ABX58253

SEQ ID NO: 144367 - RNA, 1413 nt, Artificial Sequence; identical to SEQ ID NO: 144078
  derived and/or modified CDS sequence (opt3) from neuraminidase__InfluenzaA__ABX58264

SEQ ID NO: 144368 - RNA, 1413 nt, Artificial Sequence; identical to SEQ ID NO: 144078
  derived and/or modified CDS sequence (opt3) from neuraminidase__InfluenzaA__ABX58275

SEQ ID NO: 144369 - RNA, 1413 nt, Artificial Sequence; identical to SEQ ID NO: 144078
  derived and/or modified CDS sequence (opt3) from neuraminidase__InfluenzaA__ABX58286

SEQ ID NO: 144370 - RNA, 1413 nt, Artificial Sequence
  derived and/or modified CDS sequence (opt3) from neuraminidase__InfluenzaA__ABX58297
augaaccccaaucagaagaucauuaccauaggcagcaucuccauugccaucgggauuaucucucugaugcuccaaauaggaaacaucauuucaaucugggcuagucacagcauucagacagguucccagaaucauacuggcaucugcaaccagaaaauaauuacguacgaaaauucuaccugggugaaccacacauaugucucgaucaauaacacuaauguuguggcagggaaggacaaaaccucaguaacacuugccggaaacagcagucuguguuccauuucuggcugggcgaucuacaccaaggauaauagcaucagaauugguuccaaaggggacguguucgucauaagggagccuuuuaucucaugcagucauuuggagugucggacuuucuuuuuaacacaaggagcucugcuaaacgauaagcacagcaauggcaccgugaaggaccgcucuccauaucgagcccucauguccugcccgcugggcgaagcacccucaccuuacaacagcaaauucgagaguguugccuggucugcuuccgcaugucaugaugggaugggauggcuuacgauugguaucagcggcccagacaauggggccguggcuguccugaaguauaacggaauaauuacugaaaccaucaaaucguggaagaaacguaucuugagaacacaggagucugagugcguguguguaaacggcuccugcuuuacuauuaugaccgauggucccucaaauggggccgcgaguuacaagaucuucaagauugaaaaaggaaagguuacaaaaagcauagagcucaacgcaccuaauuuucacuaugaagaguguuccugcuacccagacaccggcacggugaugugugucugcagggauaacuggcacggcucuaaucggcccugggugagcuucaaccagaaucuggacuaccagaucggguauauuugcucaggaguguuuggugauaacccucgcccaaaggacggcaaagggaguuguaauccggucacuguugauggagccgacggcgugaaggguuucuccuacaaauaugggaacggcguauggaucggaagaacaaagagcaauaggcugcggaagggcuuugagaugaucugggaccccaacggguggaccgauacugacucugauuucucagugaaacaagacgucguggcuauuacagauuggaguggauacagcgguuccuuuguucagcauccugaacucaccggcuuagacugcauacgcccauguuucuggguggagcugguccgagggcuucccagagaaaauacgaccaucuggacaucuggaucgagcauuuccuucugcggcguggauucagacacugccaacuggaguuggccugauggugcagaguugccauuuaccaucgacaaguga

SEQ ID NO: 144371 - RNA, 1413 nt, Artificial Sequence; identical to SEQ ID NO: 144249
  derived and/or modified CDS sequence (opt3) from neuraminidase__InfluenzaA__ABX58308

SEQ ID NO: 144372 - RNA, 1413 nt, Artificial Sequence
  derived and/or modified CDS sequence (opt3) from neuraminidase__InfluenzaA__ABX58319
augaaccccaaucagaagaucauuaccauaggcagcaucuccauugccaucgggauuaucucucugaugcuccaaauaggaaacaucauuucaaucugggcuagucacagcauucagacagguucccagaaucauacuggcaucugcaaccagagaauaauuacguacgaaaauucuaccugggugaaccacacauaugucucgaucaauaacacuaauguuguggcagggaaagacaagaccucaguaacacuugccggaaacagcagucuguguuccauuucuggcugggcgaucuacaccaaagauaauagcaucaggauugguuccaagggggacguguucgucauacgggagccuuuuaucucaugcagucauuuggagugucgcacuuucuuuuuaacacaaggagcucugcuaaacgauaaacacagcaauggcaccauuaaggaccgaucuccauaucgugcccucauguccugcccgcugggcgaagcacccucaccuuacaacagcaaguucgagaguguggccuggucugcuuccgcaugucaugaugggaugggauggcuuacgaucgguauaagcggcccagacaauggggccguugcugugcugaaauauaacggaauuaucacugaaaccaucaagucguggaaaaagagaauuuugaggacacaggagucugagugcgucugugugaacggcuccugcuuuacuaucaugaccgauggucccucaaauggggccgcgaguuacaaaauuuucaagauagaaaagggaaaaguaacaaagagcaucgagcucaacgcaccuaauuuucacuaugaagaguguuccugcuacccagacaccggcacgguuaugugugugugccgggauaacuggcacggcucuaaucgccccugggucagcuucaaccagaaucuggacuaccagauuggguauaucugcucaggaguguuuggugauaacccuagaccaaaagacggcaaggggaguuguaauccggugacugucgauggagccgacggcguuaaagguuucuccuacaaguaugggaacggcguguggaucggaaggacaaaaagcaaucggcugcgcaagggcuuugagaugauuugggaccccaacggguggaccgauacugacucugauuucucaguaaagcaagacguggucgcuauaacagauuggaguggauacagcgguuccuuugugcagcauccugaacucaccggcuuagacugcauccgaccauguuucuggguugagcuggugagagggcuucccagggaaaauacgaccauuuggacaucuggaucgagcaucuccuucugcggcgucgauucagacacugccaacuggaguuggccugauggugcagaguugccauuuaccauugacaaauga

SEQ ID NO: 144373 - RNA, 1413 nt, Artificial Sequence; identical to SEQ ID NO: 144249
  derived and/or modified CDS sequence (opt3) from neuraminidase__InfluenzaA__ABX58352

SEQ ID NO: 144374 - RNA, 1413 nt, Artificial Sequence; identical to SEQ ID NO: 144078
  derived and/or modified CDS sequence (opt3) from neuraminidase__InfluenzaA__ABX58363

SEQ ID NO: 144375 - RNA, 1413 nt, Artificial Sequence; identical to SEQ ID NO: 144078
  derived and/or modified CDS sequence (opt3) from neuraminidase__InfluenzaA__ABX58385

SEQ ID NO: 144376 - RNA, 1413 nt, Artificial Sequence; identical to SEQ ID NO: 144078
  derived and/or modified CDS sequence (opt3) from neuraminidase__InfluenzaA__ABX58396

SEQ ID NO: 144377 - RNA, 1413 nt, Artificial Sequence
  derived and/or modified CDS sequence (opt3) from neuraminidase__InfluenzaA__ABX58407
augaaccccaaucagaagaucauuaccauaggcagcaucuccauugccaucgggauuaucucucugaugcuccaaauaggaaacaucauuucaaucugggcuagucacagcauucagacagguucccagaaucauacuggcaucugcaaccagagaauaauuacguacgaaaauucuaccugggugaaccacacauaugucucgaucaauaacacuaauguuguggcagggaaagacaagaccucaguaacacuugccggaaacagcagucuguguccuauuuccggcugggcgaucuacaccaaagauaauucuaucaggauugguagcaagggggacguguucgucauacgggagccauuuaucuccugcucacauuuggagugucgcacuuucuuuuuaacacaaggagcucugcuaaacgauaaacacaguaauggcaccgugaaggaccgaagcccguaucgugcccucaugucuugcccccugggcgaagcaccuuccccauacaacucaaaguucgagagcguugccuggagugcuucugcaugucaugaugggaugggauggcuuacgauugguaucuccggccccgacaauggggccguggcuguccugaaauauaacggaauaauuacugaaaccaucaagagcuggaaaaagagaaucuugaggacacaggagucggagugcguguguguaaacggcucuugcuuuacuauuaugaccgaugguccuuccaauggggccgcgucauacaaaaucuucaagauugaaaagggaaaaguuacaaagaguauagagcucaacgcaccaaauuuucacuaugaagaguguagcugcuaccccgacaccggcacggugaugugugucugccgggauaacuggcacggcuccaaucgcccuugggugucuuucaaccagaaucuggacuaccagaucggguauauuugcagcggaguguuuggugauaacccaagaccgaaagacggcaaggggucauguaaucccgucacuguugauggagccgacggcgugaaagguuucaguuacaaguaugggaacggcguauggaucggaaggacaaaauccaaucggcugcgcaagggcuuugagaugaucugggacccuaacggguggaccgauacugacagcgauuucucugugaagcaagacgucguggcuauuacagauuggucaggauacagugguagcuuuguucagcauccagaacucaccggcuuagacugcauacgacccuguuucuggguggagcuggucagagggcuuccuagggaaaauacgaccaucuggacauccggaucuucgauuagcuucugcggcguggauuccgacacugccaacuggucauggccagauggugcagaguugcccuuuaccaucgacaaauga

SEQ ID NO: 144378 - RNA, 1413 nt, Artificial Sequence; identical to SEQ ID NO: 144119
  derived and/or modified CDS sequence (opt3) from neuraminidase__InfluenzaA__ABX58418

SEQ ID NO: 144379 - RNA, 1413 nt, Artificial Sequence; identical to SEQ ID NO: 144078
  derived and/or modified CDS sequence (opt3) from neuraminidase__InfluenzaA__ABX58429

SEQ ID NO: 144380 - RNA, 1413 nt, Artificial Sequence; identical to SEQ ID NO: 144078
  derived and/or modified CDS sequence (opt3) from neuraminidase__InfluenzaA__ABX58440

SEQ ID NO: 144381 - RNA, 1413 nt, Artificial Sequence
  derived and/or modified CDS sequence (opt3) from neuraminidase__InfluenzaA__ABX58451
augaaccccaaucagaagaucauuaccauaggcagcaucuccauugccaucgggacaauuucucugaugcuccaaaucggaaacauaaucucaauuugggcuagucacagcauccagacugguucccagaaucauacgggcauuugcaaccagagaaucauaaccuacgaaaauucuacaugggugaaccacacuuaugucucgauuaauaacaccaauguuguggcagggaaagacaagacaucaguaacccuugccggaaacagcagucuguguuccaucucuggcugggcgauuuacacuaaagauaauagcaucaggaucgguuccaagggggacguguucgucauucgggagccuuuuauaucaugcagucauuuggagugucgcacauucuuuuuaacccaaggagcucugcuaaacgauaaacacagcaauggcacggugaaggaccgaucuccauaucgugcccucauguccugcccgcugggcgaagcacccucaccuuacaacagcaaguucgagaguguugccuggucugcuuccgcaugucaugaugggaugggauggcuuacuaucgguauuagcggcccagacaauggggccguggcuguccugaaauauaacggaaucauaaccgaaacaauuaagucguggaaaaagagaaucuugaggacucaggagucugagugcguguguguaaacggcuccugcuuuaccaucaugacagauggucccucaaauggggccgcgaguuacaaaauuuucaagaucgaaaagggaaaaguuaccaagagcauugagcucaacgcaccuaauuuucacuaugaagaguguuccugcuacccagacacgggcacugugaugugugucugccgggauaacuggcacggcucuaaucgccccugggugagcuucaaccagaaucuggacuaccagauaggguauaucugcucaggaguguuuggugauaacccuagaccaaaagacggcaaggggaguuguaauccggucacaguugauggagccgacggcgugaaagguuucuccuacaaguaugggaacggcguauggauuggaaggaccaaaagcaaucggcugcgcaagggcuuugagaugaucugggaccccaacggguggacugauacagacucugauuucucagugaagcaagacgucguggcuaucaccgauuggaguggauacagcgguuccuuuguucagcauccugaacucacgggcuuagacugcauucgaccauguuucuggguggagcuggucagagggcuucccagggaaaauaccacaauauggacuucuggaucgagcaucuccuucugcggcguggauucagacaccgccaacuggaguuggccugauggugcagaguugccauuuacaauugacaaauga

SEQ ID NO: 144382 - RNA, 1413 nt, Artificial Sequence; identical to SEQ ID NO: 144119
  derived and/or modified CDS sequence (opt3) from neuraminidase__InfluenzaA__ABX58462

SEQ ID NO: 144383 - RNA, 1413 nt, Artificial Sequence; identical to SEQ ID NO: 144078
  derived and/or modified CDS sequence (opt3) from neuraminidase__InfluenzaA__ABX58473

SEQ ID NO: 144384 - RNA, 1413 nt, Artificial Sequence; identical to SEQ ID NO: 144119
  derived and/or modified CDS sequence (opt3) from neuraminidase__InfluenzaA__ABX58484

SEQ ID NO: 144385 - RNA, 1413 nt, Artificial Sequence
  derived and/or modified CDS sequence (opt3) from neuraminidase__InfluenzaA__ABX58495
augaaccccaaucagaagaucauuaccauaggcagcaucuccauugccaucgggauuaucucucugaugcuccaaauaggaaacaucauuucaaucugggcuagucacagcauucagacagguucccagaaucauacuggcaucugcaaccagagaauaauuacguacgaaaauucuaccugggugaaccacacauaugucucgaucaauaacacuaauguuguggcagggaaagacaagaccucaguaacacuugccggaaacagcagucuguguuccauuucuggcugggcgaucuacaccaaagauaauagcaucaggauugguuccaagggggacguguucgucauacgggagccuuuuaucucaugcagucauuuggagugucgcacuuucuuuuuaacacaaggagcucugcuaaacgauaaacacagcaaucgaaccgugaaggaccguucuccauauagagcccucauguccugcccgcugggcgaagcacccucaccuuacaacagcaaguucgagaguguugccuggucugcuuccgcaugucaugauggcaugggguggcuuacgauuggaaucagcgguccagacaauggcgccguggcuguccugaaauauaacgggauaauuacugaaaccaucaagucguggaaaaagaggaucuugcggacacaggagucugagugcguguguguaaacggauccugcuuuacuauuaugaccgauggccccucaaauggugccgcgaguuacaaaaucuucaagauugaaaaggggaaaguuacaaagagcauagagcucaacgcaccuaauuuucacuaugaagaguguuccugcuacccagacaccggaacggugaugugugucugccgcgauaacuggcacggcucuaauagacccugggugagcuucaaccagaaucuggacuaccagaucggcuauauuugcucagggguguuuggagauaacccuaggccaaaagacgguaagggcaguuguaauccggucacuguugauggggccgacggagugaaaggcuucuccuacaaguaugguaacgggguauggaucggccggacaaaaagcaaucgccugcgaaagggauuugagaugaucugggaccccaacggcuggaccgauacugacucugauuucucagugaagcaagacgucguggcuauuacagauuggaguggguacagcggauccuuuguucagcauccugaacucaccgguuuagacugcauaagaccauguuucuggguggagcuggucaggggccuuccccgggaaaauacgaccaucuggacaucugggucgagcauuuccuucugcggaguggauucagacacugccaacuggaguuggccugauggcgcagaguugccauuuaccaucgacaaauga

SEQ ID NO: 144386 - RNA, 1413 nt, Artificial Sequence; identical to SEQ ID NO: 144113
  derived and/or modified CDS sequence (opt3) from neuraminidase__InfluenzaA__ABX58506

SEQ ID NO: 144387 - RNA, 1413 nt, Artificial Sequence; identical to SEQ ID NO: 144119
  derived and/or modified CDS sequence (opt3) from neuraminidase__InfluenzaA__ABX58528

SEQ ID NO: 144388 - RNA, 1413 nt, Artificial Sequence; identical to SEQ ID NO: 144119
  derived and/or modified CDS sequence (opt3) from neuraminidase__InfluenzaA__ABX58539

SEQ ID NO: 144389 - RNA, 1413 nt, Artificial Sequence
  derived and/or modified CDS sequence (opt3) from neuraminidase__InfluenzaA__ABX58550
augaaccccaaucagaagaucauuaccauaggcagcaucuccauugccaucgggauuaucucucugaugcuccaaauaggaaacaucauuucaaucugggcuagucacagcauucagacagguucccagaaucauacuggcaucugcaaccagagaauaauuacguacgaaaauucuaccugggugaaccacacauaugucucgaucaauaacacuaauguuguggcagggaaagacaagaccucaguaacacuugccggaaacagcagucuguguuccauuucuggcugggcgaucuacaccaaagauaauagcaucaggauugguuccaagggggacguguucgucauacgggagccuuuuaucucaugcagucauuuggagugucgcacuuucuuuuuaacacaaggagcucugcuaaacgauaaacacagcaauggcaccgugaaggaccgaucuccauaucgugcccucauguccugcccgcugggcgaagcacccucaccuuacaacagcaaguucgagaguguugccuggucugcuuccgcaugucaugaugggaugggauggcuuacgauugguaucagcggcccagacaauggggccguggcuguccugaaauauaacggaauaauuacugaaaccaucaagucguggaaaaagagaaucuugaggacacaggagucugagugcguguguguaaacggcuccugcuuuacuauuaugaccgauggucccucaaauggggccgcgaguuacaaaaucuucaagauugaaaagggaaaaguuacaaagagcauagagcucaacgcaccuaauuuucacuaugaagaguguuccugcuacccagacaccggcacggugaugugugucugccgggauaacuggcacggcucuaaucgccccugggugagcuucaaccagaaucuggacuaccagaucggguauauuugcucaggaguguuuggugauaacccuagaccaaaagacggcaaggggaguuguaauccggucacuguugauggagccgacggcgugaaagguuucuccuacaaguaugggaacggcguauggaucggaaggacaaaaagcaaucggcugcgcaagggcuuugagaugaucugggaccccaacggguggaccgauacugacucugauuucucagugaagcaagacgucguggcuauuacagauuggaguggauacagcgguuccuuuguucagcauccugaacucaccggcuuagacugcauacgaccauguuucuggguggagcuggucagagggcuucccagggaaaauacgaccaucuggacaucuggaucgagcauuuccuucugcggcguggauucagacacugccaacuggaguuggccugauggugcagaguugccauuuaccguagacaaauga

SEQ ID NO: 144390 - RNA, 1413 nt, Artificial Sequence; identical to SEQ ID NO: 144078
  derived and/or modified CDS sequence (opt3) from neuraminidase__InfluenzaA__ABX58561

SEQ ID NO: 144391 - RNA, 1413 nt, Artificial Sequence
  derived and/or modified CDS sequence (opt3) from neuraminidase__InfluenzaA__ABX58572
augaaccccaaucagaagaucauuaccauaggcagcaucuccauugccaucgggauuaucucucugaugcuccaaauaggaaacaucauuucaaucugggcuagucacagcauucagacagguucccagaaucauacuggcaucugcaaccagagaauaauuacguacgaaaauucuaccugggugaaccacacauaugucucgaucaauaacacuaauguuguggcagggaaagacaagaccucaguaacacuugccggaaacagcagucuguguuccauuucuggcugggcgaucuacaccaaagauaauagcaucaggauugguuccaagggggacguguucgucauacgggagccuuuuaucucaugcagucauuuggagugucgcacuuucuuuuuaacacaaggagcucugcuaaacgauaaacacagcaauggcaccgugaaggaccgaucuccauaucgugcccucauguccugcccgcugggcgaagcacccucaccuuacaacagcaaguucgagaguguugccuggucugcuuccgcaugucaugaugggaugggauggcuuacgauugguaucagcggcccagacaauggggccguggcuguccugaaauauaacggaauaauuacugaaaccaucaagucguggaaaaagagaaucuugaggacacaggagucugagugcguguguguaaacggcuccugcuuuacuauuaugaccgauggucccucaaauggggccgcgaguuacaaaaucuucaagauugaaaagggaaaaguuacaaagagcauagagcucaacgcaccuaauuuucacuaugaagaguguuccugcuacccagacaccggcacggugaugugugucugccgggauaacuggcacggcucuaaucgccccugggugagcuucaaccagaaucuggacuaccagaucggguauauuugcucaggaguguuuggugauaacccuagaccaaaagacggcaaggggaguuguaauccgaugacugucgauggagccgacggcguuaaagguuucuccuacaaguaugggaacggcguguggaucggaaggacaaaaagcaaucggcugcgcaagggcuuugagaugaucugggaccccaacggguggaccgauacugacucugauuucucaguaaagcaagacguggucgcuauuacagauuggaguggauacagcgguuccuuugugcagcauccugaacucaccggcuuagacugcauacgaccauguuucuggguugagcuggugagagggcuucccagggaaaauacgaccaucuggacaucuggaucgagcauuuccuucugcggcgucgauucagacacugccaacuggaguuggccugauggugcagaguugccauuuaccaucgacaaauga

SEQ ID NO: 144392 - RNA, 1413 nt, Artificial Sequence; identical to SEQ ID NO: 144078
  derived and/or modified CDS sequence (opt3) from neuraminidase__InfluenzaA__ABX58583

SEQ ID NO: 144393 - RNA, 1413 nt, Artificial Sequence; identical to SEQ ID NO: 144078
  derived and/or modified CDS sequence (opt3) from neuraminidase__InfluenzaA__ABX58594

SEQ ID NO: 144394 - RNA, 1413 nt, Artificial Sequence; identical to SEQ ID NO: 144104
  derived and/or modified CDS sequence (opt3) from neuraminidase__InfluenzaA__ABX58605

SEQ ID NO: 144395 - RNA, 1413 nt, Artificial Sequence; identical to SEQ ID NO: 144104
  derived and/or modified CDS sequence (opt3) from neuraminidase__InfluenzaA__ABX58616

SEQ ID NO: 144396 - RNA, 1413 nt, Artificial Sequence; identical to SEQ ID NO: 144078
  derived and/or modified CDS sequence (opt3) from neuraminidase__InfluenzaA__ABX58627

SEQ ID NO: 144397 - RNA, 1413 nt, Artificial Sequence; identical to SEQ ID NO: 144078
  derived and/or modified CDS sequence (opt3) from neuraminidase__InfluenzaA__ABX58638

SEQ ID NO: 144398 - RNA, 1413 nt, Artificial Sequence
  derived and/or modified CDS sequence (opt3) from neuraminidase__InfluenzaA__ABX58682
augaaccccaaucagaagaucauuaccauaggcagcaucuccauugccaucgggauuaucucucugaugcuccaaauaggaaacaucauuucaaucugggcuagucacagcauucagacagguucccagaaucauacuggcaucugcaaccagagaauaauuacguacgaaaauucuaccugggugaaccacacauaugucucgaucaauaacacuaauguuguggcagggaaagacaagaccucaguaacacuugccggaaacagcagucuguguuccauuucuggcugggcgaucuacaccaaagauaauagcaucaggauugguuccaagggggacguguucgucauacgggagccuuuuaucucaugcagucauuuggagugucgcacuuucuuuuuaacacaaggagcucugcuaaacgauaaacacagcaauggcaccgugaaggaccgaucuccauaucgugcccucauguccugcccgcugggcgaagcacccucaccuuacaacagcaaguucgagaguguugccuggucugcuuccgcaugucaugaugggaugggauggcuuacgauugguaucagcggcccagacaauggggccguggcuguccugaaauauaacggaauaauuacugaaaccaucaagucguggaaaaagagaaucuugaggacacaggagucugagugcguguguguaaacggcuccugcuuuacuauuaugaccgauggucccucaaauggggccgcgaguuacaaaaucuucaagauugaaaagggaaaaguuacaaagagcauagagcucaacgcaccuaauuuucacuaugaagaguguuccugcuacccagacaccggcacgaugaugugugugugccgggauaacuggcacggcucuaaucgccccugggucagcuucaaccagaaucuggacuaccagaucggguauauuugcucaggaguguuuggugauaacccuagaccaaaagacggcaaggggaguuguaauccggugacugucgauggagccgacggcguuaaagguuucuccuacaaguaugggaacggcguguggaucggaaggacaaaaagcaaucggcugcgcaagggcuuugagaugaucugggaccccaacggguggaccgauacugacucugauuucucaguaaagcaagacguggucgcuauuacagauuggaguggauacagcgguuccuuugugcagcauccugaacucaccggcuuagacugcauacgaccauguuucuggguugagcuggugagagggcuucccagggaaaauacgaccaucuggacaucuggaucgagcauuuccuucugcggcgucgauucagacacugccaacuggaguuggccugauggugcagaguugccauuuaccaucgacaaauga

SEQ ID NO: 144399 - RNA, 1413 nt, Artificial Sequence
  derived and/or modified CDS sequence (opt3) from neuraminidase__InfluenzaA__ABX58693
augaaccccaaucagaagaucauuaccauaggcagcaucuccauugccaucgggauuaucucucugaugcuccaaauaggaaacaucauuucaaucugggcuagucacagcauucagacagguucccagaauaacacuggcaucugcaaucagagaauaauuacguacgagaacucuaccugggugaaucauacauaugucaacaucaauaacacuaauguuguggcagggaaagacaagaccucgguaacacuugccggaaacucaagccuguguaguauuuccggcugggcgaucuacaccaaagauaauucuaucaggauugguagcaagggggacguguucgucauacgggaaccuuuuaucuccugcucacacuuggagugucgcacuuucuuuuuaacacaaggagcucugcuaaacgauaaacauaguaauggcaccgugaaggaccgaagcccauaucgugcccucaugucuugcccgcugggcgaagcacccuccccuuacaacucaaaguucgagagcguugccuggagugcuucugcaugucacgaugggaugggauggcuuacgauugguaucuccggcccagacaacggggccguggcuguccugaaauauaauggaauaauuacuggcaccaucaagagcuggaaaaagcagaucuugagaacacaggaaucggagugcguguguaugaacgguucuugcuuuacuauuaugaccgaugggcccuccaauagggccgcgucauacaaaaucuucaagauugagaagggaaaaguaacaaagaguauagaacucaacgcaccuaauuuucauuaugaggaauguagcugcuacccagacaccggcaucguuaugugugugugccgggauaacuggcacggcuccaaucgccccugggucucuuucaaccagaaucuggacuaccaaauuggguauaucugcagcggagugcugggugauaacccuagaccagaggacggcgaggggucauguaauccggugacggucgauggagccgacggcguuaaagguuuuaguuacaaguaugacaacgggguguggaucggcaggacuaaauccaaucggcuccgcaagggauucgaaaugauuugggaucccaacggcuggacaaauaccgacagcgauuuuucuguaaaacaggacguggucgcuauaacugauuggucaggguacagugguagcuucgugcagcacccugaguuaacaggacuggacugcauccgaccauguuuuuggguugaacuugugagaggcuugcccagggagaacaccacgauuuggaccuccgggucuucgaucagcuucugcggagucaacuccgauacagccaauuggucauggccugacggcgcagaacugccauucacuauugauaaguga

SEQ ID NO: 144400 - RNA, 1413 nt, Artificial Sequence; identical to SEQ ID NO: 144249
  derived and/or modified CDS sequence (opt3) from neuraminidase__InfluenzaA__ABX58704

SEQ ID NO: 144401 - RNA, 1413 nt, Artificial Sequence; identical to SEQ ID NO: 144177
  derived and/or modified CDS sequence (opt3) from neuraminidase__InfluenzaA__ABX58715

SEQ ID NO: 144402 - RNA, 1350 nt, Artificial Sequence
  derived and/or modified CDS sequence (opt3) from neuraminidase__InfluenzaA__ABY19420
augaaccccaaucagaaggugaucaccauuggcagcauaugcauggucaucgggauuguuucccugaugcuccaaaucggaaacaugauuucuaucugggugucacacaguauacagacagguaaucagaaccagguagagccuaucauuaauacuaacuuccuuacgggcaaagccguggcuagcaucacccuggcaggaaauuccucuuuguguccaauuagagggugggccauccauucgaaggacaacucaauaaggauuggcagcaaaggugaugucuuugugauccgggaaccguucauuaguugcucccacuuagagugucgcacauuuuuccugacucaaggggcgcuacucaaugacaagcauucuaacggaaccguuaaagaucgaagcccccaccguacacugauguccugcccugugggcgaagcuccaucacccuacaauaguagauuugagagcgucgccuggucugcauccgccugucaugacggcaccucauggcuuacuaucgggaucagcggaccugauaacggugcuguggcaguacugaaguauaauggcauuauaacagacaccaucaagaguuggaggaacaauauuuugcggacgcaggaaucugagugcgccuguguuaacggguccugcuucacugugaugaccgauggaccaagcaacggccaggcuucguacaaaaucuuuaagauggagaaagguaaggucauaaaaucuguggaacucgacgcccccaauuaucacuacgaggaauguuccugcuauccugaugcgggggagauuacaugugugugccgcgacaacuggcacggaucaaauagaccaugggucaguuucaaccagaaucuggaguaccaaaucggcuauaucugcagcggcguuuuuggggauaacccgaggcccaaugacggaacugguuccuguggcccugugucucauaacggggcauacggaguaaagggcuucagcuuuaaguacgguaaugggguguggauuggccggaccaaaucaccaaacagucgcuccggauucgaaaugaucugggaucccaauggcuggagcgagacagacucuucauuuagugucaagcaggacauuguggccauaaccgauuggagcggguauuccggaucuuucguucagcacccugaacugacgggucucgacugcauccgaccauguuucuggguggaguuaauuagaggcaggcccaaagaaucgacugucuggacaagcggguccucaaucaguuuuugcggagugaacucugauaccguaagcugguccuggccggacggcgcugagcugccuuucucaaucgauaaguga

SEQ ID NO: 144403 - RNA, 1350 nt, Artificial Sequence
  derived and/or modified CDS sequence (opt3) from neuraminidase__InfluenzaA__ABY19421
augaaccccaaucagaagaucauuaccauaggcagcaucugcauggugauugggaucgucucccugaugcuccaaauuggaaacaugaucucuauauggguuucacacaguauccagacagguaaucagaaccagguggagccuauuaucaauacuaacuuccuuacgggcaaagccguagcuagcauuacccuggcaggaaauuccucuuuguguccaaucagagggugggccauacauucgaaggacaacucaauuaggaucggcagcaaaggugauguguuugucauucgggaaccguucaucaguugcucccacuuagagugucgcacauuuuuccugacucaaggggcgcuacucaaugacaagcauucuaacggaaccgugaaagaucgaagcccccaccguacacugauguccugcccuguuggcgaagcuccaucacccuacaauaguagauuugagagcguggccuggucugcauccgccugucaugacggcaccucauggcuuacuaucgggauuagcggaccugauaacggugcugucgcagugcugaaguauaauggcauaaucacagacaccauuaagaguuggaggaacaauaucuugcggacgcaggaaucugagugcgccuguguaaacggguccugcuucacuguuaugaccgauggaccaagcaacggccaggcuucguacaaaauauuuaagauggagaaagguaaggugauuaaaucugucgaacucgacgcccccaauuaucacuacgaggaauguuccugcuauccugaugcgggggagaucacaugugugugccgcgacaacuggcacggaucaaauagaccaugggugaguuucaaccagaaucuggaguaccaaaucggcuauauuugcagcggcgucuuuggggauaacccgaggcccaaugacggaacugguuccuguggcccuguuucucauaacggggcauacggagugaagggcuucagcuuuaaguacgguaaugggguauggaucggccggaccaaaucaccaaacagucgcuccggauucgaaaugauuugggaucccaauggcuggagcgagacagacucuucauuuagugugaagcaggacauagucgccaucaccgauuggagcggguauuccggaucuuucgugcagcacccugaacugacgggucucgacugcauucgaccauguuucuggguugaguuaaucagaggcaggcccaaagaaucgacuguguggacaagcggguccucaaucaguuuuugcggagucaacucugauaccgugagcugguccuggccggacggcgcugagcugccuuucucaauugauaaguga

SEQ ID NO: 144404 - RNA, 1413 nt, Artificial Sequence
  derived and/or modified CDS sequence (opt3) from neuraminidase__InfluenzaA__ABY51020
augaaccccaaucagaagaucauuaccauaggcagcaucuccauugccaucgggauuaucucucugaugcuccaaauaggaaacaucauuucaaucugggcuagucacagcauucagacagguucccagaaucauacuggcaucugcaaccagagaauaauuacguacgaaaauucuaccugggugaaccacacauaugucucgaucaauaacacuaauguuguggcagggaaagacaagaccucaguaacacuugccggaaacagcagucuguguuccauuucuggcugggcgaucuacaccaaagauaauagcaucaggauugguuccaagggggacguguucgucauacgggagccuuuuaucucaugcagucauuuggagugucgcacuuucuuuuuaacacaaggagcucugcuaaacgauaaacacagcaauggcaccgugaaggaccgaucuccauaucgugcccucauguccugcccgcugggcgaagcacccucaccuuacaacagcaaguucgagaguguugccuggucugcuuccgcaugucaugaugggaugggauggcuuacgauugguaucagcggcccagacaauggggccguggcuguccugaaauauaacggaauaauuacugaaaccaucaagucguggaaaaagagaaucuugaggacacaggagucugagugcguguguguaaacggcuccugcuuuacuauuaugaccgauggucccucaaauggggccgcgaguuacaaaaucuucaagauugaaaagggaaaaguuacaaagagcauagagcucaacgcaccuaauuuucacuaugaagaguguuccugcuacccagacaccggcacggugaugugugucugccgggauaacuggcacggcucuaaucgccccugggugagcuucaaccagaaucuggacuaccagaucggguauauuugcucaggaguguuuggugauaacccuagaccaaaagacggcaaggggaguuguaauccgcugacugucgauggagccgacggcguuaaagguuucuccuacaaguaugggaacggcguguggaucggaaggacaaaaagcaaucggcuccgcaagggcuuugagaugaucugggaccccaacggguggaccgauacugacucugauuucucaguaaagcaagacguggucgcuauuacagauuggaguggauacagcgguuccuuugugcagcauccugaauuaaccggccuggacugcauacgaccauguuucuggguugagcuugugagaggguugcccagggaaaauacgaccaucuggacaucuggaucgagcauuuccuucugcggcgucgauucagacacugccaacuggaguuggccugauggugcagagcugccauuuaccaucgacaaauga

SEQ ID NO: 144405 - RNA, 1410 nt, Artificial Sequence; identical to SEQ ID NO: 144114
  derived and/or modified CDS sequence (opt3) from neuraminidase__InfluenzaA__ABY51031

SEQ ID NO: 144406 - RNA, 1413 nt, Artificial Sequence
  derived and/or modified CDS sequence (opt3) from neuraminidase__InfluenzaA__ABY51042
augaaccccaaucagaagaucauuaccauaggcagcaucuccauugccaucgggauuaucucucugaugcuccaaauaggaaacaucauuucaaucugggcuagucacagcauucagacagguucccagaaucauacuggcaucugcaaccagagaauaauuacguacgagaauagcaccugggugaaccacacauaugucaauaucaacaauacuaacguuguggcagggaaagacaagaccucgguaacacuugccggaaauucaagccuguguaguauuuccggcugggcgaucuacaccaaagauaacucuaucaggauugguagcaagggggacguguucgucauacgggaaccuuuuaucuccugcucacauuuggagugucgcacuuucuuuuuaacacaaggagcucugcuaaaugauaaacacaguaacggcaccgugaaggaccgaagcccauaucgugcccucaugucuugcccgcugggcgaagcacccuccccuuacaauucaaaguucgagagcguugccuggagugcuucugcaugucaugaugggaugggauggcuuacgauugguaucuccggcccagacaacggggccguggcuguccugaaauauaacggaauaauuacuggcaccaucaagagcuggaaaaagcagaucuugagaacacaggaaucggagugcguguguaugaaugguucuugcuuuacuauuaugaccgaugggcccuccaacagggccgcgucauacaaaaucuucaagauugagaagggaaaaguaacaaagaguauagaacucaaugcaccuaacuuucacuaugaggaauguagcugcuacccagacaccggcaucguuaugugugugugccgggauaauuggcacggcuccaaccgccccugggucucuuucaaucagaaccuggacuaccaaauuggguauaucugcagcggaguguuuggugauaauccuagaccaaaagacggcgaggggucauguaacccggugacggucgauggagccgacggcguuaaggguuucaguuacaaauaugacaaugggguguggaucggcaggacuaaguccaaccggcugcgcaaaggauuugagaugauuugggaucccaauggcuggacaaacaccgacagcgauuucucuguaaagcaggacguggucgcuauaacugauuggucaggguacaguggaucuuuugugcagcauccugaacucacagguuuagacugcauccgaccauguuucuggguugagcuggugagaggccuucccagggaaaauaccacgauuuggaccuccgggucuucgaucagcuucugcggagucaacuccgauacagccaacuggucauggccugacggcgcagaguugccauuuacuauugauaaguga

SEQ ID NO: 144407 - RNA, 1413 nt, Artificial Sequence
  derived and/or modified CDS sequence (opt3) from neuraminidase__InfluenzaA__ABY51053
augaaccccaaucagaagaucauuaccauaggcagcaucuccauugccaucgggauuaucucucugaugcuccaaauaggaaacaucauuucaaucugggcuagucacagcauucagacagguucccagaauaacacuggcaucugcaaucagagaauaauuacguacgagaacucuaccugggugaaucauacauaugucaacaucaauaacacuaauguuguggcagggaaagacaagaccucgguaacacuugccggaaacucaagccuguguaguauuuccggcugggcgaucuacaccaaagauaauucuaucaggauugguagcaagggggacguguucgucauacgggaaccuuuuaucuccugcucacacuuggagugucgcacuuucuuuuuaacacaaggagcucugcuaaacgauaaacauaguaauggcaccgugaaggaccgaagcccauaucgugcccucaugucuugcccgcugggcgaagcacccuccccuuacaacucaaaguucgagagcguugccuggagugcuucugcaugucacgaugggaugggauggcuuacgauugguaucuccggcccagacaacggggccguggcuguccugaaauauaauggaauaauuacuggcaccaucaagagcuggaaaaagcagaucuugagaacacaggaaucggagugcguguguaugaacgguucuugcuuuacuauuaugaccgaugggcccuccaauagggccgcgucauacaaaaucuucaagauugagaagggaaaaguaacaaagaguauagaacucaacgcaccuaauuuucauuaugaggaauguagcugcuacccagacaccggcaucguuaugugugugugccgggauaacuggcacggcuccaaucgccccugggucucuuucaaccagaaucuggacuaccaaauuggguauaucugcagcggaguguuuggugauaacccuagaccagaggacggcgaggggucauguaauccggugacggucgauggaacugacggcguuaaagguuucaguuacaaguaugacaacgggguguggaucggcaggacaaaauccaaucggcugcgcaagggauuugaaaugauuugggaucccaacggcuggaccaauacugacagcgauuucucuguaaaacaggacguggucgccauaacagauuggucaggguacagugguagcuuugugcagcacccugagcucaccggauuagacugcauccgaccauguuucuggguugaacuggugagaggccuucccagggagaacacgaccauuuggacauccgggucuucgaucagcuucugcggagucaacuccgauacugcuaauuggucauggccugacggcgccgaauugccauuuaccauugauaaguga

SEQ ID NO: 144408 - RNA, 1413 nt, Artificial Sequence; identical to SEQ ID NO: 144177
  derived and/or modified CDS sequence (opt3) from neuraminidase__InfluenzaA__ABY51064

SEQ ID NO: 144409 - RNA, 1413 nt, Artificial Sequence; identical to SEQ ID NO: 144078
  derived and/or modified CDS sequence (opt3) from neuraminidase__InfluenzaA__ABY51075

SEQ ID NO: 144410 - RNA, 1413 nt, Artificial Sequence
  derived and/or modified CDS sequence (opt3) from neuraminidase__InfluenzaA__ABY51086
augaaccccaaucagaagaucauuaccauaggcagcaucuccauugccaucgggauuaucucuauaaugcugcaaaucggaaacauuaucucaauuugggcuagucacagcauccagacagguucccagaaucauacuggcauaugcaaccagagaauuaucacguacgaaaauucuaccugggugaaccacacauaugucaauauuaacaauacuaacguuguggcagagaaagacaagaccucgguaacacucgccggaaauucaagccuuuguaguaucuccggaugggcgaucuacaccaaagauaacucuauuaggauaggcagcaagggugacguguucgucauccgggagccuuuuauuuccugcucacaucuggaaugucgcacuuucuuuuugacacaaggggcuuuacugaaugauaaacacaguaacggaaccgugaaggaccgaagcccauaucgugcccuaaugucuugcccgcucggcgaggcacccuccccuuacaauucaaaguucgaaagcguugccuggagugcuucugcaugucaugauggcaugggguggcugacgaucggaauauccgguccagacaacggcgccguggcuguccuuaaauauaacgggauuaucacugagaccaucaagagcuggaaaaagaggauucugagaacacaggagucggaaugcguguguguaaauggaucuugcuuuacuaucaugaccgauggccccuccaacggugccgcgucauacaaaauuuucaagauagagaaggggaaaguuacaaagaguaucgaauugaaugcaccuaacuuucacuaugaggaguguagcugcuacccagacaccggaacggugaugugugucugccgggauaauuggcacggcuccaaccgccccugggugucuuucaaucagaaccucgacuaccagauuggcuauaucugcagcgggguguuuggagauaauccuagaccaaaagacgguaagggcucauguaacccggucacuguugauggggccgacggaaucaaaggcuucaguuacaaguaugguaaugggguguggauuggcaggacaaaauccaaccggcugcgcaagggauuugaaaugauaugggaccccaauggcuggaccaacacugauagcgacuucucuguaaagcaagauguggucgcuaucacagacuggucaggguacagugggagcuuugugcagcauccugagcugaccggucucgauugcauucgaccauguuucuggguugaauuagugagaggccugcccagggagaauacgaccaucuggacauccgggucuucgauuagcuucugcggagucgacggcgauacugccaacugguccuggccugacggugcagaacuuccauuuaccaucgauaaauga

SEQ ID NO: 144411 - RNA, 1413 nt, Artificial Sequence
  derived and/or modified CDS sequence (opt3) from neuraminidase__InfluenzaA__ABY51097
augaaccccaaucagaagaucauuaccauaggcagcaucuccauugccaucgggauuaucucucugaugcuccaaauaggaaacaucauuucaaucugggcuagucacagcauucagacagguucccagaaucauacuggcaucugcaaccagagaauaauuacguacgaaaauucuaccugggugaaccacacauaugucucgaucaauaacacuaauguuguggcagggaaagacaagaccucaguaacacuugccggaaacagcagucuguguuccauuucuggcugggcgaucuacaccaaagauaauagcaucaggauugguuccaagggggacguguucgucauacgggagccuuuuaucucaugcagucauuuggagugucgcacuuucuuuuuaacacaaggagcucugcuaaacgauaaacacagcaauggcaccgugaaggaccgaucuccauaucgugcccucauguccugcccgcugggcgaagcacccucaccuuacaacagcaaguucgagaguguugccuggucugcuuccgcaugucaugaugggaugggauggcuuacgauugguaucagcggcccagacaauggggccguggcuguccugaaauauaacggaauaauuacugaaaccaucaagucguggaaaaagagaaucuugaggacacaggagucugagugcguguguguaaacggcuccugcuuuacuauuaugaccgauggucccucaaauggggccgcgaguuacaaaaucuucaagauugaaaagggaaaaguuacaaagagcguggagcucaacgcaccuaauuuucacuaugaagaguguuccugcuacccagacaccggcacggucaugugugugugccgggauaacuggcacggcucuaaucgccccugggugagcuucaaccagaaucuggacuaccagauaggguauaucugcucaggagucuuuggugauaacccuagaccaaaagacggcaaggggaguuguaauccgguuacuguggauggagccgacggcguaaaagguuucuccuacaaguaugggaacggcguguggauuggaaggacaaaaagcaaucggcugcgcaagggcuuugagaugaucugggaccccaacggguggaccgauacugacucugauuucucagucaagcaagacgugguugcuaucacagauuggaguggauacagcgguuccuuugugcagcauccugaacucaccggcuuagacugcauucgaccauguuucugggucgagcuggugagagggcuucccagggaaaauacgaccauauggacaucuggaucgagcaucuccuucugcggcguagauucagacacugccaacuggaguuggccugauggugcagaguugccauuuaccauugacaaauga

SEQ ID NO: 144412 - RNA, 1413 nt, Artificial Sequence
  derived and/or modified CDS sequence (opt3) from neuraminidase__InfluenzaA__ABY51108
augaaccccaaucagaagaucauuaccauaggcagcaucuccauugccaucgggauuaucucucugaugcuccaaauaggaaacaucauuucaaucugggcuagucacagcauucagacagguucccagaaucauacuggcaucugcaaccagagaauaauuacguacgaaaauucuaccugggugaaccacacauaugucucgaucaauaacacuaauguuguggcagggaaagacaagaccucaguaacacuugccggaaacagcagucuguguuccauuucuggcugggcgaucuacaccaaagauaauagcaucaggauugguuccaagggggacguguucgucauacgggagccuuuuaucucaugcagucauuuggagugucgcacuuucuuuuuaacacaaggagcucugcuaaacgauaaacacagcaauggcaccgugaaggaccgaucuccauaucgugcccucauguccugcccgcugggcgaagcacccucaccuuacaacagcaaguucgagaguguugccuggucugcuuccgcaugucaugaugggaugggauggcuuacgauugguaucagcggcccagacaauggggccguggcuguccugaaauauaacggaauaauuacugaaaccaucaagucguggaaaaagagaaucuugaggacacaggagucugagugcguguguguaaacggcuccugcuuuacuauuaugaccgauggucccucaaauggggccgcgaguuacaaaaucuucaagauugaaaagggaaaaguuacaaagagcauagagcucaacgcaccuaauuuucacuaugaagaguguuccugcuacccagacaccggcacggugaugugugucugccgggauaacuggcacggcucuaaucgccccugggugagcuucaaccagaaucuggacuaccagaucggguauauuugcucaggaguguuuggugauaacccuagaccaaaagacggcaaggggaguuguaauccggucacuguugauggagccgacggcgugaaagguuucuccuacaaguaugggaacggcguauggaucggaaggacaaaaagcaaucggcugcgcaagggcuuugagaugaucugggaccccaacggguggaccgauacugacucugauuucucagugaagcaagacauugucgcuauaacagauuggaguggauacagcgguuccuuugugcagcauccugaacucaccggcuuagacugcauccgaccauguuucuggguugagcuggugagagggcuucccagggaaaauacgaccauuuggacaucuggaucgagcaucuccuucugcggcgucgauucagacacugccaacuggaguuggccugauggugcagaguugccauuuaccauugacaaauga

SEQ ID NO: 144413 - RNA, 1413 nt, Artificial Sequence; identical to SEQ ID NO: 144078
  derived and/or modified CDS sequence (opt3) from neuraminidase__InfluenzaA__ABY51119

SEQ ID NO: 144414 - RNA, 1410 nt, Artificial Sequence; identical to SEQ ID NO: 143932
  derived and/or modified CDS sequence (opt3) from neuraminidase__InfluenzaA__ABY51130

SEQ ID NO: 144415 - RNA, 1413 nt, Artificial Sequence; identical to SEQ ID NO: 144119
  derived and/or modified CDS sequence (opt3) from neuraminidase__InfluenzaA__ABY51141

SEQ ID NO: 144416 - RNA, 1413 nt, Artificial Sequence
  derived and/or modified CDS sequence (opt3) from neuraminidase__InfluenzaA__ABY51152
augaaccccaaucagaagaucauuaccauaggcagcaucuccauugccaucgggauuaucucucugaugcuccaaauaggaaacaucauuucaaucugggcuagucacagcauucagacagguucccagaaucauacuggcaucugcaaccagagaauaauuacguacgaaaauucuaccugggugaaccacacauaugucucgaucaauaacacuaauguuguggcagggaaagacaagaccucaguaacacuugccggaaacagcagucuguguuccauuucuggcugggcgaucuacaccaaagauaauagcaucaggauugguuccaagggggacguguucgucauacgggagccuuuuaucucaugcagucauuuggagugucgcacuuucuuuuuaacacaaggagcucugcuaaacgauaaacacagcaauggcaccgugaaggaccgaucuccauaucgugcccucauguccugcccgcugggcgaagcacccucaccuuacaacagcaaguucgagaguguugccuggucugcuuccgcaugucaugaugggaugggauggcuuacgauugguaucagcggcccagacaauggggccguggcuguccugaaauauaacggaauaauuacugaaaccaucaagucguggaaaaagagaaucuugaggacacaggagucugagugcguguguguaaacggcuccugcuuuacuauuaugaccgauggucccucaaauggggccgcgaguuacaaaaucuucaagauugaaaagggaaaaguuacaaagagcauagagcucaacgcaccuaauuuucacuaugaagaguguuccugcuacccagacaccggcacggugaugugugucugccgggauaacuggcacggcucuaaucgccccugggugagcuucaaccagaaucuggacuaccagaucggguauauuugcucaggaguguuuggugauaacccuagaccaaaagacggcaaggggaguuguaauccggucacuguugauggagccgacggcgugaaagguuucuccuacaaguaugggaacggcguauggaucggaaggacaaaaagcaaucggcugcgcaagggcuuugagaugaucugggaccccaacggguggaccgauacugacucugauuucucagugaagcaagacgucguggcuauuacagauuggaguggauacagcgguuccuuuguucagcauccugaacucaccggcuuagacugcauacgaccauguuucuggguggagcuggucagagggcuucccagggaaaauacgaccaucuggacaucuggaucgagcauuuccuucugcggcgugaacucagauacugccaauuggaguuggccugacggugcagaguugccauuuaccaucgauaaauga

SEQ ID NO: 144417 - RNA, 1413 nt, Artificial Sequence
  derived and/or modified CDS sequence (opt3) from neuraminidase__InfluenzaA__ABY51163
augaaccccaaucagaagaucauuaccauaggcagcaucuccauugccaucgggauuaucucucugaugcuccaaauaggaaacaucauuucaaucugggcuagucacagcauucagacagguucccagaaucauacuggcaucugcaaccagagaauaauuacguacgaaaauucuaccugggugaaccacacauaugucaauaucaacaauacuaacguuguggcagggaaagacaagaccucgguaauucuugccggaaauucaagccuguguaguaucuccggcugggcgaucuacacaaaagauaacucuauuaggauagguagcaagggggacguguucgucauccgggagccuuuuauuuccugcucacauuuggagugucgcaccuucuuuuuaacucaaggagcucugcuaaaugauaaacacaguaacggcacagugaaggaccgaagcccauaucgugcccucaugucuugcccgcugggcgaagcacccuccccuuacaauucaaaguucgagagcguugccuggagugcuucugcaugucaugaugggaugggauggcuuaccaucgguauauccggcccagacaacggggccguggcuguccugaaauauaacggaauuaucacggaaacuaucaagagcuggaaaaagagaauuuugaggacccaggagucggagugcguguguguaaauggcucuugcuuuacaaucaugacugauggucccuccaacggggccgcgucauacaaaauuuucaagauagaaaagggaaaaguuaccaagaguaucgagcucaaugcaccuaacuuucacuaugaagaguguagcugcuacccagacacaggcaccgugaugugugucugccgggauaauuggcacggcuccaaccgccccugggugucuuucaaucagaaccuggacuaccagauuggguauaucugcagcggaguguuuggugauaauccuagaccaaaagacggcaaggggucauguaacccggucacgguugauggagccgacggcgugaaagguuucaguuacaaguaugggaauggcguauggaucggaaggacuaaauccaaccggcugcgcaagggcuuugagaugauuugggaccccaauggguggacagauaccgacagcgauuucucugugaagcaagacgucguggcuauaacugauuggucaggauacagugguagcuuuguucagcauccugaacucacaggcuuagacugcauccgaccauguuucuggguggagcuggucagagggcuucccagggaaaacaccacgauuuggaccuccggaucuucgaucagcuucugcggcguggauuccgacacagccaauuggucauggccugauggugcagaguugccauuuacuauugacaaauga

SEQ ID NO: 144418 - RNA, 1413 nt, Artificial Sequence
  derived and/or modified CDS sequence (opt3) from neuraminidase__InfluenzaA__ABY51174
augaaccccaaucagaagaugaucaccauuggcagcauauccaucgccauugggaucauuucucugaugcuccaaaucggaaacauaaucucaauuugggcuagucacagcauccagacagguucccagaaucauacuggcauuugcaaccagagaaucauaacguacgagaauagcaccugggugaaccacacauaugucaauauuaacaauacuaacguuguggcagggaaagacaagaccucgguaacacuugccggaaauucaagccuguguaguaucuccggcugggcgauuuacaccaaagauaacucuaucaggaucgguagcaagggggacguguucgucauucgggaaccuuuuauauccugcucacauuuggagugucgcacuuucuuuuuaacacaaggagcucugcuaaaugauaaacacaguaacggcaccgugaaggaccgaagcccauaucgugcccucaugucuugcccgcugggcgaagcacccuccccuuacaauucaaaguucgagagcguugccuggagugcuucugcaugucaugaugggaugggauggcuuacgaucgguauuuccggcccagacaacggggccguggcuguccugaaauauaacggaaucauaacugaaaccauuaagagcuggaaaaagagaaucuugaggacacaggagucggagugcguguguguaaauggcucuugcuuuacuaucaugaccgauggucccuccaacggggccgcgucauacaaaauuuucaagaucgaaaagggaaaaguuacaaagaguauugagcucaaugcaccuaacuuucacuaugaagaguguagcugcuacccagacaccggcacggugaugugugucugccgggauaauuggcacggcuccaaccgccccugggugucuuucaaucagaaccuggacuaccaggugggguauauaugcagcggagucuuuggugauaauccuagaccaaaagacggcaaggggucauguaacccgaugacuguugauggagccgacggcgugaaagguuucaguuacaaguaugggaauggcguauggaucggaaggacaaaauccaacaagcugcggaagggcuuugagaugauuugggaccccaauggguggaccgauacugacagcgauuucucugugaaacaagacgucguggcuaucacagauuggucaggauacagugguagcuuuguucagcauccugaacucaccggcuuagacugcauccgcccauguuucuggguggagcugguccgagggcuucccagagaaaacacgaccauuuggacauccggaucuucgauaucuuucugcggcguggauuccgacacugccaauuggucauggccugauggugcagaguugccauuuaccaucgacaaguga

SEQ ID NO: 144419 - RNA, 1413 nt, Artificial Sequence; identical to SEQ ID NO: 144078
  derived and/or modified CDS sequence (opt3) from neuraminidase__InfluenzaA__ABY51185

SEQ ID NO: 144420 - RNA, 1413 nt, Artificial Sequence; identical to SEQ ID NO: 144113
  derived and/or modified CDS sequence (opt3) from neuraminidase__InfluenzaA__ABY51196

SEQ ID NO: 144421 - RNA, 1410 nt, Artificial Sequence; identical to SEQ ID NO: 144114
  derived and/or modified CDS sequence (opt3) from neuraminidase__InfluenzaA__ABY51229

SEQ ID NO: 144422 - RNA, 1413 nt, Artificial Sequence
  derived and/or modified CDS sequence (opt3) from neuraminidase__InfluenzaA__ABY51240
augaaccccaaucagaagaucauuaccauaggcagcaucuccauugccaucgggauuaucucucugaugcuccaaauaggaaacaucauuucagugugggcuagucacagcauccagacagguucccagaaucauacuggcauuugcaaccagagaaucauaacguacgaaaauucuaccugggucaaccacacauauguuucgauuaauaacacuaaugugguagcagggaaagacaagaccucagugacacuugccggaaacagcagucuguguuccaucucuggcuggagcauuuacaccaaagauaauuccaucaggaucgguucaaagggggacgucuucgugauucgggagccuuuuauaaguugcagccauuuggagugucgcacuuucuuuuuaacacaaggagcgcugcuaaacgauaaacacucuaauggcaccguuaaggaccgauccccauaucgugcucucaugucaugcccgcugggcgaagcccccagcccuuacaacaguaaguucgagucuguggcaugguccgccagcgcuugucaugaugggaugggauggcuuacgaucgguauuucgggcccagacaauggggcagucgccgugcugaaauauaacggaaucauaacugaaaccauuaagucuuggaaaaagagaaucuugaggacacaggaguccgagugcguauguguuaacggcucaugcuuuacuaucaugaccgauggucccaguaauggggcugccagcuacaaaauuuucaagaucgaaaagggaaaagugacaaaguccauugagcucaacgcgccuaauuuucacuaugaagaguguucuugcuacccagacaccggcacggucaugugugugugccgggauaacuggcacggcagcaaucgccccugggugucauucaaccagaaucuggacuaccagauaggguauaucugcaguggagucuuuggugauaacccuagaccaaaagacggcaagggguccuguaauccgguuacuguggauggagcagacggcguaaaagguuucagcuacaaguaugggaacggcguguggauuggaaggacaaaaucuaaucggcugcgcaagggcuuugagaugaucugggaccccaacggguggaccgauacugacucagauuucagugucaagcaagacgugguugccaucacagauuggagcggauacuccgguucuuuugugcagcauccugaacucaccggcuuagacugcauucgaccauguuucugggucgagcuggugagagggcuucccagggaaaauacgaccauauggacaucgggaagcuccaucucauucugcggcguagauagugacacugcuaacuggucuuggccugauggugccgaguugccauuuaccauugacaaauga

SEQ ID NO: 144423 - RNA, 1413 nt, Artificial Sequence; identical to SEQ ID NO: 144104
  derived and/or modified CDS sequence (opt3) from neuraminidase__InfluenzaA__ABY51251

SEQ ID NO: 144424 - RNA, 1413 nt, Artificial Sequence
  derived and/or modified CDS sequence (opt3) from neuraminidase__InfluenzaA__ABY51262
augaaccccaaucagaagaucauuaccauaggcagcaucuccauugccaucgggauuaucucucugaugcuccaaauaggaaacaucauuucaaucugggcuagucacagcauucagacagguucccagaaucauacuggcaucugcaaccagagaauaauuacguacgaaaauucuaccugggugaaccacacauaugucucgaucaauaacacuaauguuguggcagggaaagacaagaccucaguaacacuugccggaaacagcagucuguguuccauuucuggcugggcgaucuacaccaaagauaauagcaucaggauugguuccaagggggacguguucgucauacgggagccuuuuaucucaugcagucauuuggagugucgcacuuucuuuuuaacacaaggagcucugcuaaacgauaaacacagcaauggcaccgugaaggaccgaucuccauaucgugcccucauguccugcccgcugggcgaagcacccucaccuuacaacagcaaguucgagaguguugccuggucugcuuccgcaugucaugaugggaugggauggcuuacgauugguaucagcggcccagacaauggggccguggcuguccugaaauauaacggaauaauuacugaaaccaucaagucguggaaaaagagaaucuugaggacacaggagucugagugcguguguguaaacggcuccugcuuuacuauuaugaccgauggucccucaaauggggccgcgaguuacaaaaucuucaagauugaaaagggaaaaguuacaaagagcauagagcucaacgcaccuaauuuucacuaugaagaguguuccugcuacccagacaccggcacggugaugugugucugccgggauaacuggcacggcucuaaucgccccugggugagcuucaaccagaaucuggacuaccagaucggguauauuugcucaggaguguuuggugauaacccuagaccaaaagacggcaaggggaguuguaauccggucacuguugauggagccgacggcgugaaagguuucuccuacaaguaugggaacggcguauggaucggaaggacaaaaagcaaucggcugcgcaagggcuuugagaugaucugggaccccaacggguggaccgauacugacucugauuucucagugaagcaagacgucguggcuauuacagauuggaguggauacagcgguuccuuuguucagcauccugaacucaccggcuuagacugcauacgaccauguuucuggguggagcuggucagagggcuucccagggaaaaugccacgaucuggaccucuggaucgagcauuuccuucugcggcguggauucagacacagcaaacuggaguuggccugauggugcugaguugccauuuacuaucgacaaauga

SEQ ID NO: 144425 - RNA, 1410 nt, Artificial Sequence; identical to SEQ ID NO: 143932
  derived and/or modified CDS sequence (opt3) from neuraminidase__InfluenzaA__ABY51273

SEQ ID NO: 144426 - RNA, 1350 nt, Artificial Sequence
  derived and/or modified CDS sequence (opt3) from neuraminidase__InfluenzaA__ABY76285
augaaccccaaucagaagaucauuaccauaggcagcaucugcauggugauugggaucgucucccugaugcuccaaauuggaaacaugaucucuauauggguuucacacaguauccagacagguaaucagagacaggccgagccuauuagcaacacuaaauuccuuacggaaaaggcuguggcauccguaacccuggccggcaauucuucguuguguccaaucucagggugggcgguguacagcaaagacaacaguauuaggaucggauccaagggcgaugucuuugugauacgggagccguucauuucuugcagccauuuagaaugucgcacauuuuuccugacucaaggugcucuacucaaugacaaacacuccaacgggaccguuaaggaucgaucaccccaucguacacugaugaguugcccugugggagaggccccaagccccuauaauucuagauuugaauccgucgcauggucagccagcgcuugucacgacggcaccaguuggcuuacuaucggcauuucugggccugauaacggagcaguggccguacugaaguacaaugguaucaucacagacaccauuaaauccuggaggaacaauauauugcggacgcaggagagcgagugcgcuuguguuaacggcucgugcuucacugugaugaccgaugggccaucuaauggacaggccuccuauaagaucuuuaaaauggaaaagggcaaagucgugaagucaguggagcucgacgcgcccaacuaccauuaugaagaguguaguugcuacccugaugccggugagauuacaugugucugccgcgacaacuggcacgggagcaauagaccauggguuuccuucaaccagaaucuggaauaucaaaucggauacauaugcucuggcguguuuggcgauaacccgaggcccaaugacgggacuggaagcugugguccuguaucaccaaacggcgcauacggggugaagggauucaguuuuaaauauggcaauggugucuggauugggcggaccaaguccacaaacagccgcucuggcuucgagaugaucugggaucccaauggauggaccggcacggacucaaguuuuagcgugaaacaggacaucguugcuauuacugauugguccggguacucuggaucguucgugcagcacccugaacugacaggucucgacugcauccgaccauguuucugggucgaguuaauuagaggcaggcccaaggaaagcaccauauggacuuccgggucaaguaucucuuuuugcggagugaacagcgauacaguauccuggucauggccggacggcgccgagcugccuuucaccauugauaaauga

SEQ ID NO: 144427 - RNA, 1413 nt, Artificial Sequence
  derived and/or modified CDS sequence (opt3) from neuraminidase__InfluenzaA__ABY81352
augaaccccaaucagaagaucauuaccauaggcagcaucugcauggccauugggaucauuucccugauccuccaaauaggaucuaucauuucaaucugggugagucacagcauucagacagguucccagaaccauacuggcaucuguaaucagagaauaauuacguacgagaacucuaccugggucaaucaaacauauguuaacaucucgaauacuaacgugguagcugggaaagacaccacaucaaugacccuugcaggaaauagcagucugugcccuauuaggggcugggccaucuacuccaaggauaacucuauccggauugguagcaaaggggacguguucgucauacgcgaaccauuuaucuccuguucacacuuggagugccgaacuuucuuuuuaacacagggagcgcugcuaaaugauaagcauaguaacggcaccgugaaagaccguagcccguauagagcucucaugucuugucccauuggcgaagccccuuccccauacaauucaagguucgagagcguugcauggagugccucugcuugccacgaugggaugggauggcugacgaucgguauauccggccccgacgauggggcaguggccguccuuaaguauaacggaauuaucacugaaaccaucaagagcuggcggaaacagauucugcgcacacaggagucggagugugugugcguaaauggcucuuguuuuacuaucaugaccgacgguccuuccgaugggcaggcuucauacagaauuuucaagauagaaaaaggaaagaucacaaaaaguauugaguuggacgccccaaacagccauuaugaagagugcuccuguuaccccgauaccggcacgguuaugugcgugugcagggacaacuggcacggcucuaaucggccuugggucagcuuuaaccaaaaucucgauuaccagaucggguauaucuguucaggaguguucggugacaacccacgcccgaaggacggcaaggggaguugcgaucccgugaaugucgacggagcggauggcguuaaagguuuuuccuaccgauaugggaacggcguguggauuggaagaacuaagagcaauucuucaaggaaaggcuucgagaugauaugggacccuaacggguggacagauaccgacaguaauuuucugguaaagcaggauguggucgcaaugacugacuggagcggauacuccgguucuuucgugcaacacccagaacugacaggccucgauuguaugcggcccugcuuuuggguugaguuaauccgugggcgcccuagagagaaaaccacgauuuggaccucgggaagcuccaucucauucuguggcgugaacagugacacagucaauuggucuuggccagauggugccgaacugcccuucacuauugacaaguga

SEQ ID NO: 144428 - RNA, 1413 nt, Artificial Sequence
  derived and/or modified CDS sequence (opt3) from neuraminidase__InfluenzaA__ABY81363
augaaccccaaucagaagaucauuaccauaggcagcaucuccauugccaucgggauuaucucucugaugcuccaaauaggaaacaucauuucaaucugggcuagucacagcauucagaucgguucccagaaucauacaggcauaugcaaccagagaauuaucacuuacgaaaauucuacgugggugaaccacaccuaugucucgauuaauaacacaaauguuguggcagggaaagacaagacuucaguaacccuugccggaaacagcagucuguguuccaucucuggcugggcgaucuacacaaaagauaauagcauuaggauagguuccaagggggacguguucgucauccgggagccuuuuauuucaugcagucauuuggagugucgcaccuucuuuuuaacucaaggagcucugcuaaacgauaaacacagcaauggcacagugaaggaccgaucuccauaucgugcccucauguccugcccgcugggcgaagcacccucaccuuacaacagcaaguucgagaguguugccuggucugcuuccgcaugucaugaugggaugggauggcuuaccaucgguauaagcggcccagacaauggggccguggcuguccugaaauauaacggaauuaucacggaaacuaucaagucguggaaaaagagaauuuugaggacccaggagucugagugcguguguguaaacggcuccugcuuuacaaucaugacugauggucccucaaauggggccgcgaguuacaaaauuuucaagauagaaaagggaaaaguuaccaagagcaucgagcucaacgcaccuaauuuucacuaugaagaguguuccugcuacccagacacaggcaccgugaugugugucugccgggauaacuggcacggcucuaaucgccccugggugagcuucaaccagaaucuggacuaccagauuggguauaucugcucaggaguguuuggugauaacccuagaccaaaagacggcaaggggaguuguaauccggucacgguugauggagccgacggcgugaaagguuucuccuacaaguaugggaacggcguauggaucggaaggacuaaaagcaaucggcugcgcaagggcuuugagaugauuugggaccccaacggguggacagauaccgacucugauuucucagugaagcaagacgucguggcuauaacugauuggaguggauacagcgguuccuuuguucagcauccugaacucacaggcuuagacugcauccgaccauguuucuggguggagcuggucagagggcuucccagggaaaauaccacgauuuggaccucuggaucgagcaucuccuucugcggcguggauucagacacagccaacuggaguuggccugauggugcagaguugccauuuacuauugacaaauga

SEQ ID NO: 144429 - RNA, 1410 nt, Artificial Sequence; identical to SEQ ID NO: 144114
  derived and/or modified CDS sequence (opt3) from neuraminidase__InfluenzaA__ABY81374

SEQ ID NO: 144430 - RNA, 1413 nt, Artificial Sequence; identical to SEQ ID NO: 144078
  derived and/or modified CDS sequence (opt3) from neuraminidase__InfluenzaA__ABY81385

SEQ ID NO: 144431 - RNA, 1413 nt, Artificial Sequence
  derived and/or modified CDS sequence (opt3) from neuraminidase__InfluenzaA__ABY81407
augaaccccaaucagaagaucauuaccauaggcagcaucuccauugccaucgggacaauuucucugaugcuccaaaucggaaacauaaucucaauuugggcuagucacagcauccagacugguucccagaaucauacgggcauuugcaaccagagaaucauaaccuacgaaaauucuacaugggugaaccacacuuaugucucgauuaauaacaccaauguuguggcagggaaagacaagacaucaguaacccuugccggaaacagcagucuguguuccaucucuggcugggcgauuuacacuaaagauaauagcaucaggaucgguuccaagggggacguguucgucauucgggagccuuuuauaucaugcagucauuuggagugucgcacauucuuuuuaacccaaggagcucugcuaaacgauaaacacagcaauggcacggugaaggaccgaucuccauaucgugcccucauguccugcccgcugggcgaagcacccucaccuuacaacagcaaguucgagaguguugccuggucugcuuccgcaugucaugaugggaugggauggcuuacuaucgguauuagcggcccagacaauggggccguggcuguccugaaauauaacggaaucauaaccgaaacaauuaagucguggaaaaagagaaucuugaggacucaggagucugagugcguguguguaaacggcuccugcuuuaccaucaugacagauggucccucaaauggggccgcgaguuacaaaauuuucaagaucgaaaagggaaaaguuaccaagagcauugagcucaacgcaccuaauuuucacuaugaagaguguuccugcuacccagacacgggcacugugaugugugucugccgggauaacuggcacggcucuaaucgccccugggugagcuucaaccagaaucuggacuaccagauaggguauaucugcucaggaguguuuggugauaacccuagaccaaaagacggcaaggggaguuguaauccggucacaguugauggagccgacggcgugaaagguuucuccuacaaguaugggaacggcguauggauuggaaggaccaaaagcaaucggcugcgcaagggcuuugagaugaucugggaccccaacggguggacugauacagacucugauuuccucgugaagcaagacgucguggcuaucaccgauuggucaggauacagugguagcuuuguucagcauccugaauuaacgggccuggacugcauucgaccauguuucuggguggagcuugucagaggguugcccagggaaaauaccacaauauggacuuccggaucuucgaucagcuucugcggcguggauuccgacaccgccaacuggucauggccugauggugcagagcugccauuuacaauugacaaauga

SEQ ID NO: 144432 - RNA, 1410 nt, Artificial Sequence; identical to SEQ ID NO: 144114
  derived and/or modified CDS sequence (opt3) from neuraminidase__InfluenzaA__ACA24505

SEQ ID NO: 144433 - RNA, 1413 nt, Artificial Sequence; identical to SEQ ID NO: 144078
  derived and/or modified CDS sequence (opt3) from neuraminidase__InfluenzaA__ACA24516

SEQ ID NO: 144434 - RNA, 1413 nt, Artificial Sequence; identical to SEQ ID NO: 144078
  derived and/or modified CDS sequence (opt3) from neuraminidase__InfluenzaA__ACA24527

SEQ ID NO: 144435 - RNA, 1410 nt, Artificial Sequence
  derived and/or modified CDS sequence (opt3) from neuraminidase__InfluenzaA__ACA24692
augaaccccaaucagaagaucauuaccauaggcagcgugucccugacaaucucuacuauuugcuucuuuaugcaaaucgccauucucaucacgaccgucacacuucacuucaaacaguacgaguuuucaccuccaccgaacaaucagguuaugcugugugaacccacuauaaucgagagaaacauuaccgaaaucguguauuugacaaauaccacuauugagaaggaaaucugcccuaaauuagcugaguacaggaacuggaguaagccacagugugacauaacaggguucgcacccuuuagcaaagauaauuccauucggcugucugccggaggugacaucuggguaacccgcgagccuuaugugucgugcgauccagacaaguguuaccaauucgcgcuaggccaggggacgacucucaacaauguccauucaaacgauaccgugcacgaccgaacacccuaucguacucugcuuaugaaugaacugggaguuccuuuucauuugggcaccaaacaggugugcauugcuuggagcaguuccucuugucacgaugguaaggccuggcuccaugucugcgugacaggggacgauaagaacgcaaccgccagcuucaucuacaauggaagacugguagacuccaucguuucauggaguaaagagauucugaggacgcaggaaagcgagugugugugcauaaacggcacuuguacagucgugaugaccgauggcucugcuuccgggaaggcagacacuaaaauccucuuuauugaggaaggaaagaucgugcacacaucaaccuuaagcgguagugcccaacacgucgaggaaugcucuugcuauccacgguacccgggcguucgcugugugugcagagauaauuggaagggguccaacaggcccauaguagacauuaacaucaaagacuacagcaucgugucgaaguaugucuguucuggacuggugggcgauacgccucggaaaaaugacuccucaaguagcucccauugccuugauccaaacaaugaggaaggugggcacggaguuaagggcugggcuuucgacgauggcaacgacguguggauggggcgcaccauuucugagaaaagccgaucaggauacgagacauuuaaggucaucgaagguuggaguaaucccaacuccaaauugcagauuaauagacaggugauaguagauaggggcaaccggagcggguauucuggaaucuucucaguugagggcaagaguuguauuaaucguugcuuuuacguggaacugauccgcgguagaaacgaggaaacugagguccuauggaccagcaauuccaucguggucuucugugggacaucuggcacuuauggaaccggcucguggccugacggggccgauauuaaccucaugccaauauga

SEQ ID NO: 144436 - RNA, 1410 nt, Artificial Sequence
  derived and/or modified CDS sequence (opt3) from neuraminidase__InfluenzaA__ACA24703
augaaccccaaucagaagaucauuaccauaggcagcgugucccugacaaucucuacuauuugcuucuuuaugcagaucgccauucucaucacgaccgucacacuucacuucaaacaguacgaguuuucaaguccuccaaacaaucagguuaugcugugugaaccgacuauaaucgagagaaacauuaccgaaaucguguauuugacaaauauuaccaucgagaaggaaacuugccccaaauuagcugaguacaggaacuggagcaagccucagugugacauaacaggguucgcaccauuuuccaaagauaauucuauucggcugucggccggaggugacaucuggguaacccgcgagcccuaugugucaugcgauccugacaaguguuaccaauucgcgcuaggccaggggacgacucucaacaauguccauagcaacgauaccgugcacgaccgaacaccauaucguacucugcuuaugaaugaacugggaguucccuuucauuugggcaccaaacaggugugcauugcuuggaguuccucuagcugucacgaugguaaggccuggcuccaugucugcgugacaggggacgauaagaacgcaaccgccuccuucaucuacaauggaagacugguagacucaaucguuaguuggagcaaagagauucugaggacgcaggaaucugagugugugugcauaaacggcacuuguacagucgugaugaccgauggcuccgcuucagggaaugcagacacuaagauccucuuuauugaggaaggaaaaaucgugcacacaagcaccuuaagugguucugcccaacacgucgaggaaugcuccugcuauccucgguacccaggcguucgcugugugugcagagauaacuggaaggggagcaacaggccgauaguagacauuaauaucaaggacuacucgaucgugucucgguaugucuguuccggacuggugggcgauacgccccgcaaaaacgacucaaguagcuccucucauugccuugauccuaauaacgaggaaggugggcacggaguuaagggcugggcuuucgacgauggcaaugacguguggauggggcgaaccauuagcgagaaaucaagaaguggauacgagacauuuaaggucaucgaagguugguccaacccaaauagcaaauugcagauuaacaggcaagugauaguagaucggggcaaucguucuggguauucaggaaucuucaguguugagggcaagagcuguauuaaccgcugcuuuuacguggaacugaucagagguaggaaagaggaaacugagguccuauggaccuccaauucuaucguggucuucugugggacaucgggcacuuauggaaccggcagcuggcccgacggggccgauauuaaccucaugccuauauga

SEQ ID NO: 144437 - RNA, 1413 nt, Artificial Sequence
  derived and/or modified CDS sequence (opt3) from neuraminidase__InfluenzaA__ACA33539
augaaccccuaccagaagaucauuaccauaggcagcaucuccauugccaucgggauuaucucucugaugcuccaaauaggaaauaucauuucaaucugggcuagucacagcauucagacagguucccagaaccauacuggcaucugcaaucagagaauaauuacguaugagaacucuaccugggugaaucacacauacgucucgaucaacaauacuaacguuguggcagggaaagacaagaccucaguaacacuugccggaaauagcagucuguguuccauuucuggcugggcgaucuauaccaaagauaacagcaucaggauugguuccaagggggacguguucgucauacgggaaccuuuuaucucaugcagucauuuggagugucgcacuuucuuuuuaacacaaggagcucugcuaaaugauaaacacagcaacggcaccgugaaggaccgaucuccauaccgugcccucauguccugcccgcugggcgaagcacccucaccuuauaauagcaaguucgagaguguugccuggucugcuuccgcaugucaugaugggaugggauggcuuacgauugguaucagcggcccagacaacggggccguggcuguccugaaauacaauggaauaauuacugaaaccaucaagucguggaaaaagagaaucuugaggacacaggagucugagugcguguguguaaacggcuccugcuuuacuauuaugaccgauggucccucaaacggggccgcgaguuauaaaaucuucaagauugaaaagggaaaaguuacaaagagcauagagcucaaugcaccuaacuuuuacuacgaagaguguuccugcuauccagacaccggcacggugaugugugucugccgggauaauuggcacggcucuaaccgccccugggugagcuucaaucagaaccuggacuaccagaucggguauauuugcucaggaguguuuggugauaauccuagaccaaaagacggcaaggggaguuguaacccggucacuguugauggagccgacggcgugaaagguuucuccuacaaguaugggaauggcguauggaucggaaggacaaaaagcaaccggcugcgcaagggcuuugagaugaucugggaccccaauggguggaccgauacugacucugauuucucagugaagcaagacgucguggcuauuacagauuggaguggauacagcgguuccuuuguucagcacccugaacucaccggcuuagacugcauacgaccauguuucuggguggagcuggucagagggcuucccagggaaaacacgaccaucuggacaucuggaucgagcauuuccuucugcggcguggauucagacacugccaauuggaguuggccugauggugcagaguugccauuuaccaucgacaaauga

SEQ ID NO: 144438 - RNA, 1413 nt, Artificial Sequence
  derived and/or modified CDS sequence (opt3) from neuraminidase__InfluenzaA__ACA33540
augaaccccaaucagaagaucauuaccauaggcagcaucuccauugccaucgggauuaucucucugaugcuccaaauaggaaacaucauuucaaucugggcuagucacagcauucagacagguucccagaaucauacuggcaucugcaaccagagaauaauuacguacgaaaauucuaccugggugaaccacacauaugucucgaucaauaacacuaauguuguggcagggaaagacaagaccucaguaacacuugccggaaacagcagucuguguuccauuucuggcugggcgaucuacaccaaagauaauagcaucaggauugguuccaagggggacguguucgucauacgggagccuuuuaucucaugcagucauuuggagugucgcacuuucuuuuuaacacaaggagcucugcuaaacgauaaacacagcaauggcaccgugaaggaccgaucuccauaucgugcccucauguccugcccgcugggcgaagcacccucaccuuacaacagcaaguucgagaguguugccuggucugcuuccgcaugucaugaugggaugggauggcuuacgauugguaucagcggcccagacaauggggccguggcuguccugaaauauaacggaauaauuacugaaaccaucaagucguggaaaaagagaaucuugaggacacaggagucugagugcguguguguaaacggcuccugcuuuacuauuaugaccgauggucccucaaauggggccgcgaguuacaaaaucuucaagauugaaaagggaaaaguuacaaagagcauagagcucaacgcaccuaauuuuuauuacgaagaguguuccugcuacccagacaccggcacggugaugugugucugccgggauaacuggcacggcucuaaucgccccugggugagcuucaaccagaaucuggacuaucagaucggguacauuugcucaggaguguuuggugauaacccuagaccaaaagacggcaaggggaguuguaauccggucacuguugauggagccgacggcgugaaagguuucuccuauaaguacgggaacggcguauggaucggaaggacaaaaagcaaucggcugcgcaagggcuuugagaugaucugggaccccaacggguggaccgauacugacucugauuucucagugaagcaagacgucguggcuauuacagauuggaguggauauagcgguuccuuuguucagcacccugaacucaccggcuuagacugcauacgaccauguuucuggguggagcuggucagagggcuucccagggaaaauacgaccaucuggacaucuggaucgagcauuuccuucugcggcguggauucagacacugccaacuggaguuggccugauggugcagaguugccauuuaccaucgacaaauga

SEQ ID NO: 144439 - RNA, 1413 nt, Artificial Sequence
  derived and/or modified CDS sequence (opt3) from neuraminidase__InfluenzaA__ACA33582
augaaccccaaucagaagaucauuaccauaggcagcaucuccauugccaucgggauuaucucucugaugcuccaaauaggaaacaucauuucaaucugggcuagucacagcauucagacagguucccagaaucauacuggcaucugcaaccagagaauaauuacguacgaaaauucuaccugggugaaccacacauaugucucgaucaauaacacuaauguuguggcagggaaagacaagaccucaguaacacuugccggaaacagcagucuguguuccauuucuggcugggcgaucuacaccaaagauaauagcaucaggauugguuccaagggggacguguucgucauacgggagccuuuuaucucaugcagucauuuggagugucgcacuuucuuuuuaacacaaggagcucugcuaaacgauaaacacagcaauggcaccgugaaggaccgaucuccauaucgugcccucauguccugcccgcugggcgaagcacccucaccuuacaacagcaaguucgagaguguugccuggucugcuuccgcaugucaugaugggaugggauggcuuacgauugguaucagcggcccagacaauggggccguggcuguccugaaauauaacggaauaauuacugaaaccaucaagucguggaaaaagagaaucuugaggacacaggagucugagugcguguguguaaacggcuccugcuuuacuauuaugaccgauggucccucaaauggggccgcgaguuacaaaaucuucaagauugaaaagggaaaaguuacaaagagcauagagcucaacgcaccuaauuuuuauuacgaagaguguuccugcuacccagacaccggcacggugaugugugucugccgggauaacuggcacggcucuaaucgccccugggugagcuucaaccagaaucuggacuaucagaucggguacauuugcucaggaguguuuggugauaacccuagaccaaaagacggcaaggggaguuguaauccgaugacugucgauggagccgacggcguuaaagguuucuccuauaaguacgggaacggcguguggaucggaaggacaaaaagcaaucggcugcgcaagggcuuugagaugaucugggaccccaacggguggaccgauacugacucugauuucucaguaaagcaagacguggucgcuauuacagauuggaguggauauagcgguuccuuugugcagcacccugaacucaccggcuuagacugcauacgaccauguuucuggguugagcuggugagagggcuucccagggaaaauacgaccaucuggacaucuggaucgagcauuuccuucugcggcgucgauucagacacugccaacuggaguuggccugauggugcagaguugccauuuaccaucgacaaauga

SEQ ID NO: 144440 - RNA, 1413 nt, Artificial Sequence
  derived and/or modified CDS sequence (opt3) from neuraminidase__InfluenzaA__ACA33622
augaaccccaaucagaagaucauuaccauaggcagcaucuccauugccaucgggauuaucucucugaugcuccaaauaggaaacaucauuucaaucugggcuagucacagcauucagacagguucccagaaucauacuggcaucugcaaccagagaauaauuacguacgaaaauucuaccugggugaaccacacauaugucaauaucaacaauacuaacguuguggcagggaaagacaagaccucgguaacacuugccggaaauucaagccuguguaguauuuccggcugggcgaucuacaccaaagauaacucuaucaggauugguagcaagggggacguguucgucauacgggagccuuuuaucuccugcucacauuuggagugucgcacuuucuuuuuaacacaaggagcucugcuaaaugauaaacacaguaacggcaccgugaaggaccgaagcccauaucgugcccucaugucuugcccgcugggcgaagcacccuccccuuacaauucaaaguucgagagcguugccuggagugcuucugcaugucaugaugggaugggauggcuuacgauugguaucuccggcccagacaacggggccguggcuguccugaaauauaacggaauaauuacugaaaccaucaagagcuggaaaaagagaaucuugaggacacaggagucggagugcguguguguaaauggcucuugcuuuacuauuaugaccgauggucccuccaacggggccgcgucauacaaaaucuucaagauugaaaagggaaaaguuacaaagaguauagagcucaaugcaccuaacuuuuauuacgaagaguguagcugcuacccagacaccggcacggugaugugugucugccgggauaauuggcacggcuccaaccgccccugggugucuuucaaucagaaccuggacuaucagaucggguacauuugcagcggaguguuuggugauaauccuagaccaaaagacggcaaggggucauguaacccggucacuguugauggagccgacggcgugaaagguuucaguuauaaguacgggaauggcguauggaucggaaggacaaaauccaaccggcugcgcaagggcuuugagaugaucugggaccccaauggguggaccaacacugauagcgacuucucugugaagcaagaugucguggcuauuacagacuggucaggauauagugguagcuuuguucagcacccugaacucaccggcuuagauugcauacgaccauguuucuggguggagcuggucagagggcuucccagggaaaauacgaccaucuggacauccggaucuucgauuagcuucugcggcguggacuccgauacugccaacuggucauggccugacggugcagaguugccauuuaccaucgauaaauga

SEQ ID NO: 144441 - RNA, 1413 nt, Artificial Sequence; identical to SEQ ID NO: 144117
  derived and/or modified CDS sequence (opt3) from neuraminidase__InfluenzaA__ACA96522

SEQ ID NO: 144442 - RNA, 1362 nt, Artificial Sequence
  derived and/or modified CDS sequence (opt3) from neuraminidase__InfluenzaA__ACC55274
augaaccccaaucagaagaucauuaccauaggcagcgugucccugacaaucgccacugucugcuuccucaugcaaauugcuauccuugcaaugacgguuacccugcacuuuagacagaacgaguguucuauuucagccaauagucaggugguaccuugcgaaccaacaacugagaaagaaguguguagcaaggucguggacuacagguccuggucuaaaccgcagugccaaaucaccggguucgcgcccuuuucgaaggauaacucaauacgguugagcgcuggaggugacaucuggauuacacgcgagccuuauguuaguugugauaccuccaaaugcuaccaguucgccuuaggccaggggacuacacuggacaaugaacauucuaacggaaccauccacgaucguauuccacaucgaacgcuacucaugaaugagcugggcgugcccuuucaccuugguacuagacaggucuguaucgcauggagcuccucaaguugccaugacgggaaggccuggcugcacguguguguaaccggagaugacaggaacgcuacagccagcuucauauauaauggcauguugguugauucuauuggcuccuggucacaaaacauccuccggacucaggagagcgaaugcguguguauuaaugggaguugcaccgucgugaugacagacggaucugcauccgguaaggcugauacccgcauccuguuugugaaagagggcaagaucguccacauuagcccucugucggggucugcccagcauauagaagagugcuccuguuacccaagauaucccaacguuaggugcgugugucgggacaauuggaaaggaucaaaccgcccuguaaucgauauuaauaugacggacuacaguaucgacagcuccuaugugugcucuggccucgucggugauacuccacgaaacgaggacagcucaaguuccagcaacuguagagauccgaaugaagagagggggaaccccggagugaagggcugggcguucgacucuggcgaugacguuuggauggggcggacaauaucacgugauagucgcagcggauacgaaaccuuuagagugauugguggcuggacuacagcaaauuccaaaucucagaccaacaggcaagucaucguggacaauaacaauuggucgggguacagcggaaucuucuccguagagcacaagucaugcauuaaccgguguuuuuauguugaauuaauccgaggccgcccuaaggagacgagagugugguggaccaguaauucuauugucguguucugcgguacaagcgggacuuacggcaccggauccuggccagauggcgccaacauaaauuuuaugcccaucuga

SEQ ID NO: 144443 - RNA, 1413 nt, Artificial Sequence; identical to SEQ ID NO: 144377
  derived and/or modified CDS sequence (opt3) from neuraminidase__InfluenzaA__ACC61967

SEQ ID NO: 144444 - RNA, 1413 nt, Artificial Sequence
  derived and/or modified CDS sequence (opt3) from neuraminidase__InfluenzaA__ACD11077
augaaccccaaucagaagaucauuaccauaggcagcaucugcauggccauugggaucauuucccugauccuccaaauaggaaacaucauuucuaucugggugucacacaguauucagacagguagccagaaucauacuggcaucuguaaccagagaauaauuacguacgaaaauuccaccugggucaaccaaacauauguuaauaucucuaacacuaaugugguagcugggaaagugaccacaucgaugacccuugcaggaaacucaagccugugcccuauuaggggcugggccaucuacaguaaggacaauuccauccggauugguucuaaaggggaugucuucgugauacgcgaaccauuuaucagcuguucccacuuggagugccgaacuuucuuuuuaacacagggagcgcugcuaaacgacaagcauucaaauggcaccguuaaagaucguaguccguauagagcucucaugagcugucccauuggcgaagccccuucuccauacaacuccagguucgagucaguggcauggagcgccagugcuugccacgacgggaugggauggcugacgaucgguauaucuggccccgaugacggggcagucgccgugcuuaaguauaauggaauuaucacugaaaccaucaaguccuggcggaaacagauucugcgcacacaggagagcgaguguguaugcguuaacggcucguguuuuacuaucaugaccgaugguccuucugacgggccagcuuccuacagaauuuucaagauagaaaaaggaaagaucacaaaaucaauugaguuggaugcccccaacagucauuaugaagagugcagcuguuacccugacaccggcacggugaugugcgucugcagggauaauuggcacggcuccaaccggccaugggugucuuuuaaucaaaaccucgacuaccagaucggguauaucuguagcggaguguucggugauaauccgcgccccaaggacggcaaggggucaugcgacccugucaacguugauggagcggacggcgugaaagguuuuaguuaccgauaugggaauggcguauggauuggaagaacuaaguccaacaauagcaggaaaggcuucgagaugauaugggauccaaacggguggacagacaccgauucuaauuuucuggugaagcaggacgucguggcaaugacugauuggucaggauacagugguagcuucguucagcaccccgaacugacaggccucgacuguaugcggccuugcuuuuggguggaguuaauccgugggcgcccaagagagaaaaccacgauuuggaccuccggaucuucgaucagcuucuguggcgucaacuccgauacagugaauuggucauggcccgacggugccgagcugccgcuuacuauugauaaguga

SEQ ID NO: 144445 - RNA, 1413 nt, Artificial Sequence
  derived and/or modified CDS sequence (opt3) from neuraminidase__InfluenzaA__ACD11078
augaaccccaaucagaagaucauuaccauaggcagcaucugcauggccauugggaucauuucccugauccuccaaauaggaaacaucauuucuaucugggugucacacaguauucagacagguagccagaaucauacuggcaucuguaaccagagaauaauuacguacgaaaauuccaccugggucaaccaaacauauguuaauaucucuaacacuaaugugguagcugggaaagacaccacaucgaugacccuugcaggaaacucaagccugugcccuauuaggggcugggccaucuacaguaaggauaauuccauccggauugguucuaaaggggacguguucgucauacgcgaaccauuuaucagcuguucccacuuggagugccgaacuuucuuuuuaacacagggagcgcugcuaaacgauaagcauucaaauggcaccgugaaagaccguaguccguauagagcucucaugagcugucccauuggcgaagccccuucuccauacaacuccagguucgagucaguugcauggagcgccagugcuugccacgaugggaugggauggcugacgaucgguauaucuggccccgacgauggggcaguggccguccuuaaguauaauggaauuaucacugaaaccaucaaguccuggcggaaacagauucugcgcacacaggagagcgagugugugugcguaaacggcucguguuuuacuaucaugaccgacgguccuucugaugggccagcuuccuacagaauuuucaagauagaaaaaggaaagaucacaaaaucaauugaguuggacgcccccaacagucauuaugaagagugcagcuguuacccugauaccggcacgguuaugugcgugugcagggacaauuggcacggcuccaaccggccaugggucucuuuuaaucaaaaccucgauuaccagaucggguauaucuguagcggaguguucggugacaauccgcgccccaaggacggcaaggggucaugcgauccugugaacgucgacggagcggauggcguuaaagguuuuaguuaccgauaugggaauggcguguggauuggaagaacuaaguccaacagcucuaggaaaggcuucgagaugauaugggacccaaauggguggacagauaccgacucaaacuuucugguaaagcaggauguggucgcaaugacugacuggaguggauacagcgguuccuucgugcagcaccccgaacugacaggccucgauuguaugcggccuugcuuuuggguugaguuaauccgugggcgcccaagagagaaaaccacgauuuggaccucuggaucgagcaucuccuucuguggcgucaauucagacacagugaacuggaguuggcccgauggugccgagcugccgcuuacuauugacaaguga

SEQ ID NO: 144446 - RNA, 1413 nt, Artificial Sequence
  derived and/or modified CDS sequence (opt3) from neuraminidase__InfluenzaA__ACD11079
augaaccccaaucagaagaucauuaccauaggcagcaucugcauggccauugggaucauuucccugauccuccaaauaggaaacaucauuucuaucugggugucacacaguauucagacagguagccagaaucauacuggcaucuguaaccagagaauaauuacguacgaaaauuccaccugggucaaccaaacauauguuaauaucucuaacacuaaugugguagcugggaaagacaccacaucgaugacccuugcaggaaacucaagccugugcccuauuaggggcugggccaucuacaguaaggauaauuccauccggauugguucuaaaggggacguguucgucauacgcgaaccauuuaucagcuguucccacuuggagugccgaacuuucuuuuuaacacagggagcgcugcuaaacgauaagcauucaaauggcaccgugaaagaccguaguccguauagagcucucaugagcugucccauuggcgaagccccuucuccauacaacuccagguucgagucaguugcauggagcgccagugcuugccacgaugggaugggauggcugacgaucgguauaucuggccccgacgauggggcaguggccgucauuaaguauaauggaaucaucacugaaaccauuaaguccuggcggaaacagauccuucgcacacaggagagcgagugugugugcguaaacggcucguguuuuacuauuaugaccgacgguccuucugaugggccagcuuccuacagaauauucaagaucgaaaaaggaaagauuacaaaaucaaucgagcuggacgcccccaacagucauuaugaagagugcagcuguuacccugauaccggcacgguuaugugcgugugcagggacaauuggcacggcuccaaccggccaugggucucuuuuaaucaaaacuuggauuaccagaucggguauauuuguagcggaguguucggugacaauccgcgccccaaggacggcaaggggucaugcgauccugugaacgucgacggagcggauggcguuaaagguuuuaguuaccgauaugggaauggcguguggauaggaagaacuaaguccaacagcucuaggaaaggcuucgagaugaucugggacccaaauggguggacagauaccgacucaaacuuucucguaaagcaggauguggucgcaaugacugacuggaguggauacagcgguuccuucgugcagcaccccgaacugacaggccuggauuguaugcggccuugcuuuuggguugagcucauucgugggcgcccaagagagaaaaccacgaucuggaccucuggaucgagcauuuccuucuguggcgucaauucagacacagugaacuggaguuggcccgauggugccgaguuaccgcugacuaucgacaaguga

SEQ ID NO: 144447 - RNA, 1413 nt, Artificial Sequence; identical to SEQ ID NO: 144078
  derived and/or modified CDS sequence (opt3) from neuraminidase__InfluenzaA__ACD56116

SEQ ID NO: 144448 - RNA, 1413 nt, Artificial Sequence; identical to SEQ ID NO: 144078
  derived and/or modified CDS sequence (opt3) from neuraminidase__InfluenzaA__ACD56127

SEQ ID NO: 144449 - RNA, 1410 nt, Artificial Sequence; identical to SEQ ID NO: 143932
  derived and/or modified CDS sequence (opt3) from neuraminidase__InfluenzaA__ACD56261

SEQ ID NO: 144450 - RNA, 1410 nt, Artificial Sequence
  derived and/or modified CDS sequence (opt3) from neuraminidase__InfluenzaA__ACD56272
augaaccccaaucagaagaucauuaccauaggcagcgugucccugacaaucucuacuauuugcuucuuuaugcagaucgccauucucaucacgaccgucacacuucacuucaaacaguacgaguuuucaaguccuccaaacaaucagguuaugcugugugaaccgacuauaaucgagagaaacauuaccgaaaucguguauuugacaaauaccacuauugagaaggaaaucugccccaaauuagcugaguacaggaacuggagcaagccucagugugacauaacaggguucgcaccauuuuccaaagauaauucuauucggcugucggccggaggugacaucuggguaacccgcgagcccuaugugucaugcgauccugacaaguguuaccaauucgcgcuaggccaggggacgacucucaacaauguccauagcaacgauaccgugcacgaccgaacaccauaucguacucugcuuaugaaugaacugggaguucccuuucauuugggcaccaaacaggugugcauugcuuggaguuccucuagcugucacgaugguaaggccuggcuccaugucugcgugacaggggacgauaagaacgcaaccgccuccuucaucuacaauggaagacugguagacucaaucguuaguuggagcaaagagauucugaggacgcaggaaucugagugugugugcauaaacggcacuuguacagucgugaugaccgauggcuccgcuucagggaaggcagacacuaaaauccucuuuauugaggaaggaaagaucgugcacacaagcaccuuaagugguucugcccaacacgucgaggaaugcuccugcuauccucgguacccaggcguucgcugugugugcagagauaauuggaaggggagcaacaggccgauaguagacauuaacaucaaagacuacucgaucgugucucgguaugucuguuccggacuggugggcgauacgccccgcaagaaugacucaaguagcuccucucauugccuugauccuaacaaugaggaaggugggcacggaguuaaaggcugggcuuucgacgauggcaacgacguguggauggggcgaaccauuagcgagaagucaagaaguggauacgagacauuuaaagucaucgaagguugguccaauccaaacagcaaguugcagauuaauaggcaagugauaguagaucggggcaaccguucuggguauucaggaaucuucaguguugagggcaaaagcuguauuaaucgcugcuuuuacguggaacugaucagagguaggaaggaggaaacugagguccuauggaccuccaacucuaucguggucuucugugggacaucgggcacuuauggaaccggcagcuggcccgacggggccgauauuaaucucaugccuauauga

SEQ ID NO: 144451 - RNA, 1413 nt, Artificial Sequence
  derived and/or modified CDS sequence (opt3) from neuraminidase__InfluenzaA__ACD56283
augaaccccaaucagaagaucauuaccauaggcagcaucuccauggccauugggaucauuucucugaugcuccaaaucggaaacauaaucucaauuugggcuagucacagcauccagacagguucccagaaucauacuggcauuugcaaccagagaaucauaacguacgaaaauucuaccugggugaaccacacauaugucucgauuaauaacacuaauguuguggcagggaaagacaagaccucaguaacacuugccggaaacagcagucuguguuccaucucuggcugggcgauuuacaccaaagauaauagcaucaggaucgguuccaagggggacguguucgucauucgggagccuuuuauaucaugcagucauuuggagugucgcacuuucuuuuuaacacaaggagcucugcuaaacgauaaacacagcaauggcaccgugaaggaccgaucuccauaucgugcccucauguccugcccgcugggcgaagcacccucaccuuacaacagcaaguucgagaguguugccuggucugcuuccgcaugucaugaugggaugggauggcuuacgaucgguauuagcggcccagacaauggggccguggcuguccugaaauauaacggaaucauaacugaaaccauuaagucguggaaaaagagaaucuugaggacacaggagucugagugcguguguguaaacggcuccugcuuuacuaucaugaccgauggucccucaaauggggccgcgaguuacaaaauuuucaagaucgaaaagggaaaaguuacaaagagcauugagcucaacgcaccuaauuuucacuaugaagaguguuccugcuacccagacaccggcacggugaugugugucugccgggauaacuggcacggcucuaaucgccccugggugagcuucaaccagaaucuggacuaccagauaggguauaucugcucaggaguguuuggugauaacccuagaccaaaagacggcaaggggaguuguaauccggucacuguugauggagccgacggcgugaaagguuucuccuacaaguaugggaacggcguauggauuggaaggacaaaaagcaaucggcugcgcaagggcuuugagaugaucugggaccccaacggguggaccgauacugacucugauuucucagugaagcaagacgucguggcuaucacagauuggaguggauacagcgguuccuuuguucagcauccugaacucaccggcuuagacugcauucgaccauguuucuggguggagcuggucagagggcuucccagggaaaauacgaccauauggacaucuggaucgagcaucuccuucugcggcguggauucagacacugccaacuggaguuggccugauggugcagaguugccauuuaccauugacaaauga

SEQ ID NO: 144452 - RNA, 1410 nt, Artificial Sequence
  derived and/or modified CDS sequence (opt3) from neuraminidase__InfluenzaA__ACD56305
augaaccccaaucagaagaucauuaccauaggcagcgugucccugacaaucgccacugucugcuuccucaugcaaauugcuauccuuguuacgaccgugacacugcacuuuaaacagcaugagugugacucuccugcaucaaaccagguaaugccaugcgaaccgauuaucauagagagaaauaucacugaaauuguguacuugaacaauaccacaaucgagaaggaaauuugucccgaggucguggaguauaggaacuggaguaaaccucagugccaaaucaccggguucgccccauuuagcaaggauaauuccauacgguuaucugcgggaggugacauuuggguuacucgcgaacccuacgugucgugugauccuggcaaaugcuaucaguucgcucuggggcagggaacaacccuagacaacaagcacucaaaugauacgauccaugaccguauuccacaccgaacucuccugaugaacgagcuuggcguccccuuucaucuggguaccagacagguguguguagccuggagcaguuccucuugccacgaugggaaggcaugguugcacguuugugugacaggagacgauaaaaaugccacugcuagcuucaucuacgacggcaggcucgucgauuccaucggcucauggagucaaaacauucugcggacccaggaaagcgagugcguguguauaaaugggacaugcaccguggucaugacggacggaucugcauccggucgcgccgauacuagaauccuguuuauugaggaaggcaagaucguucauauaucaccucucagcgggagugcucagcacguggaggaaugcucuuguuauccaagguacccggacguacggugcauuugucgcgacaacuggaaaggauccaaucgacccgugaucgauaucaacauggaggacuauagcauugauucgucuuacgucugcuccggcuuagugggugacacaccuagaaacgaugacaggucaaguaauagcaacugucgggauccaaauaacgaacgugggaaucccggaguuaagggcugggccuucgacaacggcgaugacguguggauggggcgcaccaucuccaaagaucugagaucuggauacgagacuuuuaaggucauugguggcuggagcacaccuaauucaaagagucagauaaacaggcaagugaucguagacuccaauaacuggagcggguauucuggaauuuucucaguugagggcaaaaguugcaucaaucgguguuuuuacguggaacuuauccgaggucgccagcaggagaccagagucugguggacgagcaacuccauuguggucuucugcgggaccucuggcacauauggaacuggcucguggccagacggggcgaauauaaacuuuaugcccaucuga

SEQ ID NO: 144453 - RNA, 1410 nt, Artificial Sequence
  derived and/or modified CDS sequence (opt3) from neuraminidase__InfluenzaA__ACD56316
augaaccccaaucagaagaucauuaccauaggcagcgugucccugacaaucgccacugucugcuuccucaugcaaauugcuauccuuguuacgaccgugacacugcacuuuaaacagcaugagugugacucuccugcaucaaaccagguaaugccaugcgaaccgauuaucauagagagaaauaucacugaaauuguguacuugaacaauaccacaaucgagaaggaaauuugucccgaggucguggaguauaggaacuggaguaaaccucagugccaaaucaccggguucgccccauuuagcaaggauaauuccauacgguuaucugcgggaggugacauuuggguuacucgcgaacccuacgugucgugugauccuggcaaaugcuaucaguucgcucuggggcagggaacaacccuagacaacaagcacucaaaugauacgauccaugaccguauuccacaccgaacucuccugaugaacgagcuuggcguccccuuucaucuggguaccagacagguguguguagccuggagcaguuccucuugccacgaugggaaggcaugguugcacguuugugugacaggagacgauaaaaaugccacugcuagcuucaucuacgacggcaggcucauggauuccaucggcucauggagucaaaacauucugcggacccaggaaagcgagugcgucuguauaaaugggacaugcaccguggugaugacggacggaucugcauccggucgcgccgauacuagaauccuguuuauugaggaaggcaagaucguccauauaucaccucucagcgggagugcucagcacguugaggaaugcucuuguuauccaagguacccggacgugcggugcauuugucgcgacaacuggaaaggauccaaucgacccguaaucgauaucaacauggaggacuauagcauugauucgucuuacgugugcuccggcuuagucggugacacaccuagaaacgaugacaggucaaguaauagcaacugucggaauccaaacaaugaacgugggaaccccggagugaagggcugggccuucgauaauggcgacgauguuuggauggggcgcaccaucuccaaagaccugagaucuggauacgagacuuuuaaggugauugguggcuggagcacaccuaacucaaagagucagauaaauaggcaagucaucguggauuccaacaauuggagcggguauucuggaauuuucucaguagagggcaaacggugcaucaaccgauguuuuuacguugaacuuauccgcgguagacagcaggagaccagggugugguggacgaguaauagcauugucguguucugcgggaccuccggcacauauggaacuggcucuuggccagacggggcgaacauaaauuuuaugcccaucuga

SEQ ID NO: 144454 - RNA, 1410 nt, Artificial Sequence
  derived and/or modified CDS sequence (opt3) from neuraminidase__InfluenzaA__ACD56327
augaaccccaaucagaagaucauuaccauaggcagcgugucccugacaaucgccacugucugcuuccucaugcaaauugcuauccuugcaacgaccguuacacugcacuuuaaacagcaugagugugacucuccugccucaaaccaggugaugccaugcgaaccgauuaucauagagagaaauaucacugaaauuguauacuugaacaauaccacaaucgagaaggaaauuugucccgagguggucgaguauaggaacuggaguaaaccucagugccaaaucaccggguucgcgccauuuagcaaggauaauuccauacgguuaucugcuggaggugacauuugggugacucgcgaacccuacguuucgugugauccuucaaaaugccaccaguucgcccugggccaggggacaacccuagagaacaagcauagcaauggaacgaagcacgaccgaaucccacaucguacucuccugaugaacgaacuuggcgugcccuuucaccuggguaccaaacaggucuguguggcauggaguuccucuagcugccacgaugggaaggccugguugcauguauguguuacaggagacgauagaaaugcuacugcauccuucauuuauggcggcaggcucguggacucaaucgucaguuggagccaaaacauccugcggacccaggagucugagugcguguguauuaaugggacaugcaccguggucaugacggauggauccgccucaggucgcgcugacacuagaauacuguuuaucaaagaaggcaagauuguucacaucagcccucucagugggucugcccagcauauagaggaaugcuccuguuacccaagguauccggaugugcggugcauuugucgcgacaacuggaaaggaagcaaucgacccguaaucgauaucaacauggaggacuacucgauugacucuuccuaugugugcucaggcuuagucggugauacaccuagaaacgacgauaguagcuccaauucuaacuguagggacccaaauaacgaacgggggaaucccggagugaagggcugggcguucgauaacggcgacgauguuuggauggggcguaccaucagcaaggacucacgcaguggauacgagacuuuuaaagugauugguggcugguccacaccuaauagcaagucucaggucaacagacaagugauaguagauucaaauaacuggaguggguacagcggaaucuucuccguugagggcaaaucuugcauuaauagguguuuuuauguggaacugauccggggucgaccacaggagacccgcgucugguggacgucgaacagcaucguggucuucugcgggaccuccggcacauacggaacuggcucauggcccgacggggcaaauauuaacuuuaugccgauauga

SEQ ID NO: 144455 - RNA, 1410 nt, Artificial Sequence
  derived and/or modified CDS sequence (opt3) from neuraminidase__InfluenzaA__ACD85190
augaaccccaaucagaagaucauuaccauaggcagcgugucccugacaaucgccacugucugcuuccucaugcaaauugcuauccuuguuacgaccgugacacugcacuuuaaacagcaugagugugacucuccugcaucaaaccagguaaugccaugcgaaccgauuaucauagagagaaauaucacugaaauuguguacuugaacaauaccacaaucgagaaggaaauuugucccaaagucguggaguauaggaacuggaguaagccucagugccaaaucaccggguucgccccauuuagcaaagauaauuccauacgguuaucugcgggaggugacauuuggguuacucgcgagcccuacgugucgugugauccuggcaagugcuaucaguucgcucuggggcagggaacaacccuagacaacaagcacucaaaugauacgauccaugaccgaaucccacaccguacucuccugaugaacgaacuuggcguccccuuucaucuggguaccagacagguguguauugccuggagcaguuccucuugccacgaugggaaagcaugguugcacguauguguuacaggagacgauaagaaugccacugcuagcuucaucuacgacggcaggcucguggauuccauuggcucauggagucaaaacauacugcggacccaggagagcgaaugcgucuguaucaaugggacaugcaccguggugaugacggacggaucugcauccggucgcgccgauacuaggauucuguuuaucgaggagggcaaaauaguccauauuucaccucucagcgggagugcucagcacguugaagagugcucuuguuauccaagauacccggacgugcggugcaucugucgcgacaacuggaagggauccaaucgacccaucauugauaucaacauggaagacuauagcauugauucgucuuacguaugcuccggcuuagugggugacacaccuagaaacgaugacaggucaaguaauagcaacugucggaauccaaacaaugagcgugggaaccccggagucaaaggcugggccuucgauaauggcgacgauguguggauggggcgcaccauauccaaggaccugagaucuggauacgaaacuuuuaagguuaucgguggcuggagcacaccuaacucaaaaagucagauuaauaggcaagugaucgucgauuccaacaauuggagcggguauucuggaaucuucucaguggagggcaagaguugcauuaaccgguguuuuuacguagagcuuauacgaggucgccagcaggaaaccagaguuugguggacgagcaauuccaucguggucuucugcgggaccucuggcacauauggaacuggcucguggccagacggggcgaacauuaauuuuaugcccaucuga

SEQ ID NO: 144456 - RNA, 1410 nt, Artificial Sequence
  derived and/or modified CDS sequence (opt3) from neuraminidase__InfluenzaA__ACD85201
augaaccccaaucagaagaucauuaccauaggcagcgugucccugacaaucgccacugucugcuuccucaugcaaauugcuauccuuguuacgaccgugacacugcacuuuaaacagcaugagugugacucuccugcaucaaaccagguaaugccaugcgaaccgauuaucauagagagaaauaucacugaaauuguguacuugaacaauaccacaaucgagaaggaaauuugucccaaagucguggaguauaggaacuggaguaagccucagugccaaaucaccggguucgccccauuuagcaaagauaauuccauacgguuaucugcgggaggugacauuuggguuacucgcgagcccuacgugucgugugauccuggcaagugcuaucaguucgcucuggggcagggaacaacccuagacaacaagcacucaaaugauacgauccaugaccgaaucccacaccguacucuccugaugaacgaacuuggcguccccuuucaucuggguaccagacagguguguauugccuggagcaguuccucuugccacgaugggaaagcaugguugcacguauguguuacaggagacgauaagaaugccacugcuagcuucaucuacgacggcaggcucguggauuccauuucaaguuggagccaaaacauacugcggacccaggagucugaaugcgucuguaucaauggcacaugcaccguggugaugacggacggguccgcaucaggacgcgccgauacuaggauucuguuuaucgaggaggguaaaauaguccauauuagcccucucaguggcucugcucagcacguugaagagugcuccuguuauccaagauacccggacgugcggugcaucugucgcgacaacuggaaggggagcaaucgacccguaaucgauauuaacauggaagacuauucgaucgauucuuccuacgugugcucaggauuagucggcgacacaccuagaaacgaugacaggaguagcaauuccaacugucggaauccaaacaaugagcgugguaaccccggggugaaaggaugggccuucgauaauggcgacgauguuuggaugggccgcaccauuucuaaggaccugagaagcggguacgaaacuuuuaaggugauaggagguuggucaacaccuaacaguaaaucccagaucaauaggcaagucauuguggauagcaacaauuggucuggcuauucagggaucuucaguguagagggaaagagcugcaucaaccgguguuuuuacguugagcuuauucgaggccgccagcaggaaaccagagugugguggacguccaauucuauagucguguucugcgguaccucggggacauauggcacuggaagcuggccagacggcgcgaacaucaauuuuaugcccauuuga

SEQ ID NO: 144457 - RNA, 1410 nt, Artificial Sequence
  derived and/or modified CDS sequence (opt3) from neuraminidase__InfluenzaA__ACD85212
augaaccccaaucagaagaucauuaccauaggcagcgugucccugacaaucgccacugucugcuuccucaugcaaauugcuauccuugcaacgaccguuacacugcacuuuaaacagcaugagugugacucuccugccucaaaccaggugaugccaugcgaaccgauuaucauagagagaaauaucaaggaaauuguauacuugaacaauacuaccaucgagaaagaaauuugucccgagguggucgaguauaggaacuggaguaagccucagugccaaaucacaggguucgcgccauuuagcaaagauaauuccauacgguuaucugcuggaggugacauuugggugacccgcgaacccuacguuucgugugauccuggcaagugcuaucaguucgcccuggggcagggaacuacacuagacaacaagcacucaaauggcaccauccaugaucguauuccacaccgaacgcuccugaugaacgagcuuggugugcccuuucaucuggggacuaaacaggucuguguggcauggagcaguuccucuugccacgacggaaaggccugguugcacguauguguuaccggcgaugacagaaaugcuacagccagcuucaucuacgauggcaggcucguggacuccaucgggucauggagucaaaacauucugcggacucaggaaagcgagugcgucuguauaaauggaaccugcacaguggugaugaccgaugguucugcauccggccgcgcugacacgagaauccuguuuauuaaagaggggaagaucguccauauaucaccucucagcggaagugcccagcacauugaagagugcucuuguuauccaagguacccggauguucggugcaucugucgcgacaacuggaaaggcuccaaucgacccgugaucgacauuaacauggaagauuauagcaucgacucgucuuacguaugcuccgguuuagugggggauacuccuagaaacgacgauucaaguagcaauuccaacuguagggacccaaauaacgagcggggaaaucccggcgucaagggcugggcguucgauaacggggacgauguguggaugggacguacaauuaauaaggacucucgcagcgguuacgaaaccuuuaaaguuauaggcggguggucaacuccuaacaguaagucccaggugaauagacaagucaucguggauaacaauaacuggagcggauauucuggcauuuucucaguagaggguaaaaguugcaucaauagguguuuuuacguugagcugauccgggggcgaccacaggaaacacgcgugugguggaccagcaacuccauugucguguucugcggcacgucuggaaccuauggcacagggucguggcccgacggagcaaauauaaacuuuaugccgaucuga

SEQ ID NO: 144458 - RNA, 1410 nt, Artificial Sequence
  derived and/or modified CDS sequence (opt3) from neuraminidase__InfluenzaA__ACD85223
augaaccccaaucagaagaucauuaccauaggcagcgugucccugacaaucgccacugcuugcuuccucaugcaaauugcaauccuugucacgaccguuacacugcacuuuaaacagcaugagugugacucuccugccucaaaccaggugaugccaugcgaaccgauuaucauagagagaaauaucacugaaauuguauacuugaacaauaccacaaucgagaaggaaauuugucccaaaguggucgaguauaggaacuggaguaagccucagugccaaaucaccggguucgcgccauuuagcaaagauaauuccauacgguuaucugcuggaggugacauuugggugacucgcgagcccuacguuucgugugauccuggcaagugcuaucaguucgcccuggggcagggaacaacccuagacaacaagcacucaaaugauacgauccaugaccgaaucccacaccguacucuccugaugaacgaacuuggcgugcccuuucaucuggguaccagacaggucuguauugcauggagcaguuccucuugccacgaugggaaagccugguugcacguguguguaacaggagacgauaagaaugcuacugccagcuucaucuacgacggcaggcucguugauuccauuggcucauggagucaaaacauacugcggacccaggagagcgaaugcguguguaucaaugggacaugcaccgucgugaugacggacggaucugcauccggucgcgcugauacuaggauucuguuuaucgaggagggcaaaauagugcauauuucaccucucagcgggagugcccagcacgucgaagagugcucuuguuauccaagauacccggacguucggugcaucugucgcgacaacuggaagggauccaaucgacccaucauugauaucaacauggaagacuauagcauugauucgucuuacgugugcuccggcuuaguaggugacacaccuagaaacgaugacaggucaaguaauagcaacugucggaauccaaacaaugagcgugggaaccccggagugaaaggcugggcguucgauaauggcgacgaugucuggauggggcgcaccauauccaaggaccugagaucuggauacgaaacuuuuaaggugaucgguggcuggagcacaccuaacucaaaaagucagauuaauaggcaaguuaucguggauuccaacaauuggagcggguauucuggaaucuucucagucgagggcaagaguugcauuaaccgguguuuuuacguggagcuuauacgaggucgccagcaggaaaccagaguaugguggacgagcaauuccaucguuguguucugcgggaccucuggcacauauggaacuggcucguggccagacggggcaaacauuaauuuuaugcccaucuga

SEQ ID NO: 144459 - RNA, 1410 nt, Artificial Sequence
  derived and/or modified CDS sequence (opt3) from neuraminidase__InfluenzaA__ACD85234
augaaccccaaucagaagaucauuaccauaggcagcgugucccugacaaucgccacugucugcuuccucaugcaaauugcuauccuugcaacgaccguuacacugcacuuuaaacagcaugagugugacucuccugccucaaaccaggugaugccaugcgaaccgauuaucauagagagaaauaucacugaaauuguauacuugaacaauaccacaaucgagaaggaaauuugucccgagguggucgaguauaggaacuggaguaaaccucagugccaaaucaccggguucgcgccauuuagcaaggauaauuccauacgguuaucugcugacggagauauuugggugacucgcgaacccuacguuucgugugacccugguaaaugcuaucaguucgcccugggccaggggacaacccuagauaacaagcacucaaauggaacgauccaugaccguauuccacaccgaacucuccugaugaacgagcuuggcgugcccuuucaucuggguaccaagcaggucuguguggcauggagcaguuccucuugccacgaugggaaagccugguugcacguauguguuacaggagacgauagaaaugcuacugccagcuucaucuacgacggcaggcucguggauuccaucggcucauggagucaaaacauucugcggacccaggaaagcgagugcgucuguauaaaugggacaugcaccguggugaugacggacggaucugcauccggucgcgcugauacuagaauccuguuuauuaaggagggcaaaaucguccauauaucaccucucagcgggagugcccagcacauugaagagugcucuuguuauccaagguacccggacguucggugcaucugucgcgacaacuggaagggauccaaucgacccgugaucgauauuaacauggaagacuauagcaucgauucgucuuacguaugcuccggcuuagugggugacacaccuagaaacgaugacucaaguagcaauuccaacuguagggauccaaauaacgagcgggggaaucccggagucaaaggcugggcguucgacaacggcgaugacguguggauggggcguaccauuucuaaggaucugcgcagcggauacgaaacuuuuaagguuauagguggcuggucaacaccuaauaguaaaucccaggugaacagacaagucaucguggacaauaacaauuggagcggguauucuggaauuuucucaguagagggcaagaguugcaucaacagguguuuuuacguugagcuuauccggggucgaccacaggaaacccgcgugugguggacgagcaauuccauugucguguucugcgggaccucuggcacauauggaacuggcucguggcccgacggggcaaacauaaauuuuaugccgaucuga

SEQ ID NO: 144460 - RNA, 1410 nt, Artificial Sequence
  derived and/or modified CDS sequence (opt3) from neuraminidase__InfluenzaA__ACD85245
augaaccccaaucagaagaucauuaccauaggcagcgugucccugaucauugccacagucugcuuccucaugcaaaucgcuauucuuguuacuacggugacccugcacuuuaaacagcaugagugugacucuccugcaucaaaccagguaaugccaugcgaaccgaucauaaucgagagaaauauuacagaaaucguguacuugaacaauacuaccauugagaaggaaaucugucccagggucguggaguaucggaacuggaguaaaccucagugccaaauaacaggguucgccccauuuagcaaggauaauuccauucgcuuaucugcgggaggugacaucuggguuacccgagagcccuacgugucgugugauccuggcaaaugcuaucaguucgcucuggggcagggaacuacacuagacaacaagcacucaaaugauaccauucaugaccguaucccacacagaacgcuccugaugaacgaacuuggcguccccuuucaucuggguacuaggcaaguguguaucgccuggagcaguuccucuugccacgaugggaaggcaugguugcacguauguauuaccggagacgauaaaaaugccacagcuagcuucauauacgacggccggcucguugauuccaucggcucauggagucagaacauucugcgcacucaggagagcgaaugcguguguaucaaugggaccugcacagucgugaugaccgacggaucugcauccgguagagccgauacgaggauacuguuuauugaggagggcaagaucgugcauaucucaccucucagcgggagugcucagcacgucgaagagugcucuuguuauccacgguacccgggaguucgcugcauuugucgagacaacuggaaaggcuccaauagacccgugguagacaucaacauggaagauuauagcauugacucgucuuacgugugcuccgguuuagucggggauacuccuaggaacgacgaucggucaaguaauagcaacugucguaauccaaacaaugagcgcggaaaccagggcgugaagggcugggccuucgacaauggggaugacguuuggaugggaagaacaauauccaaagaucugaggucugguuacgaaaccuuuaaggugaucggcggguggagcacucccaacucaaagagucaaauuaaucggcaggucaucguggacuccgaugaccgaagcggauauucuggcaucuucucaguagaggguaaaaguugcauuaaccgcuguuuuuacguugagcuuauaagagggaggaagcaggaaacacgggugugguggaccagcaauuccaucgucguguucugcggcacgucuggaaccuauggcacagggucguggccugacggagcgaacauuaauuuuaugccaaucuga

SEQ ID NO: 144461 - RNA, 1410 nt, Artificial Sequence
  derived and/or modified CDS sequence (opt3) from neuraminidase__InfluenzaA__ACD85454
augaaccccaaucagaagaucauuaccauaggcagcgugucccugacaaucucuacuauuggguucuuuaugcaaacggccauccucauuaccacagucacucuucacuucaaacaguacgaguuuaacucaccuccaaauaaccagguuaugcugugcgaaccgaccaucauagagagaaauaucacagaaauuguguauuugaccaacacuacaaucgagaaggaaauuugucccaaauuagcugaguacaggaauuggaguaagccucagugcgacaucaccggauucgcaccauuuagcaaagauaacuccauacggcugucugccgguggcgacauuuggguaacgcgcgagcccuaugugucgugugauccugacaagugcuaccaauucgcgcuagggcagggaacuacccucaauaacguccauucaaaugauacagugcgaaaccguacuccauauagaacccugcuuaugaaugaacugggcguucccuuucacuuggguacaaaacagguguguaucgcuuggagcaguuccucuugccaugacgggaaggccuggcuccacgucuguauuaccggagaugacaagaacgcaacggccagcuucaucuacaauggcaggcugguggauuccaucguaucauggaguaaagagauucugcggacucaggaaagcgagugcguuuguauaaacggcacaugcaccguggucaugacugacgggucugcuuccggaaaggcagauacaaaaauccucuuuauugaggaagguaagaucgugcauaccucaacguuaagcggcagugcccaacacguggaggaauguucuugcuauccucgcuacccaggggucagaugcguuuguagggacaacuggaagggauccaaucggccgauaguggauauuaacaucaaagaccacagcaucguaucgucuuacgugugcuccggccuggucggugacacaccccgcaagaaugauucaaguagcuccucucauugucuugacccuaacaaugaggaagggggacacggcgugaaaggcugggcuuucgaugacgggaacgauguuuggaugggacgaaccauuagcgagaagucaagauuggguuaugagacuuuuaaagugaucgaaggcuggaguaauccaaaguccaaacugcagauuaacaggcaggucauaguggaccgggggaaucguagcggauacucuggcaucuucucaguagaggguaagaguugcauuaaccgcuguuuuuauguugaacuaaucagagggaggaaggaggaaaccgaggugcucuggacaagcaauuccaucgucguguucugcggcacuucuggaaccuacggcacagggucguggcccgauggagccgacauuaaccugaugccuauauga

SEQ ID NO: 144462 - RNA, 1410 nt, Artificial Sequence
  derived and/or modified CDS sequence (opt3) from neuraminidase__InfluenzaA__ACD85465
augaaccccaaucagaagaucauuaccauaggcagcgugucccugacaaucucuacuauuggguucuuuaugcaaacggccauccucauuaccacagucacucuucacuucaaacaguacgaguuuaacucaccuccaaauaaccagguuaugcugugcgaaccgaccaucauagagagaaauaucacagaaauuguguauuugaccaacacuacaaucgagaaggaaauuugucccaaauuagcugaguacaggaauuggaguaagccucagugcgacaucaccggauucgcaccauuuagcaaagauaacuccauacggcugucugccgguggcgacauuuggguaacgcgcgagcccuaugugucgugugauccugacaagugcuaccaauucgcgcuagggcagggaacuacccucaauaacguccauucaaaugauacagugcgagaccguacuccauauagaacccugcuuaugaacgaacugggcguucccuuucacuuggguacaaaacagguguguaucgcuuggagcaguuccucuugccaugaugggaaggccuggcuccacgucuguauuaccggagacgauaagaaugcaacggccagcuucaucuacaacggcaggcugguggacuccaucguaucauggaguaaagagauucugcggacucaggaaagcgagugcguuuguauaaauggcacaugcaccguggucaugacugaugggucugcuuccggaaaggcagacacaaaaauccucuuuauugaggaagguaagaucgugcauaccucaacguuaagcggcagugcccaacacguggaggaauguucuugcuauccucgcuacccaggggucagaugcguuuguagggauaacuggaagggauccaaccggccgauaguggacauuaauaucaaagaccacagcaucguaucgucuuacgugugcuccggccuggucggugauacaccccgcaagaacgacucaaguagcuccucucauugucuugauccuaauaacgaggaagggggacacggcgugaaaggcugggcuuucgacgaugggaaugacguuuggaugggacgaaccauuagcgagaagucaagauuggguuaugagacuuuuaaagugaucgaaggcuggaguaacccaaaguccaaacugcagauuaauaggcaggucauaguggaucgggggaaccguagcggauacucuggcaucuucucaguagaggguaagaguugcauuaaucgcuguuuuuauguugaacuaaucagagggaggaaggaggaaaccgaggugcucuggacaagcaacuccaucgucguguucugcggcacuucuggaaccuacggcacagggucguggcccgacggagccgauauuaaucugaugccuauauga

SEQ ID NO: 144463 - RNA, 1410 nt, Artificial Sequence
  derived and/or modified CDS sequence (opt3) from neuraminidase__InfluenzaA__ACD85487
augaaccccaaucagaagaucauuaccauaggcagcgugucccugaucauuucuacaaucugcuucuuuaugcaaacugccauucucaucacgaccgucacacuucacuucaaacaguacgaguuuaacucaccuccaaauaaccagguuaugcugugugaaccgacuauaaucgagagaaauauuaccgaaaucguguauuugacaaacaccacuauugagaaggaaaucugccccaaauuagcugaguacaggaauuggaguaagccucagugugacauaacaggguucgcaccauuuagcaaagauaacuccauucggcugucugccggaggugacaucuggguaacccgcgagcccuaugugucgugcgauccugacaaguguuaccaauucgcgcuaggccaggggacgacucucaauaacguccauucaaaugauaccgugcgaaaccguacaccauauagaacucugcuuaugaaugaacugggaguucccuuucacuugggcaccaaacaggugugcauugcuuggagcaguuccucuugucaugacgguaaggccuggcuccacgucugcaucacaggggaugacaagaacgcaaccgccagcuucaucuacaauggaaggcugguggauuccauuguaucauggaguaaagagauacugcggacgcaggaaagcgaguguguuugcaucaacggcacuuguacaguggucaugaccgacggcucugcuuccgggaaggcagauacuaaaauucucuuuaucgaggaaggaaagauagugcauacaucaaccuuaagcgguagugcccaacacguggaggaaugcucuugcuauccucgcuacccaggcgucagauguguuugcagggacaacuggaagggguccaaucggccgauuguggauaucaacaucaaagaccacagcauuguaucgucuuacguguguuccggacuggucggcgacacgccccgcaagaaugauucaaguagcuccucucauugccuugacccuaacaaugaggaaggugggcacggagugaaaggcugggcuuucgaugacggcaacgauguuuggauggggcgaaccaucagcgagaagucaagauugggauaugagacauuuaaagugauugaagguuggaguaauccaaacuccaagcugcagauaaauaggcaggucaucguggaccggggcaaccguagcggguacucuggaauuuucucaguagagggcaaaaguuguaucaaucgcugcuuuuauguugaacuaaucagagguaggaaggaggaaacugaggugcucuggaccagcaacuccauugucguguucugugggacaucuggcacuuacggaaccggcucguggcccgauggggccgacauaaaucugaugccuaucuga

SEQ ID NO: 144464 - RNA, 1410 nt, Artificial Sequence
  derived and/or modified CDS sequence (opt3) from neuraminidase__InfluenzaA__ACD85498
augaaccccaaucagaagaucauuaccauaggcagcgugucccugaucauuucuacaaucugcuucuuuaugcaaacugccauucucaucacgaccgucacacuucacuucaaacaguacgaguuuaacucaccuccaaauaaccagguuaugcugugugaaccgacuauaaucgagagaaauauuaccgaaaucguguauuugacaaacaccacuauugagaaggaaaucugccccaaauuagcugaguacaggaauuggaguaagccucagugugacauaacaggguucgcaccauuuagcaaagauaacuccauucggcugucugccggaggugacaucuggguaacccgcgagcccuaugugucgugcgauccugacaaguguuaccaauucgcgcuaggccaggggacgacucucaauaacguccauucaaaugauaccgugcgagaccguacaccauauagaacucugcuuaugaacgaacugggaguucccuuucacuugggcaccaaacaggugugcauugcuuggagcaguuccucuugucaugaugguaaggccuggcuccacgucugcaucacaggggacgauaagaaugcaaccgccagcuucaucuacaacggaaggcugguggacuccauuguaucauggaguaaagagauacugcggacgcaggaaagcgaguguguuugcaucaauggcacuuguacaguggucaugaccgauggcucugcuuccgggaaggcagacacuaaaauucucuuuaucgaggaaggaaagauagugcauacaucaaccuuaagcgguagugcccaacacguggaggaaugcucuugcuauccucgcuacccaggcgucagauguguuugcagggauaacuggaagggguccaaccggccgauuguggacaucaauaucaaagaccacagcauuguaucgucuuacguguguuccggacuggucggcgauacgccccgcaagaacgacucaaguagcuccucucauugccuugauccuaauaacgaggaaggugggcacggagugaaaggcugggcuuucgacgauggcaaugacguuuggauggggcgaaccaucagcgagaagucaagauugggauaugagacauuuaaagugauugaagguuggaguaacccaaaguccaaacugcagauaaauaggcaggucaucguggaucggggcaaccguagcggguacucuggaauuuucucaguagagggcaagaguuguaucaaucgcugcuuuuauguugaacuaaucagagguaggaaggaggaaacugaggugcucuggaccagcaacuccauugucguguucugugggacaucuggcacuuacggaaccggcucguggcccgacggggccgauauaaaucugaugccuaucuga

SEQ ID NO: 144465 - RNA, 1410 nt, Artificial Sequence
  derived and/or modified CDS sequence (opt3) from neuraminidase__InfluenzaA__ACD85509
augaaccccaaucagaagaucauuaccauaggcagcgugucccugacaaucucuacuauuugcuucuuuaugcaaacggccauccucauuaccacagucacucuucacuucaaacaguacgaguuuaacucaccuccaaauaaccagguuaugcugugugaaccgaccaucauagagagaaauaucacagaaauuguguauuugaccaacacuacaaucgagaaggaaauuugccccaaauuagcugaguacaggaauuggaguaagccucagugugacaucaccggguucgcaccauuuagcaaagauaacuccauacggcugucugccggaggugacauuuggguaacgcgcgagcccuaugugucgugcgauccugacaaguguuaccaauucgcgcuaggccaggggacuacccucaauaacguccauucaaaugauacagugcgaaaccguacuccauauagaacccugcuuaugaaugaacugggaguucccuuucacuugggcacaaaacaggugugcaucgcuuggagcaguuccucuugucaugacgguaaggccuggcuccacgucugcauuaccggggaugacaagaacgcaacggccagcuucaucuacaauggaaggcugguggauuccaucguaucauggaguaaagagauucugcggacucaggaaagcgaguguguuugcauaaacggcacauguaccguggucaugacugacggcucugcuuccgggaaggcagauacaaaaauccucuuuauugaggaaggaaagaucgugcauaccucaacguuaagcgguagugcccaacacguggaggaaugcucuugcuauccucgcuacccaggcgucagauguguuugcagggacaacuggaagggguccaaucggccgauaguggauauuaacaucaaagaccacagcaucguaucgucuuacguguguuccggacuggucggcgacacaccccgcaagaaugauucaaguagcuccucucauugccuugacccuaacaaugaggaagguagccgaggggugaaaggaugggcuuucgaugacggcaacgauguuuggaugggcagaaccauuucagagaagaguagguugggguaugagacuuuuaaagugaucgaaggaugguccaauccaaagagcaaacugcagauuaaccggcaggucauaguggaccgugguaaucgcucuggcuacucagggaucuucaguguagagggaaagagcuguauuaacagaugcuuuuauguugaacuaaucaggggccggaaggaggaaaccgaggugcucuggacauccaauucuaucgucguguucugugguacuucggggaccuacggcacaggaagcuggcccgauggcgccgacauuaaccugaugccuauauga

SEQ ID NO: 144466 - RNA, 1410 nt, Artificial Sequence
  derived and/or modified CDS sequence (opt3) from neuraminidase__InfluenzaA__ACD85520
augaaccccaaucagaagaucauuaccauaggcagcgugucccugaucauuucuacaaucggguucuuuaugcaaacugccauucucaucacgaccgucacacuucacuucaaacaguacgaguuuaacucaccuccaaauaaccagguuaugcugugcgaaccgacuauaaucgagagaaauauuaccgaaaucguguauuugacaaacaccacuauugagaaggaaaucugucccaaauuagcugaguacaggaauuggaguaagccucagugcgacauaacaggauucgcaccauuuagcaaagauaacuccauucggcugucugccgguggcgacaucuggguaacccgcgagcccuaugugucgugugauccugacaagugcuaccaauucgcgcuagggcagggaacgacucucaauaacguccauucaaaugauaccgugcgagaccguacaccauauagaacucugcuuaugaacgaacugggcguucccuuucacuuggguaccaaacagguguguauugcuuggagcaguuccucuugccaugaugggaaggccuggcuccacgucuguaucacaggagacgauaagaaugcaaccgccagcuucaucuacaacggcaggcugguggacuccauuguaucauggaguaaagagauacugcggacgcaggaaagcgagugcguuuguaucaauggcacuugcacaguggucaugaccgaugggucugcuuccggaaaggcagacacuaaaauucucuuuaucgaggaagguaagauagugcauacaucaaccuuaagcggcagugcccaacacguggaggaauguucuugcuauccucgcuacccaggggucagaugcguuuguagggauaacuggaagggauccaaccggccgauuguggacaucaauaucaaagaccacagcauuguaucgucuuacgugugcuccggccuggucggugauacgccccgcaagaacgacucaaguagcuccucucauugucuugauccuaauaacgaggaagggggacacggcgugaaaggcugggcuuucgacgaugggaaugacguuuggaugggacgaaccaucagcgagaagucaagauuggguuaugagacauuuaaagugauugaaggcuggaguaacccaaaguccaaacugcagauaaauaggcaggucaucguggaucgggggaaccguagcggauacucuggcauuuucucaguagaggguaagaguugcaucaaucgcuguuuuuauguugaacuaaucagagggaggaaggaggaaacugaggugcucuggaccagcaacuccauugucguguucugcggcacaucuggaacuuacggcaccgggucguggcccgacggagccgauauaaaucugaugccuaucuga

SEQ ID NO: 144467 - RNA, 1410 nt, Artificial Sequence; identical to SEQ ID NO: 144462
  derived and/or modified CDS sequence (opt3) from neuraminidase__InfluenzaA__ACD85553

SEQ ID NO: 144468 - RNA, 1410 nt, Artificial Sequence
  derived and/or modified CDS sequence (opt3) from neuraminidase__InfluenzaA__ACD85564
augaaccccaaucagaagaucauuaccauaggcagcgugucccugaucauuucuacaaucugcuucuuuaugcaaacugccauucucaucacgaccgucacacuucacuucaaacaguacgaguuuaacucaccuccaaauaaccagguuaugcugugugaaccgacuauaaucgagagaaauauuaccgaaacagcucauuugaccaacacuacaaucgagaaggaaauuugccccaaauuagcagaguauaggaauuggaguaagccucagugugacaucaccggguucgccccauuuagcaaagauaacuccauacggcugucugcgggaggugacauuugggugacgcgcgagcccuacguaucgugcgauccugacaaguguuaucaauucgcucuaggccaggggacuacccucaauaacgugcacucaaaugauacaguccgagaccguacuccauacagaacccugcuuaugaacgaacugggagugcccuuucauuugggcacaaagcagguuugcaucgccuggagcaguuccucuugucacgaugguaaagcauggcuccaugugugcauuaccggggacgauaagaaugccacggcuagcuucaucuauaacggaaggcuggucgacuccaucgugucauggaguaaagagauucugcggacucaggaaagcgaguguguaugcauaaauggcacauguaccguugugaugacugauggcucugcauccgggaaggccgacacaaaaauccucuuuauugaggaaggaaagaucguccacaccucaacguuaagcgguagugcucaacacguggaggaaugcucuugcuacccucgcuauccaggcgugagaugugucugcagggauaacuggaagggguccaaccggccgauaguugacauuaauaucaaagaccauagcaucgugucgucuuacguauguuccggacuggugggcgauacccccaggaagaacgacucaaguagcuccucucacugccuugauccuaauaacgaggaaggugggcauggagucaaaggcugggccuucgacgauggcaaugacguguggauggggcgaacaauuagcgagaagucaagauugggauacgagacuuuuaaaguuaucgaagguuggaguaacccaaaguccaaacugcagauuaaucgccaggugauagucgaucggggcaaccguagcggguauucuggaaucuucucaguggagggcaagaguuguauuaaucgcugcuuuuacguagaacuaaucagagguaggaaggaggaaaccgagguucucuggacaagcaacuccaucguggucuucugugggacuucuggcaccuauggaacaggcucguggcccgacggggcggauauuaaucugaugccuauauga

SEQ ID NO: 144469 - RNA, 1410 nt, Artificial Sequence
  derived and/or modified CDS sequence (opt3) from neuraminidase__InfluenzaA__ACD85575
augaaccccaaucagaagaucauuaccauaggcagcgugucccugaucauuucuacaaucugcuucuuuaugcaaacugccauucucaucacgaccgucacacuucacuucaaacaguacgaguuuaacucaccuccaaauaaccagguuaugcugugugaaccgacuauaaucgagagaaauauuaccgaaaucguguauuugacaaacaccacuauugagaaggaaaucugccccaaauuagcugaguacaggaauuggaguaagccucagugugacauaacaggguucgcaccauuuagcaaagauaacuccauucggcugucugccggaggugacaucuggguaacccgcgagcccuaugugucgugcgauccugacaaguguuaccaauucgcgcuaggccaggggacgacucucaauaacguccauucaaaugauaccgugcgagaccguacaccauauagaacucugcuuaugaacgaacugggaguucccuuucacuugggcaccaaacaggugugcauugcuuggagcaguuccucuugucaugaugguaaggccuggcuccacgucugcaucacaggggacgauaagaaugcaaccgccagcuucaucuacaacggaaggcugguggacuccauuguaucauggaguaaagagauacugcggacgcaggaaagcgaguguguuugcaucaauggcacuuguacaguggucaugaccgauggcucugcuuccgggaaggcagacacuaaaauucucuuuaucgaggaaggaaagauagugcauacaucaaccuuaagcgguagugcccaacacguggaggaaugcucuugcuauccucgcuacccaggcgucagauguguuugcagggauaacuggaagggguccaaccggccgauuguggacaucaauaucaaagaccacagcauuguaucgucuuacguguguuccggacuggucggcgauacgccccgcaagaacgacucaaguagcuccucucauugccuugauccuaauaacgaggaaggugggcacggagugaaaggcugggcuuucgacgauggcaaugacguuuggauggggcgaaccaucagcgagaagucaagauugggauaugagacauuuaaagugauugaagguuggaguaaccauaaguccaaacugcagauaaauaggcaggucaucguggaucggggcaaccguagcggguacucuggaauuuucucaguagagggcaagaguuguaucaaucgcugcuuuuauguugaacuaaucagagguaggaaggaggaaacugaggugcucuggaccagcaacuccauugucguguucugugggacaucuggcacuuacggaaccggcucguggccagacggggccgauauaaaucugaugcccaucuga

SEQ ID NO: 144470 - RNA, 1410 nt, Artificial Sequence
  derived and/or modified CDS sequence (opt3) from neuraminidase__InfluenzaA__ACD85586
augaaccccaaucagaagaucauuaccauaggcagcgugucccugacaaucucuacuauuugcuucuuuaugcaaacggccauccucauuaccacagucacucuucacuucaaacaguacgaguuuaacucaccuccaaauaaccagguuaugcugugugaaccgaccaucauagagagaaauaucacagaaauuguguauuugaccaacacuacaaucgagaaggaaauuugccccaaauuagcugaguacaggaauuggaguaagccucagugugacaucaccggguucgcaccauuuagcaaagauaacuccauacggcugucugccggaggugacauuuggguaacgcgcgagcccuaugugucgugcgauccugacaaguguuaccaauucgcgcuaggccaggggacuacccucaauaacguccauucaaaugauacagugcgagaccguacuccauauagaacccugcuuaugaacgaacugggaguucccuuucacuugggcacaaaacaggugugcaucgcuuggagcaguuccucuugucaugaugguaaggccuggcuccacgucugcauuaccggggacgauaagaaugcaacggccagcuucaucuacaacggaaggcugguggacuccaucguaucauggaguaaagagauucugcggacucaggaaagcgaguguguuugcauaaauggcacauguaccguggucaugacugauggcucugcuuccgggaaggcagacacaaaaauccucuuuauugaggaaggaaagaucgugcauaccucaacguuaagcgguagugcccaacacguggaggaaugcucuugcuauccucgcuacccaggcgucagauguguuugcagggauaacuggaagggguccaaccggccgauaguggacauuaauaucaaagaccacagcaucguaucgucuuacguguguuccggacuggucggcgauacaccccgcaagaacgacucaaguagcuccucucauugccuugauccuaauaacgaggaaggugggcgaggagugaaaggcugggcuuucgacgauggcaaugacguuuggauggggagaaccauuagcgagaagucaagguugggauaugagacuuuuaaagugaucgaagguuggaguaacccaaaguccaaacugcagaccaaucggcaggucauuguggaucguggcaaccgcagcggguacucuggaauauucucaguagagggcaagaguuguaucaauagaugcuuuuauguugaacuaauuaggggucggaaggaggaaacagaggugcucuggacuagcaacuccaucgucguguucugugggaccucuggcacauacggaaccggcucguggcccgacggggccgauaucaaucugaugccuauuuga

SEQ ID NO: 144471 - RNA, 1410 nt, Artificial Sequence
  derived and/or modified CDS sequence (opt3) from neuraminidase__InfluenzaA__ACD93582
augaaccccaaucagaagaucauuaccauaggcagcgugucccugacaaucucuacuauuugcuucuuuaugcaaaucgccauucucgcuacgaccgucacacuucacuucaaacaguacgaguuuaacucaccuccaaauaaccagguuaugcugugugaaccgacuaucauagagagaaauaucaccgaaauuguguauuugacaaacaccacuaucgagaaggaaauuugccccaaauuagcagaguacaggaauuggaguaagccucagugugacaucacaggguucgccccauuuagcaaagauaacuccauacggcugucugcgggaggugacauuuggguaacccgcgagcccuaugugucgugcgauccugacaaguguuaccaauucgcucuaggccaggggacgacucucaauaacguccauucaaaugauaccgugcgaggacguacaccauauagaacucugcuuaugaacgaacugggcguucccuuucacuuggguaccaaacaggugugcaucgccuggagcaguuccucuugucaugacgggaaggcauggcuccacgucugcauuacaggagaugacaagaaugccaccgcuagcuucaucuacaacggcaggcugguggauuccaucguaucauggaguaaagagauucugcggacgcaggaaagcgaguguguuugcauaaauggcacuuguacaguggucaugaccgacgggucugcauccggaaaggccgauacuaaaauccucuuuauugaggaagguaagaucgugcauacaucaaccuuaagcggcagugcucaacacguggaggaaugcucuugcuauccucgcuacccaggggucagauguguuugcagggacaacuggaagggauccaaccggccgauaguggauauuaauaucaaagaccacagcaucguaucgucuuacguguguuccggccuggucggugacacgccccgcaagaacgauucaaguagcuccucucauugccuugacccuaauaacgaggaagggggacacggcgugaaaggcugggccuucgaugacgggaaugauguuuggaugggacgaaccauuagcgagaagucaagauuggguuaugagacauuuaaagugaucgaaggcuggaguaacccaaaguccaaacugcagauuaauaggcaggucauaguggacaaggggaaccggagcggauacucuggcaucuucucaguagaggguaagaguuguauuaaucguugcuuuuauguugaacuaauccgcgggagaaaagaggaaacugaggugcucuggaccagcaacuccaucgucguguucuguggcacaucuggaacuuacggcaccgggucguggcccgauggagcggacauuaaucugaugccuauauga

SEQ ID NO: 144472 - RNA, 1410 nt, Artificial Sequence; identical to SEQ ID NO: 142760
  derived and/or modified CDS sequence (opt3) from neuraminidase__InfluenzaA__ACF09403

SEQ ID NO: 144473 - RNA, 1410 nt, Artificial Sequence; identical to SEQ ID NO: 143977
  derived and/or modified CDS sequence (opt3) from neuraminidase__InfluenzaA__ACF22151

SEQ ID NO: 144474 - RNA, 1410 nt, Artificial Sequence; identical to SEQ ID NO: 142143
  derived and/or modified CDS sequence (opt3) from neuraminidase__InfluenzaA__ACF22246

SEQ ID NO: 144475 - RNA, 1410 nt, Artificial Sequence; identical to SEQ ID NO: 142143
  derived and/or modified CDS sequence (opt3) from neuraminidase__InfluenzaA__ACF22257

SEQ ID NO: 144476 - RNA, 1410 nt, Artificial Sequence; identical to SEQ ID NO: 142143
  derived and/or modified CDS sequence (opt3) from neuraminidase__InfluenzaA__ACF22279

SEQ ID NO: 144477 - RNA, 1410 nt, Artificial Sequence; identical to SEQ ID NO: 142143
  derived and/or modified CDS sequence (opt3) from neuraminidase__InfluenzaA__ACF22290

SEQ ID NO: 144478 - RNA, 1410 nt, Artificial Sequence; identical to SEQ ID NO: 142143
  derived and/or modified CDS sequence (opt3) from neuraminidase__InfluenzaA__ACF22301

SEQ ID NO: 144479 - RNA, 1410 nt, Artificial Sequence; identical to SEQ ID NO: 142143
  derived and/or modified CDS sequence (opt3) from neuraminidase__InfluenzaA__ACF22312

SEQ ID NO: 144480 - RNA, 1410 nt, Artificial Sequence
  derived and/or modified CDS sequence (opt3) from neuraminidase__InfluenzaA__ACF22323
augaaccccaaucagaagaucauuaccauaggcagcgugucccugacaaucgccacugucugcuuccucaugcaaauugcuauccuuguuacgaccgugacacugcacuuuaaacaguacgagugugacucuccugcaucaaaccagguaaugccauaugaaccgauuaucauagagagaaauaucacugaaauuguguacuugaacaauaccacaaucgagaaggaaauuugccccaaagucguggaguauaggaacuggaguaagccucagugucaaaucaccggguucgccccauuuagcaaagauaauuccauacgguuaucugcgggaggugacauuuggguuacucgcgagcccuacgugucgugcgaucauggcaaguguuaucaguucgcucuggggcagggaacaacccuagacaacaagcacucaaaugauacgauccaugaccguauuccucaccgaacucuccugaugaacgaacuuggcgucccauuucaucuggguaccagacaggugugcaucgccuggagcaguuccucuugucacgaugggaaagcaugguugcacguaugcaucacaggagacgauaagaaugccacugcuagcuucauuuacgacggcaggcucguugauuccauaggcucauggagucaaaacauccugcggacccaggagagcgaaugugugugcauuaaugggacauguaccgucgugaugacggacggaucugcauccggucgcgccgauacuagaauccuguuuauagaggagggcaaaauugugcauaucucaccccucagcgggagugcucagcacgucgaagagugcucuugcuauccuagguacccaggaguucgguguaucugccgcgacaacuggaagggcuccaaucgaccggugguagacauuaacauggaagauuacagcaucgacucgucuuauguguguuccgguuuagucggggauacacccagaaacgacgauaggucaaguaauagcaacugccggaauccuaacaaugagcguggaaaccagggcgugaaaggcugggccuucgacaauggggaugacguuuggaugggacgcaccauuuccaaggaucugagaucugguuacgaaacuuuuaaggugauaggcggguggagcacaccaaacucaaaaagucaaaucaauaggcaggucauuguggacuccgauaaccggagcggauauucuggcaucuucucaguagaggguaagaguuguaucaaucgaugcuuuuacguugagcuuauucgcgggagaaaacaggaaaccagggugugguggacgagcaacuccauagucguguucuguggcaccucuggaacauauggcacugggucguggcccgacggagcgaauaucaacuuuaugccuauuuga

SEQ ID NO: 144481 - RNA, 1410 nt, Artificial Sequence; identical to SEQ ID NO: 142143
  derived and/or modified CDS sequence (opt3) from neuraminidase__InfluenzaA__ACF22334

SEQ ID NO: 144482 - RNA, 1410 nt, Artificial Sequence; identical to SEQ ID NO: 142143
  derived and/or modified CDS sequence (opt3) from neuraminidase__InfluenzaA__ACF22367

SEQ ID NO: 144483 - RNA, 1410 nt, Artificial Sequence
  derived and/or modified CDS sequence (opt3) from neuraminidase__InfluenzaA__ACF22378
augaaccccaaucagaagaucauuaccauaggcagcgugucccugacaaucgccacugucugcuuccucaugcaaauugcuauccuuguuacgaccgugacacugcacuuuaaacaguacgagugugacucuccugcaucaaaccagguaaugccaugcgaaccgauuaucauagagagaaauaucacugaaauuguguauuugaacaauaccacaaucgagaaggaaauuugucccaaagucguggaguacaggaacuggaguaagccucagugccaaaucaccggguucgccccauuuagcaaagauaauuccauacgguuaucugcgggaggugacauuuggguuacucgcgagcccuaugugucgugugaucauggcaagugcuaccaguucgcucuggggcagggaacaacccuagacaacaagcacucaaaugauacgauccaugaccguauuccucaccgaacucuccugaugaacgaacuuggcgucccauuucaucuggguaccagacagguguguaucgccuggagcaguuccucuugccacgaugggaaagcaugguugcacguauguaucacaggagacgauaagaaugccacugcuagcuucauuuaugacggcaggcucguugauuccauaggcucauggagucaaaacauccugcggacccaggagagcgaaugcguguguauuaaugggacaugcaccgucgugaugacggacggaucugcauccggucgcgccgauacuagaauccuguuuauagaggagggcaaaauugugcauaucucaccccucagcgggagugcucagcacgucgaagagugcucuuguuacccuagguauccaggaguucggugcaucugucgcgacaacuggaagggcuccaaucgaccggugguagacauuaacauggaagauuacagcaucgacucgucuuacgugugcuccgguuuagucggggauacacccagaaacgacgauaggucaaguaauagcaacuguaaaaauccuaacaaugagcggggaaaccagggcgugaagggcugggccuucgacaauggggaugacguuuggaugggacguaccauuuccaaggaucugcgcucugguuaugaaacuuuuaaagugauaggcggguggagcacaccaaacucaaagagucaaaucaauagacaggucauuguggacuccgauaacaggagcggauacucuggcaucuucucaguagaggguaaaaguugcaucaaucgguguuuuuauguugagcuuauucgagggcgcaagcaggaaaccagagugugguggacgagcaacuccauagucguguucugcggcaccucuggaacauacggcacugggucguggcccgacggagcgaauaucaacuuuaugccuauuuga

SEQ ID NO: 144484 - RNA, 1410 nt, Artificial Sequence
  derived and/or modified CDS sequence (opt3) from neuraminidase__InfluenzaA__ACF22389
augaaccccaaucagaagaucauuaccauaggcagcgugucccugacaaucgccacugucugcuuccucaugcaaauugcuauccuuguuacgaccgugacacugcacuuuaaacaguacgagugugacucuccugcaucaaaccagguaaugccaugcgaaccgauuaucauagagagaaauaucacugaaauuguguauuugaacaauaccacaaucgagaaggaaauuugucccaaagucguggaguacaggaacuggaguaagccucagugccaaaucaccggguucguuccauuuagcaaagauaauuccauacgguuaucugccggaggugacauuugggugacucgcgagcccuaugucucgugugaucauggcaagugcuaccaguucgcgcuggggcagggaacaacccuagacaacaagcacucaaaugauacgauccaugacaggauuccucaccguacucuccugaugaacgaacuuggcgugccauuucaucuggguaccagacagguauguaucgcuuggagcaguuccucuugccacgaugggaaagccugguugcacguuuguaucacaggagacgauaagaaugcaacugccagcuucauuuaugacggcaggcucguggauuccauaggcucauggagucaaaacauccugcggacccaggagagcgaaugcgucuguauuaaugggacaugcaccguggugaugacggacggaucugcuuccggucgcgcagauacuagaauccuguuuauagaggagggcaaaauuguccauaucucaccccucagcgggagugcccagcacguugaagagugcucuuguuacccuagguauccaggagugcggugcaucugucgcgacaacuggaagggcuccaaucgaccgguaguggacauuaacauggaagauuacagcaucgacucgucuuacgucugcuccgguuuagugggggauacacccagaaacgacgauaggucaaguaauagcaacugucggaauccuaacaaugagcguggaaaccagggcguuaaaggcugggcuuucgacaauggggaugacguguggaugggacgcaccauuuccaaggaucugagaucugguuaugaaacuuuuaaggucauaggcggguggagcacaccaaacucaaaaagucaaaucaaucgacaggugauuguagacuccgauaaccggagcggauacucuggcaucuucucaguugaggguaagaguugcaucaaucgauguuuuuauguggagcuuauucgcgggagaaaacaggaaaccagggucugguggacgagcaacuccauaguggucuucugcggcaccucuggaacauacggcacugggucguggcccgacggagccaauaucaacuuuaugccuauuuga

SEQ ID NO: 144485 - RNA, 1410 nt, Artificial Sequence
  derived and/or modified CDS sequence (opt3) from neuraminidase__InfluenzaA__ACF22400
augaaccccaaucagaagaucauuaccauaggcagcgugucccugacaaucgccacugucugcuuccucaugcaaauugcuauccuuguuacgaccgugacacugcacuuuaaacaguacgagugugacucuccugcaucaaaccagguaaugccaugcgaaccgauuaucauagagagaaauaucacugaaauuguguauuugaacaauaccacaaucgagaaggaaauuugucccaaagucguggaguacaggaacuggaguaagccucagugccaaaucaccggguucgccccauuuagcaaagauaauuccauacgguuaucugcgggaggugacauuuggguuacucgcgagcccuaugugucgugugaucauggcaagugcuaccaguucgcucuggggcagggaacaacccuagacaacaagcacucaaaugauacgauccaugacaggauuccucaccguacucuccugaugaacgaacuuggcgucccauuucaucuggguaccagacagguguguaucgccuggagcaguuccucuugccacgaugggaaagcaugguugcacguauguaucacaggagacgauaagaaugccacugcuagcuucauuuaugacggcaggcucauggauuccauaggcucauggagucaaaacauccugcggacccaggagagcgaaugcguuuguauuaaugggacaugcaccguggucaugacggacggaucugcauccggucgcgccgauacuagaauccuguuuauagaggagggcaaaauugugcauaucucaccccucagcgggagugcucagcacguggaagagugcucuuguuacccuagguauccaggaguccggugcaucugucgcgacaacuggaagggcuccaaucgaccgguuguggacauuaacauggaagauuacagcaucgacucgucuuacguaugcuccgguuuagugggggauacacccagaaacgacgauaggucaaguaauagcaacugucggaauccuaacaaugagcguggaaaccagggcgucaaaggcugggccuucgacaauggggaugacguguggaugggacgcaccauuuccaaggaucugagaucugguuaugaaacuuuuaagguuauaggcggguggagcacaccaaacucaaaaagucaaaucaaucgacaggugauugucgacuccgauaaccggagcggauacucuggcaucuucucaguggaggguaagaguugcaucaaucgauguuuuuauguagagcuuauucgcgggagaaaacaggaaaccaggguuugguggacgagcaacuccauaguggucuucugcggcaccucuggaacauacggcacugggucguggcccgacggagcgaauaucaacuuuaugccuauuuga

SEQ ID NO: 144486 - RNA, 1410 nt, Artificial Sequence; identical to SEQ ID NO: 144114
  derived and/or modified CDS sequence (opt3) from neuraminidase__InfluenzaA__ACF22411

SEQ ID NO: 144487 - RNA, 1413 nt, Artificial Sequence
  derived and/or modified CDS sequence (opt3) from neuraminidase__InfluenzaA__ACF33772
augaaccccaaucagaagaucauuaccauaggcagcaucuccauugccaucgggauuaucucucugaugcuccaaauaggaaacaucauuucaaucugggcuagucacagcauucagacagguucccagaaucauacuggcaucugcaaccagagaauaauuacguacgaaaauucuaccugggugaaccacacauaugucaauaucaacaauacuaacguuguggcagggaaagacaagaccccuguaacacuugccggaaauucgucacuguguagcauuaguggcugggcgaucuacaccaaagauaacuccaucaggauugguucuaagggggacguguucgucauacgggagccauuuaucagcugcucccauuuggaguguaaaacuuucuuuuuaacacaaggagcucugcuaaaugauaagcacucaaacggcaccgugaaggaccgcaguccguaucgagcccucaugagcugcccccugggcgaagcaccuucuccauacaauuccaaauucgagucaguugccuggagcgcuagugcaugucaugaugggauuggauggcuuacgaucgguauaucuggccccgacaacggggccguggcuguccugaaguauaacggaauuaucacuggcaccaucaaauccuggaagaaacagauuuugcguacacaggaaagcgagugcguguguaugaaugguucgugcuuuacuaucaugaccgaugggccuucuaacggagccgcguccuacaagauuuucaagauagagaaaggcaagguaacaaaaucaauggaacucaaugcaccaaacuuuuauuacgaggaauguaguugcuaccccgacaccggcacgguuaugugugugugcagagauaauuggcacgggagcaacaggccuugggucuccuucaaucagaaccuggacuaucaaaucggauacauuugcucugguguguuuggcgauaauccacggccgaaggacggggagggaagcuguaaccccgugacugucgauggcgccaaugguguuaaaggguucucauauaaguacggcaacggaguguggaucggccgcacaaaaaguaauagaaucaggaagggguuugagaugauuugggacccuaacggauggaccaauacugacuccgauuucagcguaaagcaggacauaguggcuaucacagauuggucugguuauucaggcaguuuuguccagcacccagaacugaccgggcucgacugcauucggcccuguuucuggguggaguuaguucgcggacugccucgagaaaacacgaccaucuggacaagcggcuccucuauuucguucugcggugugaacagcgauaucgccaauugguccuggccagacggggcagagcuucccuuuacuauagauaaauga

SEQ ID NO: 144488 - RNA, 1410 nt, Artificial Sequence
  derived and/or modified CDS sequence (opt3) from neuraminidase__InfluenzaA__ACF33778
augaaccccaaucagaagaucauuaccauaggcagcgugucccugacaaucucuacuauuugcuucuuuaugcaaaucgccauucucaucacgaccgucacacuucacuucaaacaguacgaguuuucaaguccuccaaacaaucagguuaugcugugugaaccgacuauaaucgagagaaacauuaccgaaaucguguauuugacaaauaccacuauugagaaggaaaucugccccaaauuagcugaguacaggaacuggagcaagccucagugugacauaacaggguucgcaccauuuuccaaagauaauucuauucggcugucggccggaggugacaucuggguaacccgcgagcccuaugugucaugcgauccugacaaguguuaccaauucgcgcuaggccaggggacgacucucaacaauguccauagcaacgauaccgugcacgaccgaacaccauaucguacucugcuuaugaaugaacugggcauucccuuucauuugggaaccaagcagguuugcaucgcuuggaguuccucuagcugucacgaugguaaagccuggcuccaugugugcgucacaggggacgauaagaacgcaaccgccuccuucaucuacaauggaagacugguggacucaauuguaaguuggagcaaagagauacugaggacgcaggaaucugaguguguuugcaucaacggcacuuguacaguggucaugaccgauggcuccgcuucagggaaggcagacacuaaaauucucuuuaucgaggaaggaaagauagugcacacaagcaccuuaagugguucugcccaaaauguggaggaaugcuccugcuauccucgguacccaggcguccgcuguguuugcagagauaacuggaaggggagcaacaggccgauuguggacaucaauaucaaagacuacucgauuguaucucgguauguguguuccggacuggucggcgauacgccccgcaagaacgacucaaguagcuccucucacugccuuaauccuaacaaugaggaaggugggcauggagugaaaggcugggcuuucgaugacggcaacgauguuuggauggggcgaaccaucagcgagaagucaagaaguggauacgagacauuuaaagugauugaagguugguccaauccaaacagcaaguugcagauaaauaggcaggucaucguggaccggggcaaccguucuggguauucaggaauuuucaguguagagggcaaaagcuguaucaaucgcugcuuuuacguugaacugaucagagguaggaaggaggaaacugaggugcuauggaccuccaacucuauugucguguucugugggacaucgggcacuuauggaaccggcagcuggcccgauggggccgacauaaaucucaugccuaucuga

SEQ ID NO: 144489 - RNA, 1410 nt, Artificial Sequence
  derived and/or modified CDS sequence (opt3) from neuraminidase__InfluenzaA__ACF33785
augaaccccaaucagaagaucauuaccauaggcagcgugucccugacaaucucuacuauuugcuucuuuaugcaaaucgccauucucaucacgaccgucacacuucacuucaaacaguacgaguuuaacucaccuccaaauaaccagguuaugcugugugaaccgacuauaaucgagagaaauauuaccgaaaucguguauuugacaaacaccacuauugagaaggaaaugugccccaaauuagcugaguacaggaauuggaguaagccucagugugacaucacaggguucgcaccauuuagcaaagauaacuccauacggcugucugccggaggugacauuuggguaacccgcgagcccuaugugucgugcgauccugacaaguguuaccaauucgcgcuaggccaggggacgacucucaauaacguccauucaaaugauaccgugcacguucgaacaccauaucguacucugcuuaugaacgaacugggagugcccuuucauuugggcaccaagcaggucugcaucgcuuggagcaguuccucuugucacgacgguaaagccuggcuccaugugugcguaacaggggaugacaagaaugcaaccgccagcuucauuuacaacggaagacugguugauuccaucgugucauggaguaaagacauccugaggacgcaggagagcgaaugugucugcauuaauggcacuuguacaguggugaugaccgauggcucugcuuccgggaaggcagacacuaaaauacucuuuaucgaggagggaaagauuguccacacaucaaccuuaagcgguagugcccaacacguugaagagugcucuugcuauccucgguacccaggcgugcgcuguguaugcagagauaacuggaagggguccaacaggccgaucguggacauaaauauuaaagacuacagcaucgucucgucuuauguguguuccggacugguuggcgauacgccccggaagaccgacucaaguagcuccucucauugccuugauccuaacaaugaagagggugggcacggagugaaaggcugggcuuucgacgauggcaacgacgucuggauggggcgcacaaucagcgaaaaguugcgacugggauacgagacuuuuaaagugauugaggguuggucaaauccaaacaguaagcuacagaucaauagacagguaauuguugauaggggcaaccgguccggguauagcggaauauucucuguggaaggcaaaucauguaucaaucguugcuuuuacgucgagcucauucgcgguagaaaggaagagaccgaagugcuguggacaaguaacagcaucgucguguucugugggacuuccggcaccuauggaacaggcucuuggcccgacggggccgauaucaaucuuaugccuauuuga

SEQ ID NO: 144490 - RNA, 1413 nt, Artificial Sequence
  derived and/or modified CDS sequence (opt3) from neuraminidase__InfluenzaA__ACF33787
augaaccccaaucagaagaucauuaccauaggcagcaucuccauugccaucgggauuaucucucugaugcuccaaauaggaaacaucauuucaaucugggcuagucacagcauucagacagguucccagaaucauacuggcaucugcaaccagagaauaauuacguacgaaaauucuaccugggugaaccacacauaugucaauaucaacaauacuaacguuguggcagggaaagacaagaccccuguaacacuugccggaaauucgucacuguguagcauuaguggcugggcgaucuacaccaaagauaacuccaucaggauugguucuaagggggacguguucgucauacgggagccauuuaucagcugcucccauuuggaguguaaaacuuucuuuuuaacacaaggagcucugcuaaaugauaagcacucaaacggcaccgugaaggaccgcaguccguaucgagcccucaugagcugcccccugggcgaagcaccuucuccauacaauuccaaauucgagucaguugccuggagcgcuagugcaugucaugaugggauuggauggcuuacgaucgguauaucuggccccgacaacggggccguggcuguccugaaguauaacggaauuaucacuggcaccaucaaauccuggaagaaacagauuuugcguacacaggaaagcgagugcguguguaugaaugguucgugcuuuacuaucaugaccgaugggccuggaaacggcgccgcgucuuacaagauuuucaagauagagaaaggcaagguaacaaaauccauggaacucaaugcaccaaacuuucacuaugaggaauguucaugcuaccccgacaccgggacgguuaugugugugugcagagauaauuggcacggaaguaacaggccuugggucagcuucaaucagaaccuggacuaccaaaucgguuauauuugcuccggcguguuuggggauaauccacggccgaaggacggagagggcucuuguaaccccgugacugucgauggugccaaugggguuaaaggcuucagcuacaaguauggaaacggcguguggaucgggcgcacaaaaucaaauagaaucaggaagggauuugagaugauuugggacccuaacgguuggaccaauacugacagugauuucuccguaaagcaggacauaguggcuaucacagauuggagcggcuacucugggucauuuguccagcauccagaacugaccggacucgacugcauucggcccuguuucuggguggaguuaguucgcggccugccuaaagaaaacacgaccaucuggacaagugguagcuccauuucuuucugcggggugaacucgggcaucgccaauuggagcuggccagauggagcagagcuucccuuuacuauagacaaguga

SEQ ID NO: 144491 - RNA, 1410 nt, Artificial Sequence; identical to SEQ ID NO: 143932
  derived and/or modified CDS sequence (opt3) from neuraminidase__InfluenzaA__ACF33798

SEQ ID NO: 144492 - RNA, 1410 nt, Artificial Sequence; identical to SEQ ID NO: 144105
  derived and/or modified CDS sequence (opt3) from neuraminidase__InfluenzaA__ACF41672

SEQ ID NO: 144493 - RNA, 1413 nt, Artificial Sequence; identical to SEQ ID NO: 144078
  derived and/or modified CDS sequence (opt3) from neuraminidase__InfluenzaA__ACF41683

SEQ ID NO: 144494 - RNA, 1410 nt, Artificial Sequence
  derived and/or modified CDS sequence (opt3) from neuraminidase__InfluenzaA__ACF41749
augaaccccaaucagaagaucauuaccauaggcagcgugucccugacaaucgccacugucugcuuccucaugcaaauugcuauccuuguuacgaccgugacacugcacuuuaaacaguacgagugugacucuccugcaucaaaccagguaaugccaugcgaaccgauuaucauagagagaaauaucacugggauuguguauuugaacaauaccacaaucgaaaaggagauuugucccaaagucguggaauacaggaacuggaguaagccucagugccaaaucaccggauucgccccauuuagcaaagauaauuccauacgguuaucugcggguggcgacauuuggguuacucgcgagcccuaugugucgugugaucaugggaagugcuaccaguucgcucugggacagggcacaacccuagacaacaagcacucaaaugauacgauccaugaccguauuccucaccgaacucuccugaugaacgagcuuggugucccauuucaucuggggaccagacagguguguaucgccuggagcaguuccucuugccacgauggaaaagcaugguugcacguauguaucacaggcgacgauaagaaugccacugcuagcuucauuuaugacggcaggcucguugauuccauagggucauggagucaaaacauccugcggacccaggaaagcgagugcguguguauuaauggaacaugcaccgucgugaugacggacgguucugcauccggccgcgccgauacuagaauccuguuuauagaagaggggaaaauugugcauaucucaccccucagcggaagugcucagcacgucgaggaaugcucuuguuacccuagguauccaggcguucggugcaucugucgcgacaacuggaaggguuccaaucgaccggugguagacauuaacauggaggauuacagcaucgacucgucuuacgugugcuccggguuagucggagauacacccagaaacgacgauaggucaaguaauagcaacugucggaauccuaacaaugaacguggcaaccagggcgugaaagggugggccuucgacaauggagaugacguuuggaugggucgcaccauuuccaaggaucugagaucuggcuaugagacuuuuaaggugauagggggauggagcacaccaaacucaaaaagucaaaucaauaggcaggucauuguggacuccgauaaccggagcggcuacucugguaucuucucaguagaagggaagaguugcaucaaucgauguuuuuauguugagcuuauucgcggcagaaaacaggagaccagggugugguggacgagcaacuccauagucguguucugcggaaccucuggcacauacgggacuggaucguggcccgacggugcgaauaucaacuuuaugccuauuuga

SEQ ID NO: 144495 - RNA, 1410 nt, Artificial Sequence
  derived and/or modified CDS sequence (opt3) from neuraminidase__InfluenzaA__ACF41760
augaaccccaaucagaagaucauuaccauaggcagcgugucccugacaaucgccacugucugcuuccucaugcaaauugcuauccuuguuacgaccgugacacugcacuuuaaacaguacgagugugacucuccugcaucaaaccagguaaugccaugcgaaccgauuaucauagagagaaauaucacugaaauuguguauuugaacaauaccacaaucgagaaggaaauuugucccaaagucguggaguacaggaacuggaguaagccucagugccaaaucaccggguucgccccauuuagcaaagauaauuccauacgguuaucugcgggaggugacauuuggguuacucgcgagcccuaugugucgugugaucgaggcaagugcuaccaguucgcucuggggcagggaacaacccuagacaacaagcauucaaaugauacgauccacgaccguauuccucauagaacucuccugaugaacgaacuuggcgucccauuucaccuggguaccaggcaaguguguaucgccuggagcaguuccucuugccaugaugggaaagcaugguugcacguauguaucacaggagacgauaagaaugccacugcuagcuucauuuaugacggccggcucguugauuccauaggcucauggagucagaacauccugcgcacccaggagagcgaaugcguguguauuaaugggacaugcaccgucgugaugacggacggaucugcauccgguagagccgauacuaggauccuguuuauagaggagggcaaaauugugcacaucucaccccucagcgggagugcucagcaugucgaagagugcucuuguuacccucgguauccaggaguucgcugcaucugucgagacaacuggaagggcuccaauagaccggugguagacauuaacauggaagauuacagcaucgacucgucuuacgugugcuccgguuuagucggggauacacccaggaacgacgaucggucaaguaauagcaacugucguaauccuaacaaugagcgcggaaaccagggcgugaaaggcugggccuucgacaauggggaugacguuuggaugggaagaaccauuuccaaggaucugaggucugguuaugaaacuuuuaaggugauaggcggguggagcacaccaaacucaaaaagucaaaucaaucggcaggucauuguggacuccgauaaccgaagcggauacucuggcaucuucucaguagaggguaagaguugcaucaaucgcuguuuuuauguugagcuuauuagagggaggaaacaggaaacccgggugugguggacgagcaacuccauagucguguucugcggcaccucuggaacauacggcacugggucguggcccgacggagcgaauaucaacuuuaugccuauuuga

SEQ ID NO: 144496 - RNA, 1410 nt, Artificial Sequence
  derived and/or modified CDS sequence (opt3) from neuraminidase__InfluenzaA__ACF41771
augaaccccaaucagaagaucauuaccauaggcagcgugucccugacaaucgccacugucugcuuccucaugcaaauugcuauccuuguuacgaccgugacacugcacuuuaaacaguacgagugugacucuccugcaucaaaccagguaaugccaugcgaaccgauuaucauagagagaaauaucacugaaauuguguauuugaacaauaccacaaucgagaaggaaauuugucccaaagucguggaguacaggaacuggaguaagccucagugccaaaucaccggguucgccccauuuagcaaagauaauuccauacgguuaucugcgggaggugacauuuggguuacucgcgagcccuaugugucgugugaucauggcaagugcuaccaguucgcucuggggcagggaacaacccuagacaacaagcacucaaaugauacgauccaugaccguauuccucaccgaacucuccugaugaacgaacuuggcgucccauuucaucuggguaccagacagguguguaucgccuggagcaguuccucuugccacgaugggaaagcaugguugcacguauguaucacaggagacgauaagaaugccacugcuagcuucauuuaugacggcaggcucguugauuccauaggcucauggagucaaaacauccugcggacccaggagagcgaaugcguguguauuaaugggacaugcaccgucgugaucacggacggaucugcauccggucgcgccgauacuagaauacuguuuauugaggagggcaaaaucgugcauaucucaccccucagcgggagugcucagcacgucgaagagugcucuuguuacccuagguauccaggaguucggugcauuugucgcgacaacuggaagggcuccaaucgaccggugguagacaucaacauggaagauuacagcauugacucgucuuacgugugcuccgguuuagucggggauacacccagaaacgacgauaggucaaguaauagcaacugucggaauccuaacaaugagcguggaaaccagggcgugaaaggcugggccuucgacaauggggaugacguuuggaugggacgcaccauauccaaggaucugagaucugguuaugaaacuuuuaaggugaucggcggguggagcacaccaaacucaaaaagucaaauuaauaggcaggucaucguggacuccgauaaccggagcggauacucuggcaucuucucaguagaggguaagaguugcauuaaucgauguuuuuauguugagcuuauacgcgggagaaaacaggaaaccagggugugguggacgagcaacuccaucgucguguucugcggcaccucuggaacauacggcacugggucguggcccgacggagcgaauauuaacuuuaugccuaucuga

SEQ ID NO: 144497 - RNA, 1410 nt, Artificial Sequence; identical to SEQ ID NO: 142143
  derived and/or modified CDS sequence (opt3) from neuraminidase__InfluenzaA__ACF41793

SEQ ID NO: 144498 - RNA, 1410 nt, Artificial Sequence; identical to SEQ ID NO: 142143
  derived and/or modified CDS sequence (opt3) from neuraminidase__InfluenzaA__ACF41804

SEQ ID NO: 144499 - RNA, 1410 nt, Artificial Sequence; identical to SEQ ID NO: 142143
  derived and/or modified CDS sequence (opt3) from neuraminidase__InfluenzaA__ACF41826

SEQ ID NO: 144500 - RNA, 1365 nt, Artificial Sequence; identical to SEQ ID NO: 143767
  derived and/or modified CDS sequence (opt3) from neuraminidase__InfluenzaA__ACF41837

SEQ ID NO: 144501 - RNA, 1413 nt, Artificial Sequence
  derived and/or modified CDS sequence (opt3) from neuraminidase__InfluenzaA__ACF41881
augaaccccaaucagaagaucauuaccauaggcagcaucuccauugccaucgggauuaucucucugaugcuccaaauaggaaacaucauuucaaucugggcuagucacagcauucagacagguucccagaaucauacuggcgugugcaaccagagaaucauaacguacgaaaauucuaccugggucaaccacacauauguuaauauuaacaauacuaacgugguagcagggaaagacaagaccucggugacacuugccggaaauucaagccuguguaguaucuccggcugggcgauuuacaccaaagauaacucuaucaggaucgguagcaagggggacgucuucgugauucgggagccuuuuauauccugcucacauuuggagugucgcacuuucuuuuuaacacaaggagcucugcuaaaugauaaacacaguaacggcaccguuaaggaccgaagcccauaucgugcccucaugucuugcccgcugggcgaagcacccuccccuuacaauucaaaguucgagagcguggccuggagugcuucugcaugucaugaugggaugggauggcuuacgaucgguauuuccggcccagacaacggggccgucgcugugcugaaauauaacggaaucauaacugaaaccauuaagagcuggaaaaagagaaucuugaggacacaggagucggagugcguauguguuaauggcucuugcuuuacuaucaugaccgauggucccuccaacggggccgcgucauacaaaauuuucaagaucgaaaagggaaaagugacaaagaguauugagcucaaugcaccuaacuuucacuaugaagaguguagcugcuacccagacaccggcacggucaugugugugugccgggauaauuggcacggcuccaaccgccccugggugucuuucaaucagaaccuggacuaccagauaggguauaucugcagcggagucuuuggugauaauccuagaccaaaagacggcgaggggucauguaacccgguuacuguggauggagccgacggcguaaaggguuucaguuacaaauaugggaauggcguguggauuggaaggacaaaguccaaccggcugcgcaaaggcuuugaaaugaucugggaccccaauggguggaccgauacugacagcgauuucucugucaagcaagacgugguugcuaucacagauuggucaggauacagugguagcuuugugcagcauccugagcucaccggcuuagacugcauucgaccauguuucugggucgaacuggugagagggcuucccagggagaacacgaccauauggacauccggaucuucgaucagcuucugcggcguaaauuccgauacugccaacuggucauggccugacggugcagaauugccauuuaccauugauaaguga

SEQ ID NO: 144502 - RNA, 1410 nt, Artificial Sequence; identical to SEQ ID NO: 143977
  derived and/or modified CDS sequence (opt3) from neuraminidase__InfluenzaA__ACF41892

SEQ ID NO: 144503 - RNA, 1410 nt, Artificial Sequence; identical to SEQ ID NO: 142375
  derived and/or modified CDS sequence (opt3) from neuraminidase__InfluenzaA__ACF41903

SEQ ID NO: 144504 - RNA, 1410 nt, Artificial Sequence
  derived and/or modified CDS sequence (opt3) from neuraminidase__InfluenzaA__ACF41914
augaaccccaaucagaagaucauuaccauaggcagcgugucccugacaaucucuacuauuugcuucuuuaugcaaaucgccauucucaucacgaccgucacacuucacuucaaacaguacgaguuuaacucaccuccaaauaaccagguuaugcugugugaaccgacuauaaucgagagaaauauuaccgaaaucguguauuugacaaacaccacuauugagaaggaaaucugccccaaauuagcugaguacaggaauuggaguaagccucaguguaacauaacaggguucgcaccauuuagcaaagacaauuccauucggcugucugccggaggugauaucuggguaacccgcgagcccuaugugucgugcgacccugauaaguguuaccaauucgcgcuaggccaggggacgacucucaacaauguccauucaaacgacaccgugcacgaucgaacaccauaucguacucugcuuaugaaugaacugggaguucccuuucauuugggcaccaaacaggugugcauugcuuggagcaguuccucuugucacgacgguaaggccuggcuccaugucugcgugacaggggaugacaagaacgcaaccgccagcuucaucuacaauggaagacugguagauuccaucguuucauggaguaaagagauucugaggacgcaggaaagcgagugugugugcauaaacggcacuuguacagucgugaugaccgacggcucugcuuccgggaaggcagauacuaaaauccucuuuauugaggaaggaaagaucgugcacacaucaaccuuaagcgguagugcccaacacgucgaggaaugcucuugcuauccucgguaccugggcguucgcugugugugcagagacaacuggaagggguccaauaggccaauaguagauauuaacaucaaagacuacagcaucgugucgucuuaugucuguuccggacuugugggcgacacgccgcggaagaaugauucaaguagcuccucucauugcuuggaccccaacaaugaggaaggugggcacggaguuaaaggcugggcuuucgaugacggcaacgauguguggauggggcgcaccauuagcgagaagcugcgaucaggauacgagacauuuaaagucaucgaagguuggaguaauccuaacuccaagcuacagauuaauagacaggugauaguagacaggggcaaccggagcggguauucuggaaucuucucaguugagggcaaaaguuguauuaaucguugcuuuuacguggaacucauccgcgguagaaaggaggaaacugagguccuguggaccagcaacuccaucguggucuucugugggacaucuggcacuuauggaaccggcucguggccagauggggccgacauuaaucuuaugcccauauga

SEQ ID NO: 144505 - RNA, 1413 nt, Artificial Sequence
  derived and/or modified CDS sequence (opt3) from neuraminidase__InfluenzaA__ACF41925
augaaccccaaucagaagaucauuaccauaggcagcaucuccauggccauugggaucauuucucugauccuccaaauaggaaacaucauuucaaucugggcuagucacagcauucagacagguucccagaaucauacuggcaucugcaaccagagaauaauuacguacgaaaauucuaccugggugaaccaaacauaugucaauaucaacaauacuaacguuguggcagggaaagacaagaccucgguaacacuugccggaaauucaagccuguguccuauuaggggcugggcgaucuacaccaaagauaacaguauccggauugguuccaagggggacguguucgucauacgcgagccauuuaucucuugcagccacuuggagugucgaacuuucuuuuuaacacagggagcucugcuaaaugauaaacauuccaacggcaccgugaaggaccguucaccguauagagcccucaugaguugcccccugggcgaagcaccuagcccauacaauucuagguucgaguccguugccuggucagcuagcgcaugucacgaugggaugggauggcuuacgauugguaucaguggccccgacaacggggccguggcuguccugaaguauaacggaauaauuacugaaaccaucaaaucuuggaagaaacggaucuugcgcacacaggaguccgagugcguguguguaaauggcagcugcuuuacuauuaugaccgaugguccuucgaacggggccgcgucuuacagaaucuucaagauugaaaaaggaaagguuacaaaguccauagagcucgacgcaccaaauuaucauuacgaagaguguucaugcuaccccgauaccggcacggugaugugugucugcagggacaacuggcacggcaguaaucggccuugggugagcuuuaaccagaaucuggauuaucaaaucggguacauuugcuccggaguguucggugacaacccacgcccgaaagauggcgaggggucuuguaaucccgucacuguugacggagccgacggcgugaaggguuuuagcuaucgauacgggaacggcguauggaucggaagaacaaaaucaaauaggcugcggaagggcuucgaaaugaucugggauccuaacggguggaccgacacugauagugacuuuuccgugaaacaggaugucguggcuaugacagacuggagcggauauucugguucauucguucagcacccagagcucaccggcuuagauugcaugcgucccuguuuuuggguggaacugauucgcgggagaccuagggagaauacgaccauauggacaaguggaagcuccaucucuuucugcggcgucaacucggacacugccaauuggagcuggccagauggugcagaacuucccuucaccauugacaaguga

SEQ ID NO: 144506 - RNA, 1413 nt, Artificial Sequence; identical to SEQ ID NO: 144505
  derived and/or modified CDS sequence (opt3) from neuraminidase__InfluenzaA__ACF41936

SEQ ID NO: 144507 - RNA, 1410 nt, Artificial Sequence
  derived and/or modified CDS sequence (opt3) from neuraminidase__InfluenzaA__ACF54392
augaaccccaaucagaagaucauuaccauaggcagcgugucccugacaacugccacggcuugcuuccucacccaaaucgcaauucuugucacaacuguuacccugcacuuuaaacagcaugagugugacucuccugccucaaaccaggugaugccaugcgaaccgaucauuaucgagagaaauauaacagaaaucguauacuugaacaauaccacuauugagaaggaaaucugucccaaaguggucgaguauaggaacuggaguaagccucagugccaaauuacaggguucgcgccauuuagcaaagauaauuccauccgguuaucugcuggaggugacauaugggugacccgcgagcccuacguuucgugugauucaggcaagugcuaucaguucgcccuggggcagggaacgacucuagacaacaagcacagcaaugauaccauucaugaccgaaucccucaccguacacuccugaugaacgaacuuggcgugccauuucaucuggguacuagacaggucuguauugcauggaguuccucuagcugccacgaugggaaagccugguugcacguguguaucaccggagacgauaagaaugcuacagcauccuucaucuacgacggcaggcucguagauucaauuggcaguuggagccaaaacauacugcggacccaggagucugaaugcguuuguaucaaugggacgugcacuguggucaugacagacggauccgccucaggucgcgcugauaccaggauucuguuuaucgaggagggcaaaauagugcauauuagcccccucagugggucugcccagcacguggaagagugcuccuguuauccuagguacccaggaguccggugcaucugucgcgacaacuggaagggcagcaaucgaccgguuguggacaucaacauggaagauuauucgauugacucuuccuacguaugcucagguuuagugggggauacucccagaaacgacgauagguucaguaauagcaacugucggaauccuaacaaugagcguggaaaccagggcgucaaaggcugggcguuugacaauggggaugacguguggaugggacgcacaaucuccaaggaucugagaucugguuacgaaaccuucaagguuauuggcggguggagcacgccaaacucaaaaagucaaauaaauagacaggugaucgucgacuccgauaaccggagcggauauucuggcaucuuuucaguggaggguaagaguugcauuaaucgauguuucuacguagagcuuauccgcgggagaaaacaggaaaccaggguuugguggacaagcaacuccauuguggucuuuugcggcacuucuggaaccuauggcacagggucguggcccgacggagcaaauauaaacuucaugccuaucuga

SEQ ID NO: 144508 - RNA, 1410 nt, Artificial Sequence; identical to SEQ ID NO: 142143
  derived and/or modified CDS sequence (opt3) from neuraminidase__InfluenzaA__ACF54403

SEQ ID NO: 144509 - RNA, 1410 nt, Artificial Sequence; identical to SEQ ID NO: 142143
  derived and/or modified CDS sequence (opt3) from neuraminidase__InfluenzaA__ACF54414

SEQ ID NO: 144510 - RNA, 1410 nt, Artificial Sequence; identical to SEQ ID NO: 142143
  derived and/or modified CDS sequence (opt3) from neuraminidase__InfluenzaA__ACF54425

SEQ ID NO: 144511 - RNA, 1410 nt, Artificial Sequence; identical to SEQ ID NO: 142143
  derived and/or modified CDS sequence (opt3) from neuraminidase__InfluenzaA__ACF54436

SEQ ID NO: 144512 - RNA, 1410 nt, Artificial Sequence
  derived and/or modified CDS sequence (opt3) from neuraminidase__InfluenzaA__ACF54447
augaaccccaaucagaagaucauuaccauaggcagcgugucccugacaaucgccacugucugcuuccucaugcaaauugcuauccuuguuacgaccgugacacugcacuuuaaacaguacgagugugacucuccugcaucaaaccagguaaugccaugcgaaccgauuaucauagagagaaauaucacugaaauuguguauuugaacaauaccacaaucgagaaggaaauuugucccaaagucguggaguacaggaacuggaguaagccucagugccaaaucaccggguucgccccauuuagcaaagauaauuccauacgguuaucugcgggaggugacauuuggguuacucgcgagcccuaugugucgugugaucauggcaagugcuaccaguucgcucuggggcagggaacaacccuagacaacaagcacucaaaugauacgauccaugaccguauuccucaccgaacucuccugaugaacgaacuuggcgucccauuucaucuggguaccaaacagguguguaucgccuggagcaguuccucuugccacgaugggaaggcaugguugcacguauguaucacaggagacgauaaaaaugccacugcuagcuucauuuaugacggcagacucguugauuccauaggcucauggagucaaaacauccugaggacccaggagagcgaaugcguguguauuaaugggacaugcaccgucgugaugacggacggaucugcauccggucgggccgauacucgcauccuguuuauagaggagggcaagauugugcauaucucaccccucagcgggagugcucagcacgucgaagagugcucuuguuacccuagauauccaggaguuaggugcaucugucgggacaacuggaaaggcuccaaucgcccggugguagacauuaacauggaagauuacagcaucgacucgucuuacgugugcuccgguuuagucggggauacaccccgaaacgacgauagaucaaguaauagcaacuguaggaauccuaacaaugagcggggaaaccagggcgugaagggcugggccuucgacaauggggaugacguuuggaugggacguaccauuuccaaggaucugcgcucugguuaugaaacuuuuaaagugauaggcggguggagcacaccaaacucaaagagucaaaucaauagacaggucauuguggacuccgauaacaggagcggauacucuggcaucuucucaguagaggguaaaaguugcaucaaucgguguuuuuauguugagcuuauucgagggcgcaagcaggaaaccagagugugguggacgagcaacuccauagucguguucugcggcaccucuggaacauacggcacugggucguggcccgacggagcgaauaucaacuuuaugccuauuuga

SEQ ID NO: 144513 - RNA, 1410 nt, Artificial Sequence
  derived and/or modified CDS sequence (opt3) from neuraminidase__InfluenzaA__ACF54469
augaaccccaaucagaagaucauuaccauaggcagcgugucccugacaaucgccacugucugcuuccucaugcaaauugcuauccuuguuacgaccgugacacugcacuuuaaacaguacgagugugacucuccugcaucaaaccagguaaugccaugcgaaccgauuaucauagagagaaauaucacugaaauuguguauuugaacaauaccacaaucgagaaggaaauuugucccaaagucguggaguacaggaacuggaguaagccucagugccaaaucaccggguucgccccauuuagcaaagauaauuccauacgguuaucugcgggaggugacauuuggguuacucgcgagcccuaugugucgugugaucauggcaagugcuaccaguucgcucuggggcagggaacaacccuagacaacaagcacucaaaugauacgauccaugaccgaaucccucaccguacucuccugaugaacgaacuuggcgucccauuucaucuggguaccagacagguguguauggccuggagcaguuccucuugccacgaugggaaagcaugguugcacguauguauuacaggagacgauaagaaugccacugcuagcuucaucuaugacggcaggcucguugauuccauuggcucauggagucaaaacauacugcggacccaggagagcgaaugcguguguaucaaugggacaugcaccgucgugaugacggacggaucugcauccggucgcgccgauacuaggauucuguuuaucgaggagggcaaaauagugcauauuucaccccucagcgggagugcucagcacgucgaagagugcucuuguuacccuagauauccaggaguucggugcaucugucgcgacaacuggaagggcuccaaucgaccggugguagacaucaacauggaagauuacagcauugacucgucuuacgugugcuccgguuuagucggggauacacccagaaacgacgauaggucaaguaauagcaacugucggaauccuaacaaugagcguggaaaccagggcgugaaaggcugggccuucgacaauggggaugacguuuggaugggacgcaccaucuccaaggaucugagaucugguuaugaaacuuuuaaggugauuggcggguggagcacaccaaacucaaaaagucaaauaaauaggcaggucaucguggacuccgauaaccggagcggauacucuggcauuuucucaguagaggguaagaguugcaucaaucgauguuuuuauguugagcuuauccgcgggagaaaacaggaaaccagggugugguggacgagcaacuccauugucguguucugcggcaccucuggaacauacggcacugggucguggcccgacggagcgaauauaaacuuuaugccuaucuga

SEQ ID NO: 144514 - RNA, 1410 nt, Artificial Sequence; identical to SEQ ID NO: 143808
  derived and/or modified CDS sequence (opt3) from neuraminidase__InfluenzaA__ACF54480

SEQ ID NO: 144515 - RNA, 1410 nt, Artificial Sequence
  derived and/or modified CDS sequence (opt3) from neuraminidase__InfluenzaA__ACF54502
augaaccccaaucagaagaucauuaccauaggcagcgugucccugacaaucgccacugucugcuuccucaugcaaauugcuauccuugcaacgaccguuacacugcacuuuaaacagcaugagugugacucuccugccucaaaccaggugaugccaugcgaaccgauuaucauagagagaaauaucacugaaauuguauacuugaacaauaccacaaucgagaaggaaauuugucccgagguggucgaguauaggaacuggaguaaaccucagugccaaaucaccggguucgcgccauuuagcaaggauaauuccauacgguuaucugcuggaggugacauuugggugacucgcgaacccuacguuucgugugauccuggcaaaugcuaucaguucgcccuggggcagggaacaacccuagacaacaagcacucaaauggcacgauccaugaucguauuccacaccgaacucuccugaugaacgagcuuggugugagcuuucaucuggggaccaagcaggucuguguggcauggaguuccucuagcugccacgacggaaaagccugguugcacguauguguuacaggcgaugacagaaaugcuacugcauccuucaucuacgauggcaggcucguggacucaaucgggaguuggagccaaaacauucugcggacccaggaaucugagugcgucuguauaaauggaacaugcaccguggugaugacggaugguuccgccucaggccgcgcugacacuagaauccuguuuauuaaggaggggaaaaucguccauauaagcccccucaguggaucugcccagcacauugaagagugcuccuguuauccuagguacccagauguucggugcaucugucgcgacaacuggaagggcagcaaucgaccggugaucgacauuaacauggaagauuauucgaucgacucuuccuacguaugcucagguuuagugggggauacacccagaaacgacgauaguagcuccaauucuaacuguagggacccuaauaacgagcggggaaauccaggcgucaaaggcugggcguucgauaacggggacgauguguggaugggacguaccauuaauaaggacagccgcucagguuacgaaacuuuuaagguuauaggcggguggaguacacccaacuccaaaagccaggugaauagacaagucaucguggauaacaauaacuggucuggauauucaggcauuuucaguguagaggguaagagcugcaucaauagguguuuuuacguugagcugauccgggggcgaccucaggaaacccgcgugugguggacguccaacucuauugucguguucugcggcaccucgggaacauauggcacugggagcuggccagacggagcaaauauaaacuuuaugcccaucuga

SEQ ID NO: 144516 - RNA, 1410 nt, Artificial Sequence; identical to SEQ ID NO: 144515
  derived and/or modified CDS sequence (opt3) from neuraminidase__InfluenzaA__ACF54513

SEQ ID NO: 144517 - RNA, 1410 nt, Artificial Sequence
  derived and/or modified CDS sequence (opt3) from neuraminidase__InfluenzaA__ACF54524
augaaccccaaucagaagaucauuaccauaggcagcgugucccugacaaucgccacugucugcuucuuuaugcaaauugcuauccucgcaacgaccguuacacuucacuucaaacagcaugagugugacucuccugccucaaaccaggugaugccaugcgaaccgauuaucauagagagaaauaucacugaaauuguauaccugaacaauaccacaaucgagaaggaaauuugucccgagguggucgaguauaggaacuggaguaaaccucagugccaaaucaccggguuugcgccauucagcaaggauaauuccauacgguugucugcuggaggugacauuugggugacucgcgaacccuacguuucgugugauccuggcaaaugcuaucaguuugccuuagggcagggaacaacccuggacaacaagcacucaaauggcacgauccaugaucguauuccacaccgaacucuacucaugaacgagcugggugugagcuuccaucuugggaccaagcaggucuguguggcauggaguuccucuagcugccacgacggaaaagccuggcugcacguauguguuacaggcgaugacagaaaugcuacugcauccuuuaucuacgauggcagguugguggacucaaucgggaguuggagccaaaacauucuccggacccaggaaucugagugcgucuguauaaauggaacaugcaccguggugaugacggaugguuccgccucaggccgcgcugacacuagaauccuguucauuaaggaggggaaaaucguccauauaagcccccugaguggaucugcccagcacauugaagagugcuccuguuauccuagguacccagauguucggugcaucugucgcgacaacuggaagggcagcaaucgaccggugaucgacauuaacauggaagauuauucgaucgacucuuccuacguaugcucaggucucgugggggauacacccagaaacgacgauaguagcuccaauucuaacuguagggacccuaauaacgagcggggaaauccaggcgucaaaggcugggcguuugauaacggggacgauguguggaugggacguaccauuaauaaggacagccgcucagguuacgaaacuuucaagguuauaggcggguggaguacacccaacuccaaaagccaggugaauagacaagucaucguggauaacaauaacuggucuggauauucaggcauuuuuaguguagaggguaagagcugcaucaauagguguuucuacguugaguuaauccgggggcgaccucaggaaacccgcgugugguggacguccaacucuauugucguguuuugcggcaccucgggaacauauggcacugggagcuggccagacggagcaaauauaaacuucaugcccaucuga

SEQ ID NO: 144518 - RNA, 1410 nt, Artificial Sequence
  derived and/or modified CDS sequence (opt3) from neuraminidase__InfluenzaA__ACF54535
augaaccccaaucagaagaucauuaccauaggcagcgugucccugaucauuucuacaaucugcuucuuuaugcaaacugccauucucaucacgaccgucacacuucacuucaaacaguacgaguuuaacucaccuccaaauaaccagguuaugcugugugaaccgacuauaaucgagagaaauauuaccaagaucguguauuugacaaacaccacuauugaaaaagagaucugccccaaguuagcugaauacaggaauuggaguaaaccucagugugacauaacaggguucgcaccauuuagcaaggauaacuccauucggcugucugccggaggugacaucuggguaacccgcgagcccuaugugucgugcgauccugacaaguguuaccaauucgcgcuaggccaggggacgacucucaauaacguccauucaaaugauaccgugcgagaccguacaccauauagaacucugcuuaugaacgagcugggaguucccuuucacuugggcaccaaacaggugugcauugcuuggagcaguuccucuugucaugaugguaaggccuggcuccacgucugcaucacaggggacgauaaaaaugcaaccgccagcuucaucuacaacggaaggcugguggacuccauuguaucauggaguaaggaaauacugcggacgcaggagagcgaauguguuugcaucaauggcacuuguacaguggucaugaccgauggcucugcuuccgggaaagcagacacuaagauucucuuuaucgaggagggaaagauagugcauacaucaaccuuaagcgguagugcccaacacguggaagagugcucuugcuauccucgcuacccaggcgucagauguguuugcagggauaacuggaaaggguccaaccggccgauuguggacaucaauaucaaggaccacagcauuguaucgucuuacguguguuccggacuggucggcgauacgccccgcaaaaacgacucaaguagcuccucucauugccuugauccuaauaacgaagagggugggcacggagugaagggcugggcuuucgacgauggcaaugacguuuggauggggcgaaccaucagcgaaaaaucaagauugggauaugagacauuuaaggugauugaggguuggaguaacccaaaauccaagcugcagauaaauaggcaggucaucguggaucggggcaaccguagcggguacucuggaauuuucucaguagaaggcaagaguuguaucaaucgcugcuuuuauguugagcuaaucagagguaggaaagaagagacugaagugcucuggaccagcaacuccauugucguguucugugggacaucuggcacuuacggaaccggcucguggcccgacggggccgauauaaaucugaugccuaucuga

SEQ ID NO: 144519 - RNA, 1410 nt, Artificial Sequence; identical to SEQ ID NO: 142332
  derived and/or modified CDS sequence (opt3) from neuraminidase__InfluenzaA__ACF54557

SEQ ID NO: 144520 - RNA, 1410 nt, Artificial Sequence; identical to SEQ ID NO: 143977
  derived and/or modified CDS sequence (opt3) from neuraminidase__InfluenzaA__ACF54568

SEQ ID NO: 144521 - RNA, 1410 nt, Artificial Sequence
  derived and/or modified CDS sequence (opt3) from neuraminidase__InfluenzaA__ACF54579
augaaccccaaucagaagaucauuaccauaggcagcgugucccugacaaucucuacuauuugcuucuuuaugcaaaucgccauucucaucacgaccgucacacuucacuucaaacaguacgaguuuaacucaccuccaaauaaccagguuaugcugugugaaccgacuauaaucgagagaaauauuaccgaaaucguguauuugacaaacaccacuauugagaaggaaaucugccccaaauuagcugaguacaggaauuggaguaagccucaguguaacauaacaggguucgcaccauuuagcaaagacaauuccauucggcugucugccggaggugauaucuggguaacccgcgagcccuaugugucgugcgacccugauaaguguuaccaauucgcgcuaggccaggggacgacucucaacaauguccauucaaacgacaccgugcacgaucgaacaccauaucguacucugcuuaugaaugaacugggaguucccuuucauuugggcaccaaacaggugugcauugcuuggagcaguuccucuugucacgacgguaaggccuggcuccaugucugcgugacaggggaugacaagaacgcaaccgccagcuucaucuacaauggaagacugguagauuccaucguuucauggaguaaagagauucugaggacgcaggaaagcgagugugugugcauaaacggcacuuguacagucgugaucaccgacggcucugcuuccgggaaggcagauacuaaaauucucuuuaucgaggaaggaaagauagugcacacaucaaccuuaagcgguagugcccaacacgucgaggaaugcucuugcuauccucgguacccaggcguucgcugugugugcagagacaacuggaagggguccaauaggccgauuguagauaucaacaucaaagacuacagcauugugucgucuuaugucuguuccggacuggugggcgacacgccccggaagaaugauucaaguagcuccucucauugccuugacccuaacaaugaggaaggugggcacggaguuaaaggcugggcuuucgaugacggcaacgauguguggauggggcgcaccaucagcgagaaguugcgaucaggauacgagacauuuaaagucauugaagguuggaguaauccaaacuccaagcugcagauaaauagacaggugaucguagacaggggcaaccggagcggguauucuggaauuuucucaguugagggcaaaaguuguaucaaucguugcuuuuacguggaacuaauccgcgguagaaaggaggaaacugagguccucuggaccagcaacuccauuguggucuucugugggacaucuggcacuuauggaaccggcucguggcccgauggggccgacauaaaucugaugccuaucuga

SEQ ID NO: 144522 - RNA, 1362 nt, Artificial Sequence
  derived and/or modified CDS sequence (opt3) from neuraminidase__InfluenzaA__ACF54601
augaaccccaaucagaagaucauuaccauaggcagcaucugcaugguggucgggauuaucucccugauucuccaaaucggaaacauaaucucuauuuggaucucacacaguauucagacagguaaucagaaccauacuggcaucuguaaucaggggagcauaacguacaaaguuguggccggacaagacuccaccucuguaauucuuacaggcaacucgucacugugcccuaucagagguugggcuauucacagcaaggauaaugggaucaggaucggaaguaaaggcgacguguucgucauucgggagccauuuauauccuguucucauuuggaaugccgcacuuucuuuuuaacccagggcgcacugcuaaacgauaagcacagccgagggacauucaaagaccguuccccguauagagcccucaugucaugucccgugggagaggcgccuaguccauacaauagcagguuugaaucuguugcuugguccgccucagcaugccaugaugguaugggcuggcugaccaucgggauuagcggacccgacgauggcgccguggcuguccuuaaguauaacgguaucauaacugagacaauuaagaguuggcggaaaaauauccugcgcacccaggaaucugaguguacgugcgugaacggguccuguuucacuaucaugaccgacggaccuagcgauggcuuggcaucguacaagauuuuuaaaaucgagaagggcaaaguaacaaagucuauugaacucaaugccccaaacucccacuaugaggaaugcucauguuaccccgacacugggaagguuaugugcgugugcagagauaauuggcacggaaguaacaggccuugggucagcuucgaccagaaccuggauuauaaaauagguuacaucuguuccggcguguuuggggacaauccacggccgaaggacggaaccggcucuugcggucccgugagcgcugauggggccaacggcgucaaaggauucucauacaaguauggcaaugggguuuggauuggacgcacaaaaagugacuccagccgacaugguuuugagaugaucugggauccuaacggcuggaccgagacggacucuagauucucaaugaggcaagaugugguagcgaugacugaccggaguggguacagcggauccuuugugcagcacccagaacugacaggccucgauuguaugcgucccugcuucugggucgaguuaauccgcggucugccugaagagaaugcaauuuggaccucugggucgauaaucagcuucuguggcgugaacuccgacacuguugauuggucauggccagacggagccgaacuucccuuuacaauugauaaguga

SEQ ID NO: 144523 - RNA, 1350 nt, Artificial Sequence
  derived and/or modified CDS sequence (opt3) from neuraminidase__InfluenzaA__ACG50700
augaaccccaaucagaagaucauuaccauaggcagcaucugcauggugauugggaucgucucccugaugcuccaaauuggaaacaugaucucuauauggguuucacacaguauccagacagguaaucagcaucaggccgagccuauuagcaacacuaauuuccuuacggaaaaagcuguggcauccguaacccuggccggcaacucuccauuguguccgaucucggggugggcggugcacucaaaggacaauagcauuagaaucggaaguaaaggcgaugucuuugugauaagggagcccuucauuuccugcucucauuuagaaugucggacauuuuuccugacucaaggugcucuacucaacgacaagcacagcaaugggaccguuaaagaucgcuccccucaucgaacacugaugucaugcccagugggagaggcccccaguccuuacaacagccguuuugaaucugucgcaugguccgccucagcuugucacgacggcaccagcuggcuuacuaucggcauuagugggccagauaauggagcaguggccguacugaaguauaacgguaucaucacagacaccauuaagucuuggagaaauaacauauugaggacgcaggaguccgagugcgcuuguguuaauggcagcugcuucacugugaugaccgaugggcccucgaacggacaggccucuuacaaaaucuuuaagauggaaaaaggcaaggucgugaaauccguggagcucgacgcgccuaacuaucacuacgaagaguguucaugcuauccagaugcaagugaggucacauguguuugccgggacaauuggcaugguagcaaccgcccguggguguccuucaaucagaaccuggaauaccaaauuggguauaucugcucuggaguauuuggcgauaaucccagaccuaacgacggcacugggagcuguggaccagugucaaccaauggugccuacggcgucaagggguucaguuuuaaguacggaaacggcguguggauagguaggacaaaauccaccaauagccggucuggguucgagaugauuugggauucaaacggcuggacgggaacugacaguagcuuuuccguuaagcaggacaucguggcuaucacagauuggucuggcuauucggggagcuucguccagcaccccgaacugaccggacucgacugcauucgcccuuguuucuggguggaguuaauccgagguagaccaaaagaauccacuauuuggacaucaggcaguucuaucagcuuuugcgggguaaauuccgauaccguuggauggucauggcccgacggcgccgagcugccguucacgauagauaaguga

SEQ ID NO: 144524 - RNA, 1410 nt, Artificial Sequence; identical to SEQ ID NO: 144105
  derived and/or modified CDS sequence (opt3) from neuraminidase__InfluenzaA__ACG70145

SEQ ID NO: 144525 - RNA, 1410 nt, Artificial Sequence; identical to SEQ ID NO: 143932
  derived and/or modified CDS sequence (opt3) from neuraminidase__InfluenzaA__ACG70156

SEQ ID NO: 144526 - RNA, 1410 nt, Artificial Sequence
  derived and/or modified CDS sequence (opt3) from neuraminidase__InfluenzaA__ACG80407
augaaccccaaucagaagaucauuaccauaggcagcgugucccugacaaucucuacuauuugcuucuuuaugcagaucgccauucucaucacgaccgucacacuucacuucaaacaguacgaguuuaacucaccuccaaauaaccagaugaugcugugugaaccgacuauaaucgagagaaauauuaccgaaaucguuuauuugacaaacaccacuauugagaaggaaaucugccccaaauuagcuaaguacaggaauuggaguaaaccucagugugacauaacaggguucgcaccauuuagcaaggauaacuccauucggcugucugccggaggugacaucugggugacccgcgagcccuauguaucgugcgauccugacaaguguuaccaauucgcgcuaggccaggggacgacucucaauaacgugcauucaaaugauaccgcucgaggacguacaccauauagaacucugcuuaugaacgagcugggcguccccuuucacuuggguaccaaacaggugugcauugccuggagcaguuccucuugucaugacgggaaggcauggcuccacguuugcaucacaggagaugacaaaaaugccaccgcuagcuucaucuacaacggcaggcugguggauuccgucgugucauggaguaaggaaauucugcggacgcaggagagcgaauguguaugcauaaauggcacuuguacaguugugaugaccgacgggucugcauccggagaggccgauacuaaaauccucuuuauugaggaagguaagaucguccauacaucaaccuuaagcggcagugcucaacacguggaggaaugcucuugcuauccucgcuacccaggggugagaugugucugcagggacaacuggaagggauccaaccggccgauaguugauauuaauaucaaagaccacagcaucgugucgucuuacguauguuccggccuggugggugacacgccccgcaagaacgauucaaguagcuccucucauugccuugacccuaauaacgaggaagggggacacggcgucaaaggcugggccuucgaugacgggaaugauguguggaugggacgaaccauuagcgagaagucaagauuggguuaugagacauuuaaaguuaucgaaggcuggaguaacccaaaguccaaacugcagauuaauaggcaagugauagucgaccgggggaaccguagcggauacucuggcaucuucucaguggaggguaagaguuguauuaaucgcugcuuuuauguagaacuaaucagagggaggaaggaggaaacugagguucucuggaccagcaacuccaucguggucuucuguggcacaucuggaacuuacggcaccgggucguggcccgauggagcggacauuaaucugaugccuauauga

SEQ ID NO: 144527 - RNA, 1410 nt, Artificial Sequence
  derived and/or modified CDS sequence (opt3) from neuraminidase__InfluenzaA__ACG80411
auggacagcaacuccaagaucauuaccauaggcucugugucacugacaaucaguacuauuugcuucuuuaugcagaucgccauucucaucacgaccgucacacuucacuucaaacaauacgaguuuaauagcccucccaacaaucagaugaugcugugugaaccaacuauaaucgagagaaacauuaccgaaaucguuuauuugacaaauaccacuauugagaaggaaaucugcccgaaauuagcugaguacaggaacugguccaagccccagugugauauaacaggguucgcaccuuuuucuaaagacaauucgauucggcugucagccggaggugauaucugggugacccgcgagccauauguaagcugcgaccccgauaaguguuaccaguucgcgcuaggccaagggacgacucucaacaaugugcauaguaacgacaccgcuggaggccgaacaccuuaucguacucugcuuaugaaugaacugggugucccauuucacuuggggaccaaacaggugugcauugccugguccucuagcuccugucaugauggaaaggcauggcuccacguuugcaucacaggcgacgauaagaacgccaccgcuucauucaucuacgacggcagacugguggauggggucgugaguuggagcaaagagauucugaggacgcaggaaucugaguguguaugcauaaauggaacuuguacaguugugaugaccgacgguuccgcaucaggcgaggccgauacuaagauccucuuuauugaagaggggaaaaucguccauacaagcaccuuaaguggaucugcucagcacguggaagagugcuccugcuauccccgguacccuggcgugcgcugugucugcagagacaacuggaaggguagcaauaggccaauaguugacauuaacaucaaggaucacucgaucgugucuuccuacguauguucagggcuggugggagacacgccgcggaaaaacgauaguagcuccucuagccauugccuugaccccaauaacgaagagggcggccacggggucaagggaugggccuucgaugacgguaaugauguguggaugggccgcaccauuucagagaaaagucgauugggguaugaaacauuuaagguuaucgagggaugguccaacccuaaaagcaagcugcaaauuaauagacaggugauagucgacaggggcaaccggucugguuacucagggaucuucaguguggaaggcaaaagcuguauuaaucguugcuuuuauguagagcuaauccgcggaagaaaggaagagacugagguucucuggaccuccaacucuaucguggucuucuguggcacaucggggacuuacggaaccgguagcuggccagauggcgcggacauuaaucugaugcccauauga

SEQ ID NO: 144528 - RNA, 1407 nt, Artificial Sequence
  derived and/or modified CDS sequence (opt3) from neuraminidase__InfluenzaA__ACG80421
augaaccccauccagaagauuauaaccaucggcagcgugucccugacaauuucuacuaucugcuucuuuaugcagauugccauccucauaacgaccgucacacuucacuucaaacaguacgaguuuaauucaccuccaaacaaucagaugaugcugugugaaccgacuaucauugagagaaacaucaccgaaauuguuuauuugacaaauaccacuaucgagaaggaaauaugccccaaauuagcugaguacaggaacuggaguaagccucagugugacauuacaggguucgcaccauuuagcaaagauaauuccauccggcugucugccggaggugacauuugggugacccgcgagcccuauguaucgugcgauccugacaaguguuaccaauucgcgcuaggccaggggacgacucucaacaaugugcauucagauaccgcucgagaccguacaccauauagaacucugcuuaugaacgaacugggaguccccuuucacuugggcaccaaacaggugugcaucgccuggagcaguuccucuugucaugaugguaaggcauggcuccacguuugcaucacaggggacgauaagaaugccaccgcuagcuucauuuacaacggaaggcugguggacuccgucgugucauggaguaaagagauacugcggacgcaggaaagcgaguguguaugcaucaauggcacuuguacaguugugaugaccgauggcucugcauccggggaggccgacacuaagauucucuuuaucgaagagggaaaaauaguccauacaucaaccuuaagcgguagugcucaacacguggaagagugcucuugcuauccucgcuacccaggcgugagaugugucugcagggauaacuggaagggguccaaucggccgauuguugacaucaacaucaaggaccacagcauugugucgucuuacguauguuccggacuggugggcgauacgccccgcaaaaacgacucaaguagcuccucucauugccuugauccuaauaacgaagagggugggcacggagucaagggcugggccuucgacgauggcaaugacguguggauggggcgaaccaucagcgagaaaucaagauugggauaugaaacauuuaagguuauugaggguuggaguaacccaaaauccaagcugcagauaaauaggcaagugaucgucgaucggggcaaccguagcggguacucuggaauuuucucaguggaaggcaaaaguuguaucaaucgcugcuuuuauguagagcuaaucagagguaggaaggaagagacugagguucucuggaccagcaacuccauuguggucuucugugggacaucuggcacuuacggaaccggcucguggcccgacggggcggauauaaaucugaugccuaucuga

SEQ ID NO: 144529 - RNA, 1407 nt, Artificial Sequence
  derived and/or modified CDS sequence (opt3) from neuraminidase__InfluenzaA__ACG80427
auggaccccaacagcaagaucauuaccauaggcuccgugucucugacaaucucaacuauuugcuucuuuaugcagaucgccauucucaucacgaccgucacacuucacuucaaacaguacgaguuuaauaguccuccaaacaaucagaugaugcugugugaaccgacuauaaucgagagaaacauuaccgaaaucguuuauuugacaaauaccacuauugagaaggaaaucugccccaaauuagcugaguacaggaacuggagcaagccucagugugauauaacaggguucgcaccauuuuccaaagacaauucuauucggcugucggccggaggugauaucugggugacccgcgagcccuauguaucaugcgacccugauaaguguuaccaguucgcgcuaggccaagggacgacucucaacaaugugcauagcgacaccgcucgagaucguacaccauauagaacucugcuuaugaacgaacugggaguccccuuucacuugggcaccaaacaggugugcauugccuggaguuccucuagcugucaugacgguaaggcauggcuccacguuugcaucacaggggaugacaagaaugccaccgcuuccuucaucuacaacggaaggcugguggauucagucgugaguuggagcaaagagauucugcggacgcaggaaucugaguguguaugcauaaauggcacuuguacaguugugaugaccgacggcuccgcaucaggggaggccgauacuaagauccucuuuauugaagagggaaaaaucguccauacaagcaccuuaagugguucugcucagcacguggaagagugcuccugcuauccucgcuacccaggcgugagaugugucugcagggacaacuggaaggggagcaaucggccgauaguugacauuaacaucaaggaucacucgaucgugucuuccuacguauguucaggacuggugggcgacacgccccgcaaaaacgauaguagcuccucuagccauugccuugacccuaauaacgaagagggugggcacggagucaagggcugggccuucgaugacggcaaugauguguggauggggcgaaccauuucagagaaaaguagauugggauaugaaacauuuaagguuaucgaggguugguccaacccaaaaagcaagcugcaaauuaauaggcaagugauagucgaccggggcaaccguucuggguacucaggaaucuucaguguggaaggcaaaagcuguauuaaucgcugcuuuuauguagagcuaaucagagguaggaaggaagagacugagguucucuggaccuccaacucuaucguggucuucugugggacaucgggcacuuacggaaccggcagcuggcccgauggggcggacauuaaucugaugccuauauga

SEQ ID NO: 144530 - RNA, 1410 nt, Artificial Sequence
  derived and/or modified CDS sequence (opt3) from neuraminidase__InfluenzaA__ACG80437
augaaccccaaucagaagaucauuaccauaggcagcgugucccugacaaucucuacuauuugcuucuuuaugcaaaucgccauucucaucacgaccgucacacuucacuucaaacaguacgaguuuaacucaaguccuaauaaccagguuaugcugugugaaccaacuauaaucgagagaaauauuaccgaaaucguguauuugacaaacaccacuauugagaaggaaaucugcccgaaauuagcugaguacaggaauuggagcaagccccagugugacauaacaggguucgcaccuuuuuccaaagauaacucuauucggcugucggccggaggugacaucuggguaacccgcgagccauaugugucaugcgaucccgacaaguguuaccaauucgcgcuaggccaggggacgacucucaauaacguccauagcaauaacaccgugcgagaucguacaccuuauagaacucugcuuaugaaugaacugggaguuccauuucacuugggcaccaaacaggugugcauugcuuggaguuccucuagcugucaugacgguaaggccuggcuccacgucugcaucacaggggaugacaagaacgcaaccgccaauuucaucuacaacggaaggcugguggauuccauuguaucauggaguaaagagauauuucggacgcaggaaagcgaguguguuugcaucaacggcacuuguacaguggucaugaccgacggcucugcuuccgggaaggcagauacuaaaauucuguucaucgaggaaggaaagauagugcauacaucaacccucagcgguagugcccaacacguggaggaaugcucuugcuauccccgcuacccuggcgucagauguguuugcagggacaauuggaagggguccaaccggccaauuguggauaucaauaucaaagaccacagcauuguaucgucuuacguguguuccggauuagucggcgacacgccgcgcaagaacgauucaaguagcuccucucauugccuggaccccaauaacgaggaaggugggcacggagugaaaggcugggcuuuugaugacggcaaugauguuuggauggggcgaaccaucagcgagaagucaagaaguggauaugagacauucaaagugauugaagguugguccaacccuaagagcaaacuucagauaaauaggcaggucaucguggaccggggcaaccguucuggguacucaggaauuuuuaguguagagggcaagagcuguaucaaucgcugcuucuauguugaauugaucagagguaggaaggaggaaacugaggugcuguggaccuccaacucuauugucguguucugugggacaucgggcacuuacggaaccggcagcuggccagauggggccgacauaaaucuaaugcccaucuga

SEQ ID NO: 144531 - RNA, 1407 nt, Artificial Sequence
  derived and/or modified CDS sequence (opt3) from neuraminidase__InfluenzaA__ACG80446
augaaccccaaucagaagaucauuaccauaggcagcgugucccugacaaucucuacuauuugcuucuuuaugcagaucgccauucucaucacgaccgucacacuucacuucaaacaguacgaguuuaacucaccuccaaauaaccagaugaugcugugugaaccgacuauaaucgagagaaauauuaccgaaaucguuuauuugacaaacaccacuauugagaaggaaaucugccccaaauuagcugaguacaggaauuggaguaagccucagugugacauaacaggguucgcaccauuuagcaaagauaacuccauucggcugucugccggaggugacaucugggugacccgcgagcccuauguaucgugcgauccugacaaguguuaccaauucgcgcuaggccaggggacgacucucaauaacgugcauucagauaccgcucgagaccguacaccauauagaacucugcuuaugaaugaacugggaguccccuuucacuugggcaccaaacaggugugcauugccuggagcaguuccucuugucaugaugguaaggcauggcuccacguuugcaucacaggggacgauaagaacgccaccgcuagcuucaucuacaauggaaggcugguggacuccgucgugucauggaguaaagagauucugcggacgcaggaaagcgaguguguaugcauaaacggcacuuguacaguugugaugaccgauggcucugcauccggggaggccgacacuaagauccucuuuauugaagagggaaaaaucguccauacaucaaccuuaagcgguagugcucaacacguggaagagugcucuugcuauccucgcuacccaggcgugagaugugucugcagggauaauuggaagggguccaaccggccgauaguugacauuaacaucaaggaccacagcaucgugucgucuuacguauguuccggacuggugggcgauacgccccgcaaaaaugacucaaguagcuccucucauugccuugauccuaacaaugaagagggugggcacggagucaagggcugggccuucgacgauggcaacgacguguggauggggcgaaccauuagcgagaaaucaagauugggauaugaaacauuuaagguuaucgaggguuggaguaauccaaaauccaagcugcagauuaacaggcaagugauagucgaucggggcaaucguagcggguacucuggaaucuucucaguggaaggcaaaaguuguauuaaccgcugcuuuuauguagagcuaaucagagguaggaaggaagagacugagguucucuggaccagcaauuccaucguggucuucugugggacaucuggcacuuacggaaccggcucguggcccgacggggcggauauuaaccugaugccuauauga

SEQ ID NO: 144532 - RNA, 1410 nt, Artificial Sequence
  derived and/or modified CDS sequence (opt3) from neuraminidase__InfluenzaA__ACG80455
augaaccccaaucagaagaucauuaccauaggcagcguguccuucaucauuucuucaaucugcuuuuucaugcagauugccauccugauaacaacugucacgcuccacuuuaaacaguacgaguucaacaguccuccaaauaaccagaugaugcuuugugaaccgaccaucauugagagaaauaucacagaaauuguuuaucugacuaacaccacaaucgagaaggaaauaugccccaaauuggcugaguacaggaauuggagcaagccucagugugacauuaccggguuugcaccauucuccaaagauaacucuauccgguuaucggccggaggugacauuugggugacucgcgagcccuauguaucaugcgauccugacaaguguuaccaauuugcgcugggccaggggacaacccuaaauaacgugcauagcaaugauacggcucgaggacguacuccauauagaacccuccugaugaacgaacuuggcguccccuuccaccuggguacaaaacaggugugcaucgccuggaguuccucuagcugucaugacgggaaggcaugguugcacguuugcaucacuggagaugacaagaaugccaccgcuuccuuuauuuacgauggcaggcucguggacucagucgugaguuggagcaaagagauacugcggacacaggaaucugaguguguaugcaucaacggcaccuguacgguugugaugacugauggguccgcaucaggagaggccgacacaaagauucuguucaucgaagaggguaaaauaguccauaccagcacucucaguggcucugcucaacacguggaagagugcuccugcuauccucgcuacccaggggugagaugugucugcagggauaauuggaagggaagcaaccggccgauuguugacaucaacaucaaggaccacucgauugugucuuccuacguauguucaggcuuagugggugauacaccccgcaaaaaugacaguagcuccucuagccauugccuggauccuaacaaugaagaagggggacacggcgucaagggcugggccuuugacgaugggaacgacguguggaugggacgaaccaucucagagaaaaguagacuugguuaugagacguucaagguuauugagggcugguccaauccaaaaagcaaguugcagauaaacaggcaagugaucgucgaucgggggaaucguucuggauacucaggcauuuuuaguguggaagguaaaagcuguaucaaccgcugcuucuauguagagcugaucagagggaggaaggaagagaccgagguucuauggacauccaauucuauuguggucuucuguggcacuucgggaaccuacggcacagggagcuggcccgacggagcggauauaaaccucaugccuaucuga

SEQ ID NO: 144533 - RNA, 1407 nt, Artificial Sequence; identical to SEQ ID NO: 144531
  derived and/or modified CDS sequence (opt3) from neuraminidase__InfluenzaA__ACG80464

SEQ ID NO: 144534 - RNA, 1410 nt, Artificial Sequence
  derived and/or modified CDS sequence (opt3) from neuraminidase__InfluenzaA__ACG80473
auggaccccauccagaagauuauaaccaucggcagcgugucccugacaauuucuacuaucugcuucuuuaugcagauugccauccucauaacgaccgucacacuucacuucaaacaguacgaguuuaacucaccuccaaauaaccagaugaugcugugugaaccgacuaucauugagagaaauaucaccgaaauuguuuauuugacaaacaccacuaucgagaaggaaauaugccccaaauuagcugaguacaggaauuggaguaagccucagugugauauuacaggguucgcaccauuuagcaaagacaacuccauccggcugucugccggaggugauauuugggugacccgcgagcccuauguaucgugcgacccugauaaguguuaccaauucgcgcuaggccaggggacgacucucaauaacgugcauucaaaugacaccgcucgaggacguacaccauauagaacucugcuuaugaacgaacugggcguccccuuucacuuggguaccaaacaggugugcaucgccuggagcaguuccucuugucaugaugggaaggcauggcuccacguuugcaucacaggagacgauaagaaugccaccgcuagcuucauuuacgacggcaggcugguggauuccgucgugucauggaguaaagagauacugcggacgcaggaaagcgaguguguaugcaucaacggcacuuguacaguugugaugaccgacgggucugcauccggagaggccgauacuaagauucucuuuaucgaagaggguaaaauaguccauacaucaaccuuaagcggcagugcucaacacguggaagagugcucuugcuauccucgcuacccaggggugagaugugucugcagggacaauuggaagggauccaaccggccgauuguugacaucaauaucaaggaucacagcauugugucgucuuacguauguuccggccuggugggugacacgccccgcaaaaacgauucaaguagcuccucucauugccuugacccuaacaaugaagaagggggacacggcgucaagggcugggccuucgaugacgggaacgauguguggaugggacgaaccaucagcgagaaaucaagauuggguuaugagacauuuaagguuauugagggcuggaguaauccaaaauccaagcugcagauaaacaggcaagugaucgucgaccgggggaaucguagcggauacucuggcauuuucucaguggaagguaaaaguuguaucaaccgcugcuuuuauguagagcuaaucagagggaggaaggaagagacugagguucucuggaccagcaauuccauuguggucuucuguggcacaucuggaacuuacggcaccgggucguggcccgauggagcggacauaaaccugaugccuaucuga

SEQ ID NO: 144535 - RNA, 1410 nt, Artificial Sequence; identical to SEQ ID NO: 142760
  derived and/or modified CDS sequence (opt3) from neuraminidase__InfluenzaA__ACH69559

SEQ ID NO: 144536 - RNA, 1410 nt, Artificial Sequence
  derived and/or modified CDS sequence (opt3) from neuraminidase__InfluenzaA__ACH69570
augaaccccaaucagaagaucauuaccauaggcagcgugucccugacaaucucuacuauuugcuucuuuaugcaaaucgccauucucaucacgaccgucacacuucacuucaaacaguacgaguuuaacucaccuccaaauaaccagguuaugcugugugaaccgacuauaaucgagagaaauauuaccgaaaucguguauuugacaaacaccacuauugagaaggaaaucugccccaaauuagcugaguacaggaauuggaguaagccucaguguaacauaacaggguucgcaccauuuagcaaagacaauuccauucggcugucugccggaggugauaucuggguaacccgcgagcccuaugugucgugcgacccugauaaguguuaccaauucgcgcuaggccaggggacgacucucaacaauguccauucaaacgacaccgugcacgaucgaacaccauaucguacucugcuuaugaaugaacugggaguucccuuucauuugggcaccaaacaggugugcauugcuuggagcaguuccucuugucacgacgguaaggccuggcuccaugucugcgugacaggggaugacaagaacgcaaccgccagcuucaucuacaauggaagacugguagauuccaucguuucauggaguaaagagauucugaggacgcaggaaagcgagugugugugcauaaacggcacuuguacagucgugaugaccgacggcucugcuuccgggaaggcagauacuaaaauccucuuuauugaggaaggaaagaucgugcacacaucaaccuuaagcgguagugcccaacacgucgaggaaugcucuugcuauccucgguacccaggcguucgcugugugugcagagacaacuggaagggguccaauaggccgauaguagauauuaacaucaaagacuacagcaucgugucgucuuaugucuguuccggacuggugggcgacacgccccggaauaacgauucaaguagcuccucucauugccuugacccuaauaacgaggaaggugggcacggaguuaagggcugggcuuucgaugacggcaaugauguguggauggggcgcaccauuagcgagaaauugcgaucaggauacgagacauuuaaggucaucgaagguuggaguaacccaaauuccaaacugcagauuaacagacaggugauaguagacaggggcaaucggagcggguauucuggaaucuucucaguugagggcaagaguuguauuaaccguugcuuuuacguggaacuaauccgcgguagaaaagaggaaacugagguccucuggaccagcaauuccaucguggucuucugugggacaucuggcacuuauggaaccggcucguggcccgauggggccgacauuaaccugaugccuauauga

SEQ ID NO: 144537 - RNA, 1410 nt, Artificial Sequence; identical to SEQ ID NO: 142760
  derived and/or modified CDS sequence (opt3) from neuraminidase__InfluenzaA__ACH69581

SEQ ID NO: 144538 - RNA, 1410 nt, Artificial Sequence
  derived and/or modified CDS sequence (opt3) from neuraminidase__InfluenzaA__ACH69592
augaaccccaaucagaagaucauuaccauaggcagcgugucccugacaaucgccacuauuugcuuccucaugcaaaucgcuauucuugucacgaccguuacacugcacuuuaaacaguacgaguguaacucuccuccaaauaaccaggugauguugugcgaaccgacuaucauagagagaaauaucaccgaaauuguauauuuaacaaacaccacuaucgagaaggaaauuugucccaaacuggcagaguacaggaauuggucaaagccucagugcaacaucacaggguucgccccauuuaguaaagacaauagcauacggcuauccgcgggaggugauauuugggugacccgcgagcccuaugucucuugugacccugauaagugcuaccaauucgcucucggccaggggacgacucugaacaauggacauucgaacgacaccgugcacgaucgaacaccauaucguacucuucugaugaaugaauugggcguucccuuucaucucgguaccaaacagguguguaucgccuggucaagcaguuccugccacgacgggaaggcauggcugcaugucugugugacaggagaugacgagaacgccaccgcuucuuucauuuacaauggcagacugguagauagcaucggcuccuggucaaagaaaauccucaggacgcaggaaagugagugcguuuguauuaacgggacuugcacaguggucaugaccgacggaagcgcaucugguaaggccgauacuaaaauauuauuuaucgaggaaggcaagauugugcacacauccccucugucagggagcgcucaacacguggaggaaugcaguuguuauccacgguacccgggaguccgcugcguuuguagagacaacuggaagggcucuaauaggcccaucguggauauaaacguaaaagacuacuccauugugagcucguaugucugcucuggucuugugggggacaccccucggaagaaugauuccucaaguagcucccauuguuuggacccaaacaaugaggaaggaggccacggcguuaaagggugggccuucgaugacggaaacgauguguggaugggucgcacgaucucugaaaagagccgaucaggcuacgagaccuuuaaagucaucgagggguggaguaagcccaauuccaaacugcagauuaacagacaggugaucguagacaggggaaaucggagcggcuauucugguauuuucucaguugaggggaagaguugcauaaaccaguguuuuuacguggaacuaauccguggccgcaagcaagagacagaaguccucuggacuagcaauuccauuguggucuucugcggaaccucuggcacauaugggacuggaucguggccugauggugcggaccugaaccuuaugccaaucuga

SEQ ID NO: 144539 - RNA, 1410 nt, Artificial Sequence
  derived and/or modified CDS sequence (opt3) from neuraminidase__InfluenzaA__ACH69603
augaaccccaaucagaagaucauuaccauaggcagcgugucccugacaaucgccacuauuugcuuccucaugcaaaucgucauucuuguuacgaccgugacacugcacuuuaaacaguacgaguguaacucuccuccaaauaaccagguaauguugugcgaaccgacuaucauagagagaaauaucaccgaaauuguguauuuaacaaacaccacuaucgagaaggaaauuugucccaaacuggcugaguacaggaauuggucaaagccucagugcaacaucacaggguucgcaccauuuaguaaagacaauagcauacggcuauccgccggaggugauauuugggucacccgcgagcccuaugugucuugugacccugauaagugcuaccaauucgcgcucggccaggggacgacucugaacaauggacauucgaacgacaccguucacgaucgaacaccauaucguacucuucugaugaaugaauugggcgugcccuuucaucucgguaccaagcaggucuguaucgcuuggucaagcaguuccugccacgacgggaaagccuggcugcauguguguguaacaggagaugacgagaacgcaaccgccucuuucauuuacaauggcagacugguugauagcaucggcuccuggucaaagaaaauccucaggacgcaggaaagugagugcguguguauuaacgggacuugcacagucgugaugaccgacggaagcgcuucugguaaggcagauacuaaaauauuauuuaucgaggaaggcaagauugugcacacauccccucugucagggagcgcccaacacgucgaggaaugcaguuguuauccacgguacccgggaguucgcugcguguguagagacaacuggaagggcucuaauaggcccaucguagauauaaacgugaaagacuacuccauugucagcucguaugugugcucuggucuuguuggggacaccccucggaagaaugauuccucaaguagcucccauuguuuggacccaaacaaugaggaaggaggccacggcgugaaagggugggcuuucgaugacggaaacgaugucuggaugggucgcacgaucucugaaaagagccgaucaggcuacgagaccuuuaaagugaucgagggguggaguaagcccaauuccaaacugcagauuaacagacagguaaucguugacaggggaaaucggagcggcuauucugguauuuucucaguggaggggaagaguugcauaaaccguuguuuuuacgucgaacuaauccgcggcagaaagcaggagacagaagugcucuggacuagcaauuccauugucguguucugcggaaccucuggcacauaugggacuggaucguggccugauggugccgaccugaaccuuaugccaaucuga

SEQ ID NO: 144540 - RNA, 1410 nt, Artificial Sequence
  derived and/or modified CDS sequence (opt3) from neuraminidase__InfluenzaA__ACH69614
augaaccccaaucagaagaucauuaccauaggcagcgugucccugacaaucgccacuauuugcuuccucaugcaaaucgcuauucuugucacgaccguuacacugcacuuuaaacaguacgaguguaacucuccuccaaauaaccaggugauguugugcgaaccgacuaucauagagagaaauaucaccgaaauuguauauuuaacaaacaccacuaucgagaaggaaauuugucccaaacuggcagaguacaggaauuggucaaagccucagugcaacaucacaggguucgccccauuuaguaaagacaauagcauacggcuauccgcgggaggugauauuugggugacccgcgagcccuaugucucuugugacccugauaagugcuaccaauucgcucucggccaggggacgacucugaacaauggacauucgaacgacaccgugcacgaucgaacaccauaucguacucuucugaugaaugaauugggcguucccuuucaucucgguaccaaacagguguguaucgccuggucaagcaguuccugccacgacgggaaggcauggcugcaugucugugugacaggagaugacgagaacgccaccgcuucuuucauuuacaauggcagacugguagauagcaucggcuccuggucaaagaaaauccucaggacgcaggaaagugagugcguuuguauuaacgggacuugcacaguggucaugaccgacggaagcgcaucugguaaggccgauacuaaaauauuauuuaucgaggaaggcaagauugugcacacauccccucugucagggagcgcucaacacguggaggaaugcaguuguuauccacgguacccgggaguccgcugcguuuguagagacaacuggaagggcucuaauaggcccaucguggauauaaacguaaaagacuacuccauugugagcucguaugucugcucuggucuugugggggacaccccucggaagaaugauuccucaaguagcucccauuguuuggacccaaacaaugaggaaggaggccacggcguuaaagggugggccuucgaugacggaaacgauguguggaugggucgcacgaucucugaaaagagccgaucaggcuacgagaccuuuaaagucaucgagggguggaguaagcccaauuccaaacugcagauuaacagacaggugaucguagacaggggaaaucggagcggcuauucugguauuuucucaguugaggggaagaguugcauaaaccguuguuuuuacguggaacuaauccgcggcagaaagcaggagacagaaguccucuggacuagcaauuccauuguggucuucugcggaaccucuggcacauaugggacuggaucguggccugauggugcggaccugaaccuuaugccaaucuga

SEQ ID NO: 144541 - RNA, 1413 nt, Artificial Sequence
  derived and/or modified CDS sequence (opt3) from neuraminidase__InfluenzaA__ACI22525
augaaccccaaucagaagaucauuaccauaggcagcaucuccauugccaucgggauuaucucucugaugcuccaaauaggaaacaucauuucaaucugggcuagucacagcauucagacagguucccagaaucauacuggcaucugcaaccagagaauaauuacguacgagaauagcaccugggugaacaauacauaugucaacaucaauaacacuaauguuguggcagaaaaagacaagaccucgguaacacuugccgggaacucaagccuguguaguauuuccggaugggcgaucuacaccaaagauaauucuaucaggauuggcagcaagggugacguguucgucauacgggagccuuuuaucuccugcucacacuuggaaugucgcacuuucuuuuuaacacaaggggcucugcuaaacgauaaacauaguaauggaaccgugaaggaccgaagcccauaucgugcccucaugucuugcccgcugggcgaggcacccuccccuuacaacucaaaguucgaaagcguugccuggagugcuucugcaugucacgauggcaugggguggcuuacgauuggaaucuccgguccagacaacggcgccguggcuguccugaaauauaaugggauaauuacugagaccaucaagagcuggaaaaagagaaucuugaggacacaggagucggaaugcguguguaugaacggaucuugcuuuacuauuaugaccgauggccccuccaauggugccgcgucauacaaaaucuucaagauugagaaggggaaaguaacaaagaguauagaacucaacgcaccuaauuuucauuaugaggaguguagcugcuacccagacaccggaacgguuaugugugugugccgggauaacuggcacggcuccaaucgccccugggucucuuucaaccagaaucuggacuaccagaucggcuauauuugcagcgggguguuuggagauaacccuagaccaaaagacggugaaggcucauguaauccggugacugucgauggggccgacggaguuaagggcuucaguuacaaauaugguaacgggguguggaucggcaggacaaaguccaaucggcugcgcaaaggauuugagaugaucugggaccccaacggcuggaccaauacugauagcgacuucucuguaaagcaagauguggucgcuauuacagacuggucaggguacaguggaucuuuugugcagcacccugaacucaccgguuuagauugcauacgaccauguuucuggguugagcuggugagaggccuucccagggaaaacacgaccaucuggacauccgggucuucgauuagcuucugcggagucaacuccgacacugccaauuggucauggccugauggcgcagaguugccauuuaccaucgacaaguga

SEQ ID NO: 144542 - RNA, 1413 nt, Artificial Sequence; identical to SEQ ID NO: 144541
  derived and/or modified CDS sequence (opt3) from neuraminidase__InfluenzaA__ACI22526

SEQ ID NO: 144543 - RNA, 1413 nt, Artificial Sequence; identical to SEQ ID NO: 144541
  derived and/or modified CDS sequence (opt3) from neuraminidase__InfluenzaA__ACI22527

SEQ ID NO: 144544 - RNA, 1413 nt, Artificial Sequence; identical to SEQ ID NO: 144541
  derived and/or modified CDS sequence (opt3) from neuraminidase__InfluenzaA__ACI22528

SEQ ID NO: 144545 - RNA, 1413 nt, Artificial Sequence; identical to SEQ ID NO: 144541
  derived and/or modified CDS sequence (opt3) from neuraminidase__InfluenzaA__ACI22529

SEQ ID NO: 144546 - RNA, 1413 nt, Artificial Sequence; identical to SEQ ID NO: 144541
  derived and/or modified CDS sequence (opt3) from neuraminidase__InfluenzaA__ACI22530

SEQ ID NO: 144547 - RNA, 1413 nt, Artificial Sequence
  derived and/or modified CDS sequence (opt3) from neuraminidase__InfluenzaA__ACI22532
augaaccccaaucagaagaucauuaccauaggcagcaucuccauugccaucgggauuaucucucugaugcuccaaauaggaaacaucauuucaaucugggcuagucacagcauucagacagguucccagaaucauacuggcaucugcaaccagagaauaauuacguacgaaaauucuaccugggugaacaauacauaugucaacaucaauaacacuaauguuguggcagggaaagacaagaccucgguaacacuugccggaaacucaagccuguguaguauuuccggcugggcgaucuacaccaaagauaauucuaucaggauugguagcaagggggacguguucgucauacgggagccuuuuaucuccugcucacacuuggagugucgcacuuucuuuuuaacacaaggagcucugcuaaacgauaaacauaguaauggcaccgugaaggaccgaagcccauaucgugcccucaugucuugcccgcugggcgaagcacccuccccuuacaacucaaaguucgagagcguugccuggagugcuucugcaugucacgaugggaugggauggcuuacgauugguaucuccggcccagacaacggggccguggcuguccugaaauauaauggaauaauuacugaaaccaucaagagcuggaaaaagagaaucuugaggacacaggagucggagugcguguguaugaacggcucuugcuuuacuauuaugaccgauggucccuccaauggggccgcgucauacaaaaucuucaagauugaaaagggaaaaguaacaaagaguauagagcucaacgcaccuaauuuucauuaugaagaguguagcugcuacccagacaccggcacgguuaugugugugugccgggauaacuggcacggcuccaaucgccccugggucucuuucaaccagaaucuggacuaccagaucggguauauuugcagcggaguguuuggugauaacccuagaccaaaagacggcgaggggucauguaauccggugacugucgauggagccgacggcguuaaggguuucaguuacaaauaugggaacggcguguggaucggaaggacaaaguccaaucggcugcgcaaaggcuuugaaaugaucugggaccccaacggguggaccaauacugauagcgacuucucuguaaagcaagauguggucgcuauuacagacuggucaggauacagugguagcuuugugcagcacccugagcucaccggcuuagauugcauacgaccauguuucuggguugaacuggugagagggcuucccagggagaacacgaccaucuggacauccggaucuucgauuagcuucugcggcgucaacuccgacacugccaauuggucauggccugauggugcagaauugccauuuaccaucgacaaguga

SEQ ID NO: 144548 - RNA, 1413 nt, Artificial Sequence; identical to SEQ ID NO: 144547
  derived and/or modified CDS sequence (opt3) from neuraminidase__InfluenzaA__ACI22533

SEQ ID NO: 144549 - RNA, 1413 nt, Artificial Sequence; identical to SEQ ID NO: 144541
  derived and/or modified CDS sequence (opt3) from neuraminidase__InfluenzaA__ACI22534

SEQ ID NO: 144550 - RNA, 1410 nt, Artificial Sequence
  derived and/or modified CDS sequence (opt3) from neuraminidase__InfluenzaA__ACI25727
augaaccccaaucagaagaucauuaccauaggcagcgugucccugacaaucgccacugucugcuuccucaugcaaauugcuauccuuguuacgaccgugacacugcacuuuaaacagcaugaguguaacucuccugcaucaaaucagguaaugccaugcgaaccgauuaucauagagagaaacaucacugaaauuguguacuugaauaacaccacaaucgagaaggaaauuugucccaaagucguggaguauaggaauuggaguaagccucagugccaaaucaccggguucgccccauuuagcaaagacaacuccauacgguuaucugcgggaggugauauuuggguuacucgcgagcccuacgugucgugugacccuggcaagugcuaucaguucgcucuggggcagggaacaacccuagauaauaagcacucaaacgacacgauccaugaucguauuccacaccgaacucuccugaugaaugaacuuggcguccccuuucaucuggguaccagacagguguguaucgccuggagcaguuccucuugccacgacgggaaagcaugguugcacguauguaucacaggagaugacaagaacgccacugcuagcuucauuuacgauggcaggcucguugacuccauaggcucauggagucaaaauauccugcggacccaggagagcgaaugcguguguauuaacgggacaugcaccgucgugaugacggauggaucugcauccggucgcgccgacacuagaauccuguuuauaaaagagggcaagauugugcauaucucaccucucagcgggagugcucagcacgucgaggaaugcucuuguuauccaagguacccgggaguucggugcaucugucgcgauaauuggaaaggcuccaaccgacccgugguagacauuaacauggaggacuauagcaucgauucgucuuacgugugcuccgguuuagucggggacacaccuagaaaugaugacaggucaaguaacagcaauugucggaacccaaauaacgaacguggaaaucagggcgugaagggcugggccuucgauaacggggacgauguuuggaugggacgcaccauuuccaaggaccugagaucugguuacgagacuuuuaaagugauaggcggguggagcacacccaauucaaagagucaaaucaacaggcaggucauuguggauuccgacaaucggagcggauauucuggcaucuucucaguagaagguaaaaguugcaucaaccgauguuuuuacguugagcuuauucgcgggagaaagcaggagaccagggugugguggacgagcaauuccauagucguguucugcggcaccucuggaacauauggcacugggucguggccugauggagcgaacaucaauuuuaugccaauuuga

SEQ ID NO: 144551 - RNA, 1410 nt, Artificial Sequence
  derived and/or modified CDS sequence (opt3) from neuraminidase__InfluenzaA__ACI25749
augaaccccaaucagaagaucauuaccauaggcagcgugucccugacaaucgccacugucugcuuccucaugcaaauugcuauccuuguuacgaccgugacacugcacuuuaaacaguacgagugugacucuccugcaucaaaccagguaaugccaugcgaaccgauuaucauagagagaaauaucacugaaauuguguauuugaacaauaccacaaucgagaaggaaauuugucccaaagucguggaguacaggaacuggaguaagccucagugccaaaucaccggguucgccccauuuagcaaagauaauuccauacgguuaucugcgggaggugacauuuggguuacucgcgagcccuaugugucgugugaucauggcaagugcuaccaguucgcucuggggcagggaacaacccuagacaacaagcacucaaaugauacgauccaugaccguauuccucaccgaacucuccugaugaacgaacuuggcgucccauuucaucuggguaccagacagguguguaucgccuggagcaguuccucuugccacgaugggaaagcaugguugcacguauguaucacaggagacgauaagaaugccacugcuagcuucauuuaugacggcaggcucguugauuccauaggcucauggagucaaaacauccugcggacccaggagagcgaaugcguguguauuaaugggacaugcaccgucgugaugacggacggaucugcauccggucgcgccgauacuagaauccuguuuauagaggagggcaaaauugugcauaucucaccccucagcgggagugcucagcacgucgaagagugcucuuguuacccuagguauccaggaguucggugcaucugucgcgacaacuggaagggcuccaaucgaccggugguagacauuaacauggaagauuacagcaucgacucgucuuacgugugcuccgguuuagucggggauacacccagaaacgacgauaggucaaguaauagcaacugucggaauccuaacaaugagcguggaaaccagggcgugaaaggcugggccuucgacaauggggaugacguuuggaugggacgcaccauuuccaaggaucugagaucugguuaugaaacuuuuaaggugauaggcggguggagcacaccaaacucaaaaagucaaaucaauaggcaggucauuguggacuccgauaaccggagcggauacucuggcaucuucucaguagaggguaagaguugcaucaaucgauguuuuuauguugagcuuauucgcgggagaaaacaggaaaccagggugugguggacgagcaacuccauagucguguucugcggcaccucuggaacauacggcacugggucguggcccgacggagcgaauaucaacuuuaugcauauuuga

SEQ ID NO: 144552 - RNA, 1410 nt, Artificial Sequence; identical to SEQ ID NO: 144551
  derived and/or modified CDS sequence (opt3) from neuraminidase__InfluenzaA__ACI25760

SEQ ID NO: 144553 - RNA, 1410 nt, Artificial Sequence; identical to SEQ ID NO: 144551
  derived and/or modified CDS sequence (opt3) from neuraminidase__InfluenzaA__ACI25771

SEQ ID NO: 144554 - RNA, 1410 nt, Artificial Sequence; identical to SEQ ID NO: 142143
  derived and/or modified CDS sequence (opt3) from neuraminidase__InfluenzaA__ACI25782

SEQ ID NO: 144555 - RNA, 1410 nt, Artificial Sequence
  derived and/or modified CDS sequence (opt3) from neuraminidase__InfluenzaA__ACI25793
augaaccccaaucagaagaucauuaccauaggcagcgugucccugacaaucgccacugucugcuuccucaugcaaauugcuauccuuguuacgaccgugacacugcacuuuaaacaguacgagugugacucuccugcaucaaaccagguaaugccaugcgaaccgauuaucauagagagaaauaucacugaaauuguguauuugaacaauaccacaaucgagaaggaaauuugucccaaagucguggaguacaggaacuggaguaagccucagugccaaaucaccggguucgccccauuuagcaaagauaauuccauacgguuaucuguuggaggugacauuugggugacucgcgagcccuaugucucgugugaucauggcaagugcuaccaguucgcgcuggggcagggaacaacccuagacaacaagcacucaaaugauacgauccaugacaggauuccucaccguacucuccugaugaacgaacuuggcgugccauuucaucuggguaccagacagguauguaucgcuuggagcaguuccucuugccacgaugggaaagccugguugcacguuuguaucacaggagacgauaagaaugcaacugccagcuucauuuaugacggcaggcucguggauuccauaggcucauggagucaaaacauccugcggacccaggagagcgaaugcgucuguauuaaugggacaugcaccguggugaugacggacggaucugcuuccggucgcgcagauacuagaauccuguuuauagaggagggcaaaauuguccauaucucaccccucagcgggagugcccagcacguugaagagugcucuuguuacccuagguauccaggagugcggugcaucugucgcgacaacuggaagggcuccaaucgaccgguaguggacauuaacauggaagauuacagcaucgacucgucuuacgucugcuccgguuuagugggggauacacccagaaacgacgauaggucaaguaauagcaacugucggaauccuaacaaugagcguggaaaccagggcguuaaaggcugggcuuucgacaauggggaugacguguggaugggacgcaccauuuccaaggaucugagaucugguuaugaaacuuuuaaggucauaggcggguggagcacaccaaacucaaaaagucaaaucaaucgacaggugauuguagacuccgauaaccggagcggauacucuggcaucuucucaguugaggguaagaguugcaucaaucgauguuuuuauguggagcuuauucgcgggagaaaacaggaaaccagggucugguggacgagcaacuccauaguggucuucugcggcaccucuggaacauacggcacugggucguggcccgacggagccaauaucaacuuuaugccuauuuga

SEQ ID NO: 144556 - RNA, 1410 nt, Artificial Sequence
  derived and/or modified CDS sequence (opt3) from neuraminidase__InfluenzaA__ACI25804
augaaccccaaucagaagaucauuaccauaggcagcgugucccugacaaucgccacugucugcuuccucaugcaaauugcuauccuuguuacgaccgugacacugcacuuuaaacaguacgagugugacucuccugcaucaaaccagguaaugccaugcgaaccgauuaucauagagagaaauaucacugaaauuguguauuugaacaauaccacaaucgagaaggaaauuugucccaaagucguggaguacaggaacuggaguaagccucagugccaaaucaccggguucgccccauuuagcaaagauaauuccauacgguuaucugcgggaggugacauuuggguuacucgcgagcccuaugugucgugugaucauggcaagugcuaccaguucgcucuggggcagggaacaacccuagacaacaagcacucaaaugauacgauccaugaccguauuccucaccgaacucuccugaugaacgaacuuggcgucccauuucaucuggguaccagacagguguguaucgccuggagcaguuccucuugccacgaugggaaagcaugguugcacguauguaucacaggagacgauaagaaugccacugcuagcuucauuuaugacggcaggcucguugauuccauaggcucauggagucaaaacauccugcggacccaggagagcgaaugcguguguauuaaugggacaugcaccgucgugaugacggacggaucugcauccggucgcgccgauacuagaauccuguuuauagaggagggcaaaauugugcauaucucaccccucagcgggagugcucagcacgucgaagagugcucuuguuacccuagguauccaggaguucggugcaucugucgcgacaacuggaagggcuccaaucgaccggugguagacauuaacauggaagauuacagcaucgacucgucuuacgugugcuccgguuuagucggggauacacccagaaacgacgauaggucaaguaauagcaacugucggaauccuaacaaugagcguggaaaccagggcgugaaaggcugggccuucgacaauggggaugacguuuggaugggacgcaccauuuccaaggaucugagaucugguuaugaaacuuuuaaggugauaggcggguggagcacaccaaacucaaaaagucaaaucaauaggcaggucauuguggacuccgaucaucggagcggauacucuggcaucuucucaguagaggguaagaguugcaucaaccgauguuuuuauguugagcuuauucgcgggagaaaacaggaaaccagggugugguggacgagcaauuccauagucguguucugcggcaccucuggaacauacggcacugggucguggcccgacggagcgaacaucaauuuuaugccuauuuga

SEQ ID NO: 144557 - RNA, 1410 nt, Artificial Sequence; identical to SEQ ID NO: 144515
  derived and/or modified CDS sequence (opt3) from neuraminidase__InfluenzaA__ACI26277

SEQ ID NO: 144558 - RNA, 1410 nt, Artificial Sequence; identical to SEQ ID NO: 142375
  derived and/or modified CDS sequence (opt3) from neuraminidase__InfluenzaA__ACI26299

SEQ ID NO: 144559 - RNA, 1410 nt, Artificial Sequence
  derived and/or modified CDS sequence (opt3) from neuraminidase__InfluenzaA__ACI26321
augaaccccaaucagaagaucauuaccauaggcagcgugucccugacaaucucuacuauuugcuucuuuaugcaaaucgccauucucaucacgaccgucacacuucacuucaaacaguacgaguuuaacucaccuccaaauaaccagguuaugcugugugaaccgacuauaaucgagagaaauauuaccgaaaucguguauuugacaaacaccacuauugagaaggaaaucugccccaaauuagcugaguacaggaauuggaguaagccucagugugacauaacaggguucgcaccauuuagcaaagauaacuccauucggcugucugccggaggugacaucuggguaacccgcgagcccuaugugucgugcgauccugacaaguguuaccaauucgcgcuaggccaggggacgacucucaauaacguccauucaaaugauaccgugcgagaccguacaccauauagaacucugcuuaugaacgaacugggaguucccuuucacuugggcaccaaacaggugugcauugcuuggagcaguuccucuugucaugaugguaaggccuggcuccacgucugcaucacaggggacgauaagaaugcaaccgccagcuucaucuacaacggaaggcugguggacuccauuguaucauggaguaaagagauacugcggacgcaggaaagcgaguguguuugcaucaauggcacuuguacaguggucaugaccgauggcucugcuuccgggaaggcagacacuaaaauucucuuuaucgaggaaggaaagauagugcauacaucaaccuuaagcgguagugcccaacacguggaggaaugcucuugcuauccucgcuacccaggcgucagauguguuugcagggauaacuggaagggguccaaccggccgauuguggacaucaauaucaaagaccacagcacgguaucgucuuacguguguuccggacuggucggcgauacaccccgcaagaacgacucaaguagcuccucucauugccuugauccuaauaacgaggaaggugggcacggagugaaaggcugggcuuucgacgauggcaaugacguuuggauggggcgaaccauuagcgagaagucaagauugggauaugagacuuuuaaagugaucgaagguuggaguaacccaaaguccaaacugcagauuaauaggcaggucauaguggaucggggcaaccguagcggguacucuggaaucuucucaguagagggcaagaguuguauuaaucgcugcuuuuauguugaacuaaucagagguaggaaggaggaaaccgaggugcucuggacaagcaacuccaucgucguguucugugggacuucuggcaccuacggaacaggcucguggcccgacggggccgauauuaaucugaugccuauauga

SEQ ID NO: 144560 - RNA, 1410 nt, Artificial Sequence
  derived and/or modified CDS sequence (opt3) from neuraminidase__InfluenzaA__ACI26354
augaaccccaaucagaagaucauuaccauaggcagcgugucccugacaaucucuacuauuugcuucuuuaugcagaucgccauucucaucacgaccgucacacuucacuucaaacaguacgaguuuaacucaccuccaaauaaccagguuaugcugugugaaccgacuauaaucgagagaaauauuaccgaaaucguguauuugacaaacaccacuauugagaaggaaaucugccccaaauuagcugaguacaggaauuggaguaagccucagugugacauaacaggguucgcaccauuuagcaaagauaacuccauucggcugucugccggaggugacaucuggguaacccgcgagcccuaugugucgugcgauccugacaaguguuaccaauucgcgcuaggccaggggacgacucucaauaacguccauucaaaugauaccgugcgagaccguacaccauauagaacucugcuuaugaacgaacugggaguucccuuucacuugggcaccaaacaggugugcauugcuuggagcaguuccucuugucaugaugguaaggccuggcuccacgucugcaucacaggggacgauaagaaugcaaccgccagcuucaucuacaacggaaggcugguggacuccguaguuucauggaguaaagagauucugcggacgcaggaaagcgagugugugugcauaaauggcacuuguacagucgugaugaccgauggcucugcuuccgggaaggcagacacuaaaauccucuuuauugaggaaggaaagaucgugcauacaucaaccuuaagcgguagugcccaacacgucgaggaaugcucuugcuauccucgcuacccaggcguuagaugugugugcagggauaacuggaagggguccaaccggccgauaguagacauuaauaucaaagaccacagcaucgugucgucuuacgucuguuccggacuggugggcgauacgccccgcaagaacgacucaaguagcuccucucauugccuugauccuaauaacgaggaaggugggcacggaguuaaaggcugggcuuucgacgauggcaaugacguguggauggggcgaaccauuagcgagaagucaagauugggauaugagacauuuaaagucaucgaagguuggaguaacccaaaguccaaacugcagauuaauaggcaagugauaguagaucggggcaaccguagcggguacucuggaaucuucucaguugagggcaagaguuguauuaaucgcugcuuuuauguggaacuaaucagagguaggaaggaggaaacugagguccucuggaccagcaacuccaucguggucuucugugggacaucuggcacuuacggaaccggcucguggcccgacggggccgauauuaaucugaugccuauauga

SEQ ID NO: 144561 - RNA, 1410 nt, Artificial Sequence
  derived and/or modified CDS sequence (opt3) from neuraminidase__InfluenzaA__ACI26365
augaaccccaaucagaagaucauuaccauaggcagcgugucccugacaaucucuacuauuugcuucuuuaugcaaaucgccauucucaucacgaccgucacacuucacuucaaacaguacgaguuuaacucaccuccaaauaaccagguuaugcugugugaaccgacuauaaucgagagaaauauuaccgaaaucguguauuugacaaacaccacuauugagaaggaaaucugccccaaauuagcugaguacaggaauuggaguaagccucagugugacauaacaggguucgcaccauuuagcaaagauaacuccauucggcugucugccggaggugacaucuggguaacccgcgagcccuaugugucgugcgauccugacaaguguuaccaauucgcgcuaggccaggggacgacucucaauaacguccauucaaaugauaccgugcgagaccguacaccauauagaacucugcuuaugaacgaacugggaguucccuuucacuugggcaccaaacaggugugcauugcuuggagcaguuccucuugucaugaugguaaggccuggcuccacgucugcaucacaggggacgauaagaaugcaaccgccagcuucaucuacaacggaaggcugguggacuccguaguuucauggaguaaagagauucugcggacgcaggaaagcgagugugugugcauaaauggcacuuguacagucgugaugaccgauggcucugcuuccgggaaggcagacacuaaaauccucuuuauugaggaaggaaagaucgugcauacaucaaccuuaacggguagcgcccaacacgucgaggaaugcaguugcuauccucgcuacccaggcguuagaugugugugcagggauaacuggaaggggucuaaccggccgauaguagacauuaauaucaaagaccacuccaucgugagcucguacgucuguucuggacuggugggcgauacaccccgcaagaacgacuccucaaguagcucccauugccuugauccuaauaacgaggaagguguucacggggugaaaggaugggcuuucgacgauggcaaugacgucuggaugggccgaaccauuucugaaaagagcagauugggguaugagacuuuuaaagugaucgagggauggucaaacccaaagaguaaacugcagauuaauaggcagguaauaguugaucgggguaaccguuccggcuacagcgggaucuucucuguggagggaaagucauguauuaaucgcugcuuuuaugucgaacuaaucagaggcaggaaggaggaaaccgaggugcucuggacaaguaacagcaucgucguguucugugguacuuccgggaccuacggcacaggaucuuggcccgacggcgccgauauuaaucugaugccuauauga

SEQ ID NO: 144562 - RNA, 1410 nt, Artificial Sequence; identical to SEQ ID NO: 144560
  derived and/or modified CDS sequence (opt3) from neuraminidase__InfluenzaA__ACI26376

SEQ ID NO: 144563 - RNA, 1410 nt, Artificial Sequence; identical to SEQ ID NO: 144452
  derived and/or modified CDS sequence (opt3) from neuraminidase__InfluenzaA__ACI26387

SEQ ID NO: 144564 - RNA, 1410 nt, Artificial Sequence; identical to SEQ ID NO: 144464
  derived and/or modified CDS sequence (opt3) from neuraminidase__InfluenzaA__ACI26420

SEQ ID NO: 144565 - RNA, 1410 nt, Artificial Sequence; identical to SEQ ID NO: 142375
  derived and/or modified CDS sequence (opt3) from neuraminidase__InfluenzaA__ACI26431

SEQ ID NO: 144566 - RNA, 1413 nt, Artificial Sequence
  derived and/or modified CDS sequence (opt3) from neuraminidase__InfluenzaA__ACI26442
augaaccccaaucagaagaucauuaccauaggcagcaucuccauugccaucgggauuaucucucugaugcuccaaauaggaaacaucauuucaaucugggcuagucacagcauucagacagguucccagaaucauacuggcaucugcaaccagagaauaauuacguacgaaaauucuaccugggugaaccacacauaugucaauaucaacaauacuaacguuguggcagggaaagacaagaccucgguaacacuugccggaaauucaagccuguguaguauuuccggcugggcgaucuacaccaaagauaacucuaucaggauugguagcaagggggacguguucgucauacgggagccuuuuaucuccugcucacauuuggaguguaaaacuuucuuuuuaacacaaggagcucugcuaaaugauaagcacaguaacggcaccgugaaggaccgcagcccauaucgagcccucaugucuugcccgcugggcgaagcacccuccccuuacaauucaaaauucgagagcguugccuggagugcuucugcaugucaugaugggaugggauggcuuacgauugguaucuccggcccagacaacggggccguggcuguccugaaguauaacggaauaauuacuggcaccaucaaaagcuggaagaaacagaucuugcguacacaggaaucggagugcguguguaugaaugguucuugcuuuacuauuaugaccgaugggcccuccaacggagccgcgucauacaagaucuucaagauugagaaaggcaagguaacaaaaaguauagaacucaaugcaccuaacuuucacuaugaggaauguagcugcuacccagacaccggcacgguuaugugugugugcagagauaauuggcacggguccaacaggcccugggucucuuucaaucagaaccuggacuaccaaaucggauauauuugcagcgguguguuuggcgauaauccucggccaaaggaccgcgaggggucauguaacccggugacuaucgauggagccgacggcgucaaagguuucaguuacaaguaugggaauggcguuuggaucggaagaacaaaauccaacaggcugcggaagggcuuugagaugauuugggaccccaauggguggaccaacacugauagcgacuucucugugaagcaggauguaguggcuauaacagacuggucaggauacagugguagcuuuguccagcauccugaacucaccggcuuagauugcauccgcccauguuucuggguggagcugguucgagggcuucccagagaaaauacgaccauuuggacauccggaucuucgaucagcuucugcggcgugaacuccgacacugccaacuggucauggccugauggugcagaguugccauuuaccauugacaaauga

SEQ ID NO: 144567 - RNA, 1413 nt, Artificial Sequence; identical to SEQ ID NO: 144566
  derived and/or modified CDS sequence (opt3) from neuraminidase__InfluenzaA__ACI26453

SEQ ID NO: 144568 - RNA, 1410 nt, Artificial Sequence
  derived and/or modified CDS sequence (opt3) from neuraminidase__InfluenzaA__ACI26464
augaaccccaaucagaagaucauuaccauaggcagcgugucccugacaaucucuacuauuugcuucuuuaugcaaaucgccauucucaucgcuacggucacccuucacuucaaacaguacgaguuuaacucaccuccaaauaaccagguuaugcugugugaaccgacaauaaucgagagaaauauuacugaaaucguguauuugaccaacacaaccauugagaaggaaaucugccccaaauuagcagaguacaggaauuggaguaagccucagugugacauaacuggguucgccccauuuagcaaagauaacuccauucggcugucugcgggaggugacaucuggguaacacgcgagcccuaugugucgugcgauccugacaaguguuaccaauucgcucuaggccaggggaccacgcucaauaacguccauucaaaugauacugugcgagaccguaccccauauagaacacugcuuaugaacgaacugggaguucccuuucacuugggcacuaaacaggugugcauugccuggagcaguuccucuugucaugaugguaaggcauggcuccacgucugcaucaccggggacgauaagaaugccacagcuagcuucaucuacaacggaaggcugguggacuccauuguaucauggaguaaagagauacugcggacccaggaaagcgaguguguuugcaucaauggcacguguacuguggucaugacagauggcucugcauccgggaaggccgacaccaaaauucucuuuaucgaggaaggaaagauagugcauacuucaacauuaagcgguagugcucaacacguggaggaaugcucuugcuauccucgcuacccaggcgucagauguguuugcagggauaacuggaagggguccaaccggccgauuguggacaucaauaucaaagaccacagcaccguaucgucuuacguguguuccggacuggucggcgauacgccccgcaagaacgacucaaguagcuccucucauugccuugauccuaauaacgaggaaggugggcacggagugaaaggcugggccuucgacgauggcaaugacguuuggauggggcgaaccauuagcgagaagucaagauugggauaugagacauuuaaagugaucgaagguuggaguaacccaaaguccaaacugcagauuaauaggcaggucauaguggaucggggcaaccguagcggguacucuggaaucuucucaguagagggcaagaguuguauuaaucgcugcuuuuauguugaacuaaucagagguaggaaggaggaaacugaggugcucuggaccagcaacuccaucgucguguucugugggacaucuggcacuuacggaaccggcucguggcccgacggggcggauauuaaucugaugccuauauga

SEQ ID NO: 144569 - RNA, 1410 nt, Artificial Sequence; identical to SEQ ID NO: 144559
  derived and/or modified CDS sequence (opt3) from neuraminidase__InfluenzaA__ACI26475

SEQ ID NO: 144570 - RNA, 1410 nt, Artificial Sequence; identical to SEQ ID NO: 144560
  derived and/or modified CDS sequence (opt3) from neuraminidase__InfluenzaA__ACI26486

SEQ ID NO: 144571 - RNA, 1410 nt, Artificial Sequence; identical to SEQ ID NO: 144560
  derived and/or modified CDS sequence (opt3) from neuraminidase__InfluenzaA__ACI26497

SEQ ID NO: 144572 - RNA, 1410 nt, Artificial Sequence; identical to SEQ ID NO: 144560
  derived and/or modified CDS sequence (opt3) from neuraminidase__InfluenzaA__ACI26508

SEQ ID NO: 144573 - RNA, 1410 nt, Artificial Sequence
  derived and/or modified CDS sequence (opt3) from neuraminidase__InfluenzaA__ACI26519
augaaccccaaucagaagaucauuaccauaggcagcgugucccugacaaucucuacuauuugcuucuuuaugcagaucgccauucucaucacgaccgucacacuucacuucaaacaguacgaguuuaacucaccuccaaauaaccagguuaugcugugugaaccgacuauaaucgagagaaauauuaccgaaaucguguauuugacaaacaccacuauugagaaggaaaucugccccaaauuagcugaguacaggaauuggaguaagccucagugugacauaacaggguucgcaccauuuagcaaagauaacuccauucggcugucugccggaggugacaucuggguaacccgcgagcccuaugugucgugcgauccugacaaguguuaccaauucgcgcuaggccaggggacgacucucaauaacguccauucaaaugauaccgugcgagaccguacaccauauagaacucugcuuaugaacgaacugggaguucccuuucacuugggcaccaaacaggugugcauugcuuggagcaguuccucuugucaugaugguaaggccuggcuccacgucugcaucacaggggacgauaagaaugcaaccgccagcuucaucuacaacggaaggcugguggacuccguaguuucauggaguaaagagauucugcggacgcaggaaagcgagugugugugcauaaauggcacuuguacagucgugaugaccgauggcucugcuuccgggaaggcagacacuaaaauccucuuuauugaggaaggaaagaucgugcauacaucaaccuuaagcgguagugcccaacacgucgaggaaugcucuugcuauccucgcuacccaggcguuagaugugugugcagggauaacuggaagggguccaaccggccgauaguagacauuaauaucaaagaccacagcaucgugucgucuuacgucuguuccggacuggugggcgauacgccccgcaagaacgacucaaguagcuccucucauugccuugauccuaauaacgaggaaggugggcacggaguuaaaggcugggcuuucgacgauggcaaugacguguggauggggcgaaccauuagcgagaagucaagauugggauaugagacauuuaaagucaucgaagguuggaguaacccaaaguccaaacugcagauuaauaggcaagugauaguagaucggggcaaccguagcggguacucuggaaucuucucaguugagggcaagaguuguauuaaucgcugcuuuuauguggaacuaaucagagguaggaaggaggaaacugagguccucuggaccagcaacuccaucguggucuucugugggacaucuggcacuuacggaaccggcucguggcccgacggggccaauauuaaccugaugccuauauga

SEQ ID NO: 144574 - RNA, 1410 nt, Artificial Sequence; identical to SEQ ID NO: 144560
  derived and/or modified CDS sequence (opt3) from neuraminidase__InfluenzaA__ACI26530

SEQ ID NO: 144575 - RNA, 1410 nt, Artificial Sequence; identical to SEQ ID NO: 144560
  derived and/or modified CDS sequence (opt3) from neuraminidase__InfluenzaA__ACI26541

SEQ ID NO: 144576 - RNA, 1410 nt, Artificial Sequence
  derived and/or modified CDS sequence (opt3) from neuraminidase__InfluenzaA__ACI26552
augaaccccaaucagaagaucauuaccauaggcagcgugucccugacaaucgccacuaugugcuuccucaugcaaauugcuauccuugucacgaccguuacacugcacuuuaaacaguacgaguguucuucaccuccaaacaaucaggugaugccgugcgaacccacuauuaucgagagaaacauaaccgaaaucguauauuugacaaauaccacuauugagaaggaaaucuguccuaaauuaguggaguacaggaacuggaguaagccacagugcaaaauuacaggguucgcacccuuuagcaaggacaauuccauccggcugucugccggaggugauauaugggucacccgcgagccuuaugugucgugugacccaggcaagugcuaccaauucgcgcuagggcagggaacgacucucaacaaucgacauucaaacgauaccguucacgaccguacacccuauagaacucugcuuaugaaugaacugggcgugccuuuucauuuggguaccaaacaggucuguauugcuuggagcaguuccucuugccacgaugggaaggccuggcuccauguguguguaacaggacacgacaaaaacgcaaccgccagcuucaucuacgauggcaggcugguugacuccauuggcucauggaguaagaauauccugcggacgcaggagagcgaaugcguguguaucaacgggacuugcacagucgugaugaccgauggaucugcuuccgagcgcgcagacacuaaaauucucuuuauagaggaagguaagaucgugcacauuucaccauuaagcggcagugcccaacaugucgaggaaugcucuuguuauccgagauaccccgggguuaggugcgugugucgggauaauuggaagggauccaaccgcccuaucguagacauaaacgugaaagauuacagcauugucucgucuuaugugugcuccggccugguuggugacacaccacgaaagaaugacagaucaaguagcuccuacuguaggaaccccaauaacgagaaagggucucacggagugaagggcugggcuuucgaugacggcaaugaugucuggauggggcggaccaucagcgaggaacuucguucaggauaugagacguuuaaagugaucgguggcuggaguaccccuaacuccaaguugcagauuaaucgccagguaaucguugacagcgggaacagaucuggauacucaggcauuuucaguguggaagguaaaagcugcauaaauagguguuuuuaugucgagcugauccgggggcgagaacaggagacacgcgugugguggacuuccaacucuauugucguguucugcggcaccucgggaacauacggcacugggagcuggccagauggagccgacaucaaucuaaugcccaucuga

SEQ ID NO: 144577 - RNA, 1410 nt, Artificial Sequence
  derived and/or modified CDS sequence (opt3) from neuraminidase__InfluenzaA__ACI26574
augaaccccaaucagaagaucauuaccauaggcagcgugucccugacacucgccacuaucugcuuccuuaugcaaauugcuauccuggucacgaccguuacauugcacuuuaaacaguacgaguguucuucaccuccaaacaaucaggugaugccgugcgaacccacuauuaucgagagaaacauaaccgaaaucguauauuuaacaaauauuaccaucgagaaggaaauuuguccuaaacugguggaguacaggaacuggaguaagccacagugcaaaaucacuggguucgcacccuuuagcaaggacaauuccauacggcuaucugccggaggugauauuugggucacacgcgagccuuaugugucgugugacccaucaaagugcuaccaauucgcgcucggccaggggaccacgcugaacaaucgacauagcaacgauacuguucacgaccguacccccuauagaacacuucugaugaaugaauugggagugccuuuucaucucggcacuaggcaggucuguauggcuuggaguuccucuagcugccacgaugguaaagccuggcugcauguguguguaaccgggcacgacgagaacgcaacagccuccuucaucuacgauggacggcugguugacucaauuggcaguuggagcaagaauauccuccgcacccaggaaucugagugcguguguaucaacggcacgugcacugucgugaugacagauggguccgcuucagagagagcagacaccaaaauuuuauuuauagaagagggaaagaucgugcacauuagcccacugagugguucugcccaacaugucgaagagugcuccuguuauccgagguaccccggcguucggugcgugugucgcgauaauuggaaagggagcaaccgaccuaucguagacauaaacgugaaggauuacucgauugucucuuccuaugugugcucaggacuuguuggcgacacuccaagaaagaaugacaggaguagcuccucuuacugucggaaccccaauaacgaaaaagguagccacggggugaagggaugggcuuucgaugacggcaaugaugucuggaugggccguacaaucggggaggaguugcgcucaggauaugaaaccuuuaaagugaucgguggcuggaguacgccuaacuccaagcugcagauuaauagacagguaaucguugacagcgggaacaggucuggauacucaggcauuuucaguguggaggguaaaagcugcauaaaucgguguuuuuaugucgaacuaauccgagggcgcaagcaggagaccagagugugguggacauccaacucuauugucguguucugcggcacuucgggaaccuacggcacagggagcuggccagauggagccgacaucaaucucaugcccaucuga

SEQ ID NO: 144578 - RNA, 1410 nt, Artificial Sequence
  derived and/or modified CDS sequence (opt3) from neuraminidase__InfluenzaA__ACI26585
augaaccccaaucagaagaucauuaccauaggcagcgugucccugacaaucgccacuauuugcuuccucaugcaaaucgcuauucuugucacgaccguuacacugcacuuuaaacagcaugaguguaacucuccuccaaauaaccaggugaugccgugcgaacccacuaucauagagagaaauaucaccgaaauuguauacuugacaaacaccacuaucgagaaggaaauuuguccuaaauuaguggaguauaggaauuggucaaagccacagugcaaaaucacaggguucgcacccuuuaguaaggacaacagcauacggcuguccgccggaggugauauuugggucacccgcgagccuuacgugucuugugacccaggcaagugcuaucaauucgcgcuagggcagggaacgacucucaauaaccgacacucgaaugauaccguucaugaccguacacccuacagaacucugcuuaugaacgaacugggcgugccuuuucacuuggguaccaaacaggucuguaucgcuuggucaagcaguuccugccaugaugggaaggccuggcuccacguguguguaacaggacacgacgagaaugcaaccgccucuuucauuuaugauggcaggcugguugacagcaucguguccuggaguaaaaacguccugcggacgcaggaaucagagugcguguguaucaauggcacuugcacaguggucaugaccgaugggagcgcuucugagcgcgcagacacuaagauucucuuuauagaagagggaaaaaucguucauauuuccccauuaucagguagcgcccaacacguggaagagugcaguuguuacccgagauaucccggcguaaggugcgugugucgggauaacuggaaggggucuaaccgcccuaucgucgacauaaaugugaaggauuacuccauuguuagcucguacgugugcucuggacuggucggcgacacaccacgaaagaacgacuccucaaguagcuccuauuguagaaaucccaacaaugaaaaagguucucauggggugaaaggaugggcuuucgaugacggcaacgauguauggaugggcaggaccaucggggaggagcuucggagcggauacgaaacguuuaagguuaucgguggcuggucaaccccuaauaguaaauugcagacaaaccgucaggugauugucgaccgcgggaauagauccggauauagcggcaucuucucuguggaggguaagucaugcauuaacagguguuuuuacgucgaacugauacgggggcgaaaacaggagacuaaggugugguggaccaguaauagcaucguuguguucugcggcacauccggaacuuauggcaccgggucuuggccagauggagccgacauuaaccuaaugcccaucuga

SEQ ID NO: 144579 - RNA, 1413 nt, Artificial Sequence
  derived and/or modified CDS sequence (opt3) from neuraminidase__InfluenzaA__ACI32764
augaaccccaaucagaagaucauuaccauaggcagcaucuccauggccauugggaucauuucucugaugcuccaaaucggaaacauaaucucaauuugggcuagucacagcauccagacagguucccagaaucauacuggcauuugcaaccagagaaucauaacguacgaaaauucuaccugggugaaccacacauaugucaauauuaacaauacuaacguuguggcagggaaagacaagaccucgguaacacuugccggaaauucaagccuguguaguaucuccggcugggcgauuuacaccaaagauaacucuaucaggaucgguagcaagggggacguguucgucauucgggagccuuuuauauccugcucacauuuggagugucgcacuuucuuuuuaacacaaggagcucugcuaaaugauaaacacaguaacggcaccgugaaggaccgaagcccauaucgugcccucaugucuugcccgcugggcgaagcacccuccccuuacaauucaaaguucgagagcguugccuggagugcuucugcaugucaugaugggaugggauggcuuacgaucgguauuuccggcccagacaacggggccguggcuguccugaaauauaacggaaucauaacugaaaccauuaagagcuggaaaaagagaaucuugaggacacaggagucggagugcguguguguaaauggcucuugcuuuacuaucaugaccgauggucccuccaacggggccgcgucauacaaaauuuucaagaucgaaaagggaaaaguuacaaagaguauugagcucaaugcaccuaacuuucacuaugaagaguguagcugcuacccagacaccggcacggugaugugugucugccgggauaauuggcacggcuccaaccgccccugggugucuuucaaucagaaccuggacuaccagauaggguauaucugcagcggaguguuuggugauaauccuagaccaaaagacggcaaggggucauguaacccggucacuguugauggagccgacggcgugaaagguuucaguuacaaguaugggaauggcguauggauuggaaggacaaaauccaaccggcugcgcaagggcuuugagaugaucugggaccccaauggguggaccgauacugacagcgauuucucugugaagcaagacgucguggcuaucacagauuggucaggauacagugguagcuuuguucagcauccugaacucaccggcuuagacugcauucgaccauguuucuggguggagcuggucagagggcuucccagggaaaacacgaccauauggacauccggaucuucgaucagcuucugcggcguggauuccgacacugccaauuggucauggccugauggugcagaguugccauuuaccauugacaaauga

SEQ ID NO: 144580 - RNA, 1413 nt, Artificial Sequence
  derived and/or modified CDS sequence (opt3) from neuraminidase__InfluenzaA__ACI32765
augaaccccaaucagaagaucauuaccauaggcagcaucuccauugccaucgggauuaucucucugaugcuccaaauaggaaacaucauuucaaucugggcuagucacagcauucagacagguucccagaaucauacuggcaucugcaaccagagaauaauuacguacgagaauaacaccugggugaaucacacauaugucaacaucaauaacacuaauguuguggcaaggaaagacaagaccucuguaacacuugccgggaacucgucacuguguagcauuaguggaugggcgaucuacaccaaagauaauuccauccggauuggcucuaagggugacguguucgucauacgcgaaccuuuuaucagcugcucccauuuggagugucgaacuuucuuuaugacacaaggggcuuuacugaacgauaaacacucaaauggaaccgugaaggaccguaguccauauagagcccuaaugagcugcccgcucggcgaagcacccucuccuuacaacuccaaguucgagucaguugccuggagcgcuagugcaugucaugauggcaugggguggcugacgauuggaaucucugguccagacaacggcgccguggcuguccuuaaauauaaugggauaauuacugaaaccaucaaguccuggaaaaagaggauccugcggacacaggagagcgagugcguguguguaaacggaucgugcuuuacuauuaugaccgauggccccucuaauggugccgcguccuacaaaaucuucaagauugaaaaggggaaaguuacaaagucaguggaguugaacgcaccuaauuuucacuaugaagaguguaguugcuacccagacaccggaacggucaugugugugugccgcgauaacuggcacggcagcaauagacccuggguguccuucaaccagaaucucgacuaccagauaggcuauaucugcucuggggucuuuggagauaacccuaggccaaaagacgguaagggcagcuguaauccgguuacuguggauggggccgacggaguaaaaggcuucucauacaaguaugguaacgggguguggauuggccggacaaaaaguaaucgccugcgaaagggauuugagaugaucugggaccccaacggcuggaccgauacugacuccgauuucagcgucaagcaagacgugguugcuaucacagauuggucuggguacucaggaaguuuugugcagcauccugaacugaccggucucgacugcauuagaccauguuucugggucgaguuagugaggggccugccccgggaaaauacgaccauauggacaagcggguccucuaucucguucugcggaguagauagcgacacugccaacugguccuggccugauggcgcagagcuuccauuuaccauugacaaauga

SEQ ID NO: 144581 - RNA, 1413 nt, Artificial Sequence; identical to SEQ ID NO: 142434
  derived and/or modified CDS sequence (opt3) from neuraminidase__InfluenzaA__ACI32766

SEQ ID NO: 144582 - RNA, 1413 nt, Artificial Sequence
  derived and/or modified CDS sequence (opt3) from neuraminidase__InfluenzaA__ACI32767
augaaccccaaucagaagaucauuaccauaggcagcaucuccauugccaucgggauuaucucucugaugcuccaaauaggaaacaucauuucaaucugggcuagucacagcacacagacugguucccagaaucauacgggcauuugcaaccagagaaucauaaccuacgagaauagcacaugggugaaccacacuuaugucaauauuaacaauaccaacguuguggcagggaaagacaagacaucgguaacccuugccggaaauucaagccuguguaguaucuccggcugggcgauuuacacuaaagauaacucugugaggaucgguagcaagggggacgucuucgugauccgggaaccuuuuauuuccugcucacauuuggagugucgcacauucuuuuuaacccaaggagcucugcuaaaugauaaacacaguaacggcacgguuaaggaccgaagcccauaucgugcccucaugucuugcccgcugggcgaagcacccuccccuuacaauucaaaguucgagagcguggccuggagugcuucugcaugucaugaugggaugggauggcuuacuauagguaucuccggcccagacaacggggccgucgcugugcugaaauauaacggaauuaucaccgaaacaauaaagagcuggaaaaagagaauuuugaggacucaggagucggagugcguauguguuaauggcucuugcuuuaccaucaugacagauggucccuccaacggggccgcgucauacaaaaucuucaagauugaaaagggaaaagugaccaagaguaucgagcucaaugcaccuaacuuucacuaugaagaguguagcugcuacccagacacgggcacugucaugugugugugccgggauaauuggcacggcuccaaccgccccugggugucuuucaaucagaaccuggacuaccagauuggguauauaugcagcggagucuuuggugauaauccuagaccaaaagacggcaaggggucauguaacccgguuacaguggauggagccgacggcguaaaagguuucaguuacaaguaugggaauggcguguggaucggaaggaccaaauccaaccggcugcgcaagggcuuugagaugauuugggaccccaauggguggacugauacagacagcgauuucucugucaagcaagacgugguugcuaucaccgauuggucaggauacagugguagcuuugugcagcauccugaacucacgggcuuagacugcauccgaccauguuucugggucgagcuggugagagggcuucccagggaaaacaccacaauuuggacuuccggaucuucgauaucuuucugcggcguagauuccgacaccgccaauuggucauggccugauggugcagaguugccauuuacaaucgacaaauga
